United States Patent Application Publication US 2007/0042382 A1 - sequence listing, part 6

SEQ ID NO: 8821 - DNA, 117466 bp, Homo sapiens
  misc_feature (1)...(117466): n = A,T,C or G, or insertion/deletion polymorphism (see Tables 1-2)
agaatctgtgagaaaaaagagatagaaagtctggagaagaattatgcagagaactcagattctcaacttaatccaagtgaaggataatgttagaaataataagaatctgtgagaaaaagggatagaaattctggagaagaattatgcagagagcttagagacaaatattaggagaccatgaaataggccaccatttgtgagccaggaatactagctgttgctttctcatactgcacagtaggaaatgtgaaagcagaaaatatttagattgtgattaaaactgagaatcctggaaaaactgaagttcaaaatctttctgggctctcccagcttcactgattccattcttttgatgggcaagcaaagttcactagtctgccagtcaaatagatgctaatggtaaaattggctctgtttgactttttgatgttacacatttgaaatgtgtttccatctaaaaggacaggctccaatctaaatggtaccaacaaaattacttcaaacaaaataggagttcatgtcactcaagatgcactaaaagttaaattgcaaaatggctgaaaaggagaggtcttggcttcagaaaagaataataactacctaaagaacaaaagttcgtgttcttggcaggaaattttaaaaaaagaaaaatcatctggtgtggtcatacagtgtatcaaactgaagaagaccctttctttactgagttaaaattaagtctatagaatcctaactggagacaagccatggaaaactaaaggcacttgcaagttgaagttacagggcaatggaaatgatgagtaattaaggaggaagtcagcctacagagaagacaatagagcaggtacacacagagaagcaaagccaacaagtcatgaattccctaaaagttgcagagagttaattaggttcttatcttcccagtctccactttaagtacccaagggctataattcctgtctttgggttctcagaaagttcttcatatccttgcaattaactattctttgacttgggctagtttaaatatgatttatttttcacccctgaaaaataactgccctctaactggaacatgcaagttttccagacagagtagagtagcagatagccataagcagccttaatccttcatatgacacatttctttaaaaaagtctaaagtatggatgaacaatgtttccccttcattgaacttttccatgtcctaagagataaaattctttttttttcgggttcatcttaacaaatcaagacattagtgactagttgaagaagtatgtttattcatttggggaacaaacattcattgagcatcaactctgtgtcaggctctattttaggaacygtgagtgaaagaagttaatgagacatgttaacttggaagtccttaagatttcccagaagagagacagatatgtcttaaacgtagtctagtacaaggactagaaacctgctcaaattagcttcagagaaaaagagaaactattattaggttggtccaaaaataattgtgggttttgccactaaaagtaatagaatgatacacagatatttcatggatgtaaacccaggaagaacagtcagatctcacacaatggcaaacaaaattaaaagacctagaacaatctctctccgtgtctctctctttctctgtctgtctgtctcatgcatgcacacctcagtttcttggtctctcatatctgtctctgtttttgataaacagtgcagattggctttttctacactcattgaagaaaatgaatgggctgggcataattccaacactttgggaaggtggggcaggaggattgcttgaggccaagagttccagaccagccttggcaacacagtgagaccccgtctctataaaaagaaaaattaaaaaattagacaggtgtggtggtgcatgcctgcccagctactcgggaggctgaggtagcaggatcacttgagcccaggagtttgaggctgaaacgaactatgaataccactgcactctagcctaggcagcacaaagccccatctcaaaaaaaaaaaaaaaaaaaaaaaggcgggggggaaaaaagaaagaaaatggttgtacaaagtgaacacaaatttccatttcatgtgatcagcaaagattctagaatctgtataccatgaatgtaaatccctaggagattgatcgagcttggtcaggtgtttggcttagcgacaaggaggcaggattatgtgactcagtgacttctagaaggggatcatggaagactctgagaaagccctattggcagagctggcaaatagctttgcatgtctgccacaagcatgaaaacaagtaaggccagtcaaccgtagttgtgctagaatcgaaatatgaatatgattcatcagtgtattgatgggtccaggaagctaggaaatctagaattattttatttgttttgtttgtgtttaagttaggagtgtctcttttattttggccattatgcaccccagccagtgcttagagacttgtgtgtgagtcaagctcaatggattctaagctttactcactcatcccatggattcactgagtaacatttgagaagccactggttacttcacttcaaaattactaggacttacctagaagttcatatttaccacccttttcaggtctagggagaagaatgtggaattgttaggaaactcatttcaatgtattataataactattaatatttattagaaatttatttactaggtataggactagactcttataacaaaaatgtataagatttcagagacccagcatttaaatgagaaggtagaatatacacatataactcaataatatattactctgtaatacatacaaaagaaagtttatttgggggaaaaaacaaaaacaaaaaaaaaagctagaggaaaccagagccaagaaagaagaatgattagttctcagtgaagaaaatgggaaaggctgggctaataatataaaatttgactggagccttgaagtagaatttgaaacaatggaagaaaaaaagaaagctattctaagtagaaaaataaggaattgacaatgaagaatgggaaaggcaggccagtgaactggtgaatttggcctaaacatagtgtgcaagagggaaagatagccacggagcccacagaggtgagttggagccaaatcgtgaccttaaaccctagggtactttgaatgtcctgaagacatctaatgattttcagcagatcagtcctgcatttttggataactgtgacaacaggtataaaagatgaactggaacaggagagaaggaagcacagagagattatatgggagtttgtcaccatggtgaaagatcaaaagggtttgaaccaaagagagattagcagtggaacagaaaataggagatggcacagaaaaccctagtagggtgtaaagacagaattggaatgggatgttagcagggggctggtggtgcacctggggaagaaagcagaggtttctggtttgggtgattgtctatatgaaaacgggataaacaaaggagggcagggcatgacgatacaacagatcagaaggaaacactggggaaacttatctgagccgtgttccccaacaaaactctgtcttgagctaaggaaaagaaaaagaggggaaggcctcacttcacccctgagtgctttttggagtagggtctctgggtctctcaagatcctttcaagtggccagtgaagtcaaaactattttcataacaatactgagacattactgcgtttttcactgtgttgacatttgccctcatggtgcaagaacaaggatggggactggtggtcattgtattcttcatcactgggcactcacaggaagagaaagggagagggacacggagaggccagcagatcaatgaattttaatgccacggaataggaaaaaccattgatatggtttcagattccacattgcaactttaagaaactacctcttgttgagttttggtgtagtatcaggggattatccagaattatctcctgtttttctaagtccatatctgtgtaacaccagattaatcaatataatttcaccaaaactacatgccgtaacagattggatgcagaagaagatctgagaatccaaatgtctgtttttaagccagatatttaaaatattagcaaaaatgtaaagcaatgccactcttctcccggattctttcatttggagaaatatagttatttttcataaaatgtacattatttatgttcacacataataggatttttgttaaaggacttactgagtaaagggctcttgagaccaaagagtttgagaagccccagcttaaccttccatatttcctgctctgaatgtggtgtccctcacaactgcaactaggcaggagagcaccctggaaggggttctcaaactactttgtctcaggaacactttatcctcttaaaattaatgtgaggcaggagtttgttctttgtttctaaaagttttgcctggctctggaaaatcgtagctcctgacttattctgcacttcatgacagtgtaatgttaatttgtccagttctgagaacaaaaaccaagaaggatgcatgttatttccccccacccccagagataaaacacaaattcctgtctcacattaaaggaagtgtcctgcctcccaaacacaggtctgttccaaacacttactcacatttcagtgagtcagaaggaaacagacagatattcatctccctgaaacctggctgacttccttcaaaaagtctgtaaggagcgtcaaaatcgtgtcaccggttagtgagcagccacctaagagctctcaggtgatagccggagttttagtaagcaggtgagtaccccagacaattcagaaaaaaatgccttcaggtgtttgtcaaggtgagtaagtgcagccagtaagtgactgataagaaaacaggaaagagcctgggactatataatttgggttcaaagggtattagtcataagccatcagcagcaacatctgatgcataccaatttaatactttaacaatgtgacacatcagccctatctatagtaaagagaagagcttgatttttatgaattattaagtccttcccaccttgagccactttgcttcctagaggcagtatctcaggcatcccattcagctcatagtagcattccatgaagatctggaatgatgacaataatgatgattattagactcataactccttaagcttgatttatgaaaacagttggttccttcacaaaagtagtcactggaagaattctggtttcagcaatgtgctggaaatttgtggccaaacttttggataaaacataagattcagacaagaaaaattaatatcctatttcttaggtttttaactaaaaatctcggatatagaatgttctctttccagatgtgagactgaaataatggaagaaaatggtcacagtctatgtcacggtgtaatgtagacagggagagtcacaagtgcatgtatgggctctcagccttttctctggccttgaagttaatctcctaaactcagtcattaaatcagctcttaattatctcggaggagaggaagtaatgatgatttctctctctctgtctctctgtcacacacacacacacacacacagctcttgcagcaggtattgcttaaatatcaccttggataatcataacttgtgagcagatcttctttcctgatgagttagtttctaacctggtcattctgcgcttatttttgtccctttctccacccacttaggaaaaacagagaaagggacgcaccgcgcagcccctaggcactgtggtttagggctagtgccctcggcacccgctgccaggagccgggcgctgccaagggctgcggaggggccacgttctcccggggactggggcatctcctgcgtgctggcgacaggctgcgggggcggagtggtgccagggcgggcgctcgcccgtcggatatgcccacccgtcccgtccagggcaggaaagcctgccagggcgccatccccatccccaccgcctccaggctgccggggctgggccgctgtacgggagccaaggtgcggtgccccgcgtgtggacgagccgaggtgcagcccgcggggccgcagggccggggtggggcggggcgcggcsggagcagatccggtgtttgcggaatcaggaggggcgggcyggggcgggccctcggcgctgcaggagctgcccagaaacttttccctgctctcaccgggcgggggagagaagccctctggacagcttctagagtgtgcaggttctcgtatccctcggccaagggtatcctctgcaaacctctgcaaacccagcgcaactacggtcccccggtcagacccaggatggggccagaacggacaggggccgcgccgctgccgctgctgctggtgttagcgctcagtcaaggtaagcggggatttcgctctgcatcggctgcaggagggacccgcgcggcttcctggggctcgctggagggattgggcggaactagggagcgagctccgtgtgttccctcggattccacgtggactcgggctcccagccaccaggamckgcttggaaagagatacttcttcgttcccttcctgctatcccaggccttgcgtccccattaggcgcgtctcgccctgtctgttaagcaccctccaaagtcatctcagtgagtgctttgttttaggtacacacacgcacrcacacrcacacacacacasacacacasacagacacgcacgcactcaagcatggacagtgtggggatccgcgggtgtcctggagaccgcgagtcctgcagcccaacttcccctggctcagacaggtgccgcgcctgccagagaccagggaaatccggaatccattgctgatggcggcctgcagctccccagcgcggtscttgctggctttgcagaagcctgcgagccccaaaatgcttatttttcaacccaaggatgtgaataatgcctctatttcttacttgaggacgaagcgctgtgtttcttcccggggggacttggaataaaccaagcgccacttaaatacttggcagaggggaattcttccttccyttctgccttcctcttattgttgtaacattgtctattcgacgaatgtaaacttaggctaggaaaagttcttttcacttctggatcctagatgccgcaatgagagaataagccggagcagccgctctaactgtagtgctgtggcagtggggcccgcccacctcctgagttcttttacactaagaggaggaaataaggctggggtggagagcttttgtgggaccatcgcctgagtactttttccctgaccattaggcagagctagagtgtggtcaaatttaagaattttagtttatttggagggagaaggagacacgtttgtataatgtagtttgaacagcgatcaaaacaaaacaaaaaagttgtctctgattttaaagtgtgtgtgtggttttttttttttttttacaaagaagataaatatttcctaagctgtcctcctttgagactgacattcagccacttgctattctttattgtggaggaatgaatcctagtccacgtcaacctggtggcattttctccaggtcagagataagagagaaatagcaccactgtccccagcccgagcagagaatgggcatcttaggttttctgtctcacctgtattgggtgcttcagatactttctccgggaaccagatgagttgttttgaggggccaccaaccctaatctacggatttcaggtaaagttgtacttgacattgaaaatgagtctctggaatacaactagagctaatagaaatataaacccaagcttttcatctctctgtaattacccagtattaaaataagctgtggaaacataacatcattttcttatctttgaaatgttgaggcttgttatgtaaagagcagtgagaaattctttaatggaatgtaacgctgcaaggcatgaagtcaggaacagagacttaacctggagttaataaggacacctcagggcaagcaagcagagatgatcgaaaataacatctgcaaaagttttgtgcatttattccctcctcctactccagccatttgtatactcaaggaacaggttttctcttaatttaagatcctcataagaaagctctctcatttgtgatatcacttgaggttcctggagaagcagcatcgttttttggtaccatgagtatcccaggttaacatgaataagtgaaatctctagctcagtagtatctaaaattttgtatggcattaccctatctgtataaaatttctcattcactatcattacacacacacacacacataactgttataaaattatagtatgtacaattgcatcatatcacatacaaaaattcaaatttaaaagctatgtatgtgacagagcttcattatgatgatcttaaattaagagaaaacctgttccttgagtatacaatatgccgtgttatgtatatacaattgtatatacatatatatacctgttaatatgtataaaacacatgtgtgtttagacatcttgtatcatctctagcatacatgcaaaccactttaaaaacatatcaccttcaaatcttattttaacacttacattcaaatttgctttccagaaaccttttcacaggtgcttaagaagaaaatgtactcatagtttagtcctatrtttatcacctttcagtgctcatttctaagtgcttaataccatgaaaatggtaaatgggcagtctgaggatgaaaaagagagaacataagaggcctagataatctataaactaaatataggccattagcagaaggcaaatgtaattttgaaatgaaggccatcacgtattttctccagtatgttcacaggtcaaggatagtccttccaccmaggttctagaccacatcttttcttactatccctgaaaccctgccccagcactcatccctcttcagtgcacgtcttcaaattctctccctaatgtaacttcccctcagtctgtaaatattctaatttttcttattgtaaaaaaaatatttcttttgatatttaatttcctcctgaaacatcctgtacttctggcttctgttctcttcctgtttttctcctcctttcctcgctgctctcccgtcatctccttcacaggctctttccttgttggtgtttgcagagtttcatcctgaatcctcctcttcattctgcagattgtctctgggcccattccctgcrcaggtccctatctccagccagcctccccttctgagttccagatcagtatttccatcagccaccaaatttctccagctagacagtctgtaagtaagccagattcaacatttccaaaactgaatttaatacgtgtcctccagaattttctcctctattggctaccattgtttaatggcagtattattatcacacaracatgaaagccaggaatttgtccccatgttttcaacctcacagccactctccaaattctcttggctctcctcccatccatgcaactcctgccacccagtcagtccctcatcttatgtctgtatgtaacttttaaactggattttcttttcttatctctccaacccattctcttcattttcactaatgatatctttctaagacacttatatgtttccaattactgctttgtttcaaatgttagtggctccccatctcaggtagggtaaagtgccaatttcttggcatgtcataaaaaggtacattctacctatccaatcttttctttactgtatgctttcctgaacacaaatacacattcacacacacacaccacacacatgcccacacatgtacacactctaaagccatctatatacaccattctttgttatgactacacctgatcataccatatttagtgtgaaaatattttccaaatactccctttgccttcattgcattgttgctttcaccccttttcactcatctctttgcaactgaccattatccaatgctagaagggtcaatcccaagcaaaattataaagtagagaacttttacttttgcaacaaaaaggaaagcttgaggtaacctacctttgctggytcccaccctaaaccacctctctggtctcatcctcagccccttaatgggacttaggccgccctctgataaagtaactttgctcccctatggcttagcagttatacctgcccaacctcagctaagctttgctctcttaatactaggtcctgagccactgtttgacttaaatttatggactggggtttaggattcagtatttacaatggctcatatatttctgatgtatggtctggtttgsaagtgattgcttaaatatcatcactgcctccccactttcctaagattaaaattccagtgttacctaccccttaccaccttgtgggatgatcaccaagacaggtagatttcaacatcaagagttagyggctgtgagcggctgtgtcagttaaattccttccgaagtggatgatgactactccctgtcttcatgtgctgacagccctggagatattaaaaggtagaagcttgttaatgtaaagagatgagcttctcatgatgtaattttagacattcagcaaaataaagacacatgttcagtcaatgtgtataaagtcaagaatttcaggaagaatggggaaaatatttggggccaaaagtgtccaggcatcacataaattctaccactaaagccataagtcttgactaccaacactgctcagcttgggatattagtaaaagatttagcacagcataaaacaagagaaaccatgaaagatcaccgctctgattggcaagtgaaagaaatggaaggtkggtggagttctttttttccagttgttcagtgaccaatcatttaccagcagaacatacagaagagtggctccctacaggggagaatcctagcactgcaaatcatgagacaatagactctgtgtatgacagtgattcctatgccccttcaggtgatccatagaggctttattgatctggctacagtgaatttcataaaactaatacttgataatattcttataaggtatctactttatgtaaggctgtgtgttaggctcaaggtggaatcagagaaaacttaaaacatggctgagagaggttggagtttatttggaaaaaaatccaaacwtggggaaaggaaattgtctcagccctgaagcatacttaaccaatttcagccccttgtcatcttcctttctagcagaagtccatttattgagttaccatcctcttctgcatagctaaaaaattgaggtgatgctgaagggtgattaggctggtcccaggcatctgggctgtgtctgatttagccatgggcatgtaatgcaaggttgaccaatgagatctgctgggtgacttatgggaaaagaattttcattcctaagagagatatttgttaaagaaaatattgtcaagtttatatgtgaaatttggaacaactacagccatcttgcaactgcgatgtcaaytagcttaaggataaagctagtatattggagttagccttatggaaagaaatggactttgatgttgtctttgaacttctgaattattggaatttaagactatagtatgtcttggtgtctttaaaattttcatataatttaaaacttggttatatcattttctataacttagagagctgtaacatcagtttccatagcataatakatgtcatgtgttcacaattaatgagtggtacagataacatgttgaattcagaggatggagagatatcattgtgatacattgaagtgtctagcctcctgagatgtcttcatggaaacaggtaagaatcattacaatttagatctgccatgaagaacctcagagatcctggagtacagtttctaccttttaaaatggatgtaagtgatactagaaaagcaagcaacataactagcaataggactcrtctcctagttcctggggcagatgtttaggttcttgaatagaatactgacgcaatgaaaacagaaggtccttatgcccacaatgtggtattcaagttgttcccagagagtgaaagctgagttgcagccaccagaccttgaagggccttgtaagtcatgatatagagcaggggttttatmctgagaacagtagaaaggtcttgaagggccttgagcaggggagtgacatgatcagatgaggagagtgggttggatggaggccaggtggaaagcaccaagatcatttaagaaagaatatgtttgggtttyagttttagtttaggagaccagttgtgagatgatggtggtaaaaactcagatagtggcagtagggaaagagactggaggatttattggaaagkcattaaagaagaagagtgaacaggatttgatgattgatttactatggaggtggagagagagggagaagataaggctgatgcttaggtttctgacatggacaagtcagttgattttgtgccattcactgagataagcagtgctgaaggagagcaagttggaggaaaaagatgatcagttcaggtcaacagattgagtttgagacatctggatgtacacctggatgtatatgtctaattagcaaatagttatatgtagtggcgttaggaacaggcaggaaagtaagatggggatagagatttaggagtcattggcacctagagaataactgaagataggacattaacaagatgagtcaggcaaagggactagaagagggctttggccatggctcaaggaactgctttagagggtcaggtgaggaagaggaaatgtgaagggagagagtaggaacagctggagaagtagaaagacaactgcaagaactggggtagcacagaactatttggagaaggaagaggtagtgaatagggtcaacttcttcaaagaagtcaagcaagttgatagtcttgaagggcagtctacatggagtgaaaaaagagaaatcagaacagagcggccagaggagtaatggaagatgaggaaatgtagagagtgtgagaaagtttggtatgatagtaaaagggaggagagagtagcaagagaggtaaaatgggagcagctgcctttaagcaaacatgggaaaggcttgcataaaaattattataaggagattttttatttctgttacttatggtgctgcatggtacacttgtaatgttttaaaattgcattgaggtatatgtatgtggcagagattcattgcacaagagaaactgagggaaggggaggagctttgatgactatacaaaggatattatcagagagaaaggagaggaagagagttaggtgtccagcacyagtaacagctctggcagaaaggagcccctgcttagaagctgcaggttatcatgggaaggtaggcaaagcagaccctgggctatgaaatagagaggatattaactaatcagggaaaggtgtgaagttgatccaggtatgcaaagagggaaagaaagcagaggtatggawaaaggtacctcccatcctccagagtggctgcttagattgatgagcccatgtatacattttggtttcaaacarcttttcacactaatgcagttatgattaataagctgtttttagggcatgtaatatataacactccaattccagtggcakaattaatatcagtgcgttagtcagatttcctaaaaaccaaacaagttcttttagaaatatagatttatgtttctccagttaagccttcaattccccttatttctatctagtttaataaagatccccaaaataatcttgttagaaataacagtctcatatatcacagagaaatagtgttgtctctgaaagattttgctagtaaaatgtgaaagctgtttgccctgtaacttagtgttgttttcaaagcatttcaaaacattttcattgaatcataaattagaaaagaagttgatgtctattcttaattttgttagtcataattaaagtgcttatattcaagtgttttatccagtctatgcctgctaactcttgaacacgtaatttacattttagaaccagtataaacttgaactgcatatttggctaatgttttcagctccatagactgttgggacagttaatgattttcaaatatattttacttcctttgagagacttgtctgttctgttgcccaaataggtaacagaaacyttgcaattctgtcagcaaagattcctgcattattatcttgttctgaaaaggtgactgaaattcttccatttattaaagtgtctagagacagtttttgctacagaagccatatataactcctgaccactgaaaggctttctgtataaaaatgaagttaatktttaaacagagcaatggaaataaaagagtgttcaaaaaatggaaataaaacacagcaatggaaataaaagaatcactgtattgtcagtgcaagagattacttcattgtgttttgaaaggcgagcaaagctattgcaccgatggacgccttgaacattggcagttgtcattctcccggattcatttgaaggtggcctttgtttgtctttgtgcaggcctgatctcatttccatggataccatgtagaaatgcagactgaacacaagctggcttcgggtcagttcagtcagacaactctattccaaattgtttaccagttgccttcgagtcctttagccaacagcttcttagatgcttgttagaatagagaccccaaaccatcctggatttcataacctcttctaaaccatattctgaatgctggtgcataaaaatagatatttcaaaataattgacttagtgttctatggtggargaggggaaggaaaaacttagccttggaaattggggcacttttatgtaatctttattattttttcagtataaaaatttaataaatagccctaatgagaaaatctaatgccacattgaaaaatgattaaaaatttatggaagtagtcatggtaattaagaaatgcctttattattacacagtatttaatttttgcccctcaaataatctgcctttaatatattagtgtcattttattattttttttgctatggttcaagtgagctatcaccttaactctttttaaaagtgaagtcccagaccgagtgcagtggctcatgcctrtaatcccagcactttgggaggctgaggtcaggagttcaagaccagcttggccaacatggtgaaaccctgtctctactaaaaatacaaaaaaattagccaggtgtggtggcaggttcctgtaatcccagctactcgagaggctgaggcaggagaattgcttgaacctgggaggcggaggttgcagtgagccaagattggtgccactgcacttcagcctaggtgacagagccagacgctgtctcaaaaaagaaacccaaaaaacaaacaaacaaaaaaggcagagtcccatgagctcctgccttttttcatgtcctctctctctttctggaatactctttagccccagcctccattctgtgcatcgtttaaatcttaatttcactgagrttcatgcaccctaggaaccctgccaatcttctaattcaatttaggtatcactcctcacttggacccttccatagcaatgttacattctatttcaataaccctttcagaacttggctatagttcttactgactgcaagctgagaagacaggcccatatcatcttcacttgtatcaagggttcttggcaccattttattcaatgagtgatgaatctatgagccatgtatgacagctactgtaaggggattaaagacacactttctgaatgaaggccaagctgaaaaatttctacttctttccaattagtatatgcaaaaataattctatttgtaagtgtatctgaatttgctaaaatattcctttagttgataaatttgttttcacttctttgacagagtttgtttgcttttaaaatgtttttcctttytcataacatgtctaactaggatagctctgttgacaagtaacaagatgaatgaaagtattaggacagtacagatatcattttttccccaaacccttttctgttccccttttctgttctcataaagcaacaccataatttatcttcagcttgactctctctcccaccgaatacattctttaagattaccttctgtcctatttatcattgtatttcaggagcctggctcatagtaagcactcagaaaatgatgtattaaaaaagaaaaaaaatcaaaattcaaatacagtaaattttaaaacttttatttattgtaaaatgtaacatacatgtagacaaatgcataaaaggtaaatgtacagctttttagggcttgggtttcattttactctacttagaattagtaattttgtttgttactatttcacggatgctgccacaagacatgaaacttctgggtaagagacaaaggtctttattactcattgcacagcaagtaacttgatcagcatatctgtgttgataccctttgcccaccaagacacagaggggcaacacagagggcccagatagatgcctaaacatgcagtaagttgcattacagaaaaggaacactgagcatggtgaatctgctgttttgtagcaagtcagaaagcctgttctttgtcccacagggagatgttacctcattcttcaaagatgctcactgcaaagacatccctgagaaatgctatggtaaacagtcatcagggtcttgcatctcaggcatactcagcagatatgtaggtgtgttagatctccatggaagcatgtctcccaacacagcttaacacataattttttaaaatgttgtgtaagcacaactcagataaaaaaataaaaataaaagatttccaggatcccagaagtcccctatatgttcttttccaatcacaaatccatttctctagtcttatttttttggcaataatttccttgctttcatttatactcctactagttaaatataccatctacactcaagggtttaattttgctagattttaagtatacacacacacaattatacaatacatattattttgtttttgaattttttaacattgcaattgtgagattaatctatatgttgcacatagatatagttcttttgttttcaccactgtacagtaaatagtatagtatttttatcacacagttcttcatcaccagattgctaagagattttttaaagtgacaattgagtattaattttataaatatttttctgcatctattggttattacataaatttttcttctttattaatgtggaaaattacattgattgatattaaaatatgatgaaaacctggtatttgtggtataaacccaagttgatccacatgttctttttataggttgctggattttgtttagaatttttgtattcatgttcatgagtgtgattatcctataattctttatgtttcttactctctctactgtattgtccctccatatgtctgcctacacttcattctggttagtttcttttatcctatattactgtttactaatttttgtttcaacagtgtgtattctggagttaaaacattcattgagttcttaatgatggttattatatttckcagtttatgagtttctatttggttcttttctaaatttctttgctaagatgtttaagtttagcttgtccccttcacaacttttgtaaagttagtgctggttcccatttatgttgctttctttcccctggtgcctgcttatcttagctagacgttatattagaaaaaattatttgacaaaattgtttgaggcttgggtgatatttttctacataaagcattttcttttttttctttttctttttgtttttttttttttttttttttcttgatgaagtccagctctgttgtccaggctggagtgcagtgatgcaatcttggctcacygcaacttccaactcccgggttcaagcgattctcctgcctcagattcctgagtagctggtaatacaggtgtgtaccaccatgctgggctaatttttgtagttttagtagagatggggcttcaccatgttggccaggctggtctcgaactcctgatctcaagtggtccacccacctcagcctcccaaagtgctggaattacaggtgtgagccaccacacccagcaataaagcattttcatttgcttctattgagacaataccctagaagttttgcagtggcagtgtgatgaccaatgaggtttatctgaggtgcgattattgctaattgaagcagtgccctggaggtactagaattccttatcagtttcatacaatttcagggcttgattttttataggttacccagacaattcattcaagggctgctttacttayggttcacatgtcatgtaaggagcagtggttttgagcataaactctattcctgggatttatcagataccccacttttgacaggtcttggatttcacttttcagatcctttttaggattggcaaatcgctttcttcactgtcctctagcaagacaaaaagtgattcaactccccagcactttggaaagccaaggcagaaggattgtttgaggccaggaatttgaacctagactggtcaatatagcgagactctgtttctacaaaagaaaaatttaaaaaattagccaggaatcgtgctgcatgcctgtagtcccagctacgccggaggatgaggcaagaggatcatttgagcctaagaggtcaaggctgtagcaaacctggatgacagaacaaggccctttctaaaaaaaaaaaaaaaaaaaaaagtgatccaactgtctgcctgagtcatttctctgaacttctttcttcaccccatcttcttagcaatttgatgctttagaagacatcttaaatatcttgttttatatttcttgcaatttttcagtgatcttcagtgggagagttggttaaaataacaaagtcttttattgccaaaggagaaaatctggagtagtgttttagagtccccttttaaaaaaatattgatttttaattttccaaattctcctcatactatttattgatgtggcattttaactgatagaaarttagattttttcaaaatagattaaaacaatattcaatattggttagtattctaaaattttaattttatagtataaaacatttttgaccaataaattcaactcactttttaatatatatctgtatatttgcttgtattaattactcccttttctttaactgtgaagtaaatgtgtccattgaaatactaaacttgattaataattttatcttgtggattttctttataaagttgaatatttaaatatctttagagaaaaatgacacatactaaaataattaacagaaaaaatatttatatttcttttgatatttacatgtgattatatgaatataatcttttcatagatatactcactatatgcaaatgaatactgcacttttatcacttaatatattttgtatatacttttccatgtgagttttatatttataactttaatgcatcctgccatgccatggttaactattgtcccattgttggatatttaggttgtttcctgtgggatattttgccccccactgtaaataatgtggctataaacatcattgtacaagaagttttttcttttcgttttacttttggatcatttccaaaaggggcattactatgtcaaagagtgtgtgtgttttttagctcttgttgcatatggaacagtgtagccatctgtaatgtggaatttaccaatttcatcagcattagattttcatttacttcttgaagtttgatggatataaagtggtgctccatatttatttccattctttttattcatgagggtgcattttttcaagttacgatttaaaaatgcctatcttttgaaaaaaaatatttttagattagggtattctagaaatttgagctagaagaaacctcaagatatcatctagttcagtgtcctgctttattcttatgataaccagccttgaagtgactaaagaccatgactccaacctgaacagaacactccagccagtatagtgtccatcattttaagctacccattggggctccctctcaaaatctctttgacaaactgccctttgtcttttattccccacaggctgattacaatccattttcacttgaggcatggcaatcttctagttaaaatttccacacttccatgggtcagaaccctttaagggagagggaagacattctctctgccagagcacttgactgtgagtaactgaatctgtagactgttctggttaccccttgacatgtaaccagtcaccccaaaatttagtgatatgaaaccacaacctcacttattatctctcatggtgtcttgggtcagggctttgagaatggcttggctggaccatctcactcgaagtctctcacatactgttagagggaggcagctctccctcttcctgtggtatcctcaagcctctccacatggtgccctctgagtaagttgacttcttgcatggtgggtagggcaccaaaggcaaccatcccaaaagaaactggcagaatggatgggcttttataaccttggctcagaaatcacataactgcatctattcatcaaagcaatcacaaagtctcacctagattcagggggaggagacttaagattccacctatggatggggagtgtcaaaagatttccagacatatttttaaacaaagtagtaacttaataaacttaatggtcctcgaccattcattgttttctttttctttttcttttttagagacagagtctcacgacgtttgcccaggctggtcttgaactcctcagctcaagcgatctgccctcctcagcctcccgaagtgctgggattacaaacttttgagagaccatgcgaggccccatttgttgtttagaccagtgtttgggcatggatattattgacaattggggccagataattttttttgaagtagtaaggtaggctgggggtgtctggtctgtgcattgtaggatattgatcatcagccctgtcctccacccactagatgttaatagcaatacactactccagctgccctagagtgacaaccaaaaatatgcccagacattactaaatgtcctctgagggataaaattacatccagttgagcaccactgcactaaatgaacatatattaagcacatttaatgttcatggcaacataaaagagaactccaactctggagagtaagttaaatcccatcatttttctgagtaactttagataagccataggcaaacaattccctaccttgttgggtcattgggaagatcgaaggggattataagtgaaaaagtatttttcatattgtaaaagcatatggaayattatttaaaaaaaaatcagtacacttggtatgcatccatttttatcatcattcatttatttaagggaccttcttaagggacttttatggagtgcctattgtatacccacagagtgtcaggcctggggcactggaggattgaggcagccagcccccttccagaagctcttctttccatttctagcatcacctggacaggagaatagtagcacctagatccttagtgactgtaaagtttgacacttaaagcaaggactttctaagaaaattgcatctttctttttttaataaaagtaaggggaaatgttatgccactgcattccaaaagcagttgtaagggtccttttgtgcttttggtttttgctctaatgttttgtttaaggactagagccataaaccaaacattgcagaacttaaatctttacacagtgtgtggtcatttccaaaaggcctacaacttctaagtttagttgctttgtttkttttttttttttttttttttttttggagggggaggagaggactttctacttgcattactgtcctttcaacatgaagacaatgctattggaaaatgagatttcctgtggtgatgtatgtgttcaaaagatctaatgtgacctatgatcatttcccgttgccatacacattctgagtaatgatgagatacactttagagtttgaagtctatttgcttaggttcagagtcagggtctgagtaaccccacttcctgtttgtgtgacttcctggagggtccatggaaggataatattttcttggcttttgtggtgtgcttctcgtgtgtgtcagcaaaatgcagcaacgtgtcatcctcctaaccattagacagcaattttcagaaatgtgaatataaatttgctcaggatatactttttatgttagagatgaaagtgggggccaggtgggcagatcactggaggtgaggagtttgagaccagcctggccaatgtggtgaaaccccatctgtactaaaaatacaaaaattagccaagcattgtagcaggtgcctgtaatcccagctaacaggaggctgaggtaggagaattgctggaacccgggaggtggaggttgcaatgagccaagattgcaccactgcactccagcctgggcaacagagcgagactctgtgtcaaaaaaaaaaaaaaagatgaaagtgggataataaattgctatgccttattaaatttctcaagaagtgtgcccccctcagtagtgtataatgatactaatcgtaaaaacaaaaaaaatctactaagtacttaccatttgttagacactgggttgagagttttatatgcattgtctgaccacaatgaggtaaacatatacatgatatctattttacagatgggaaaggaatggcttatacaaaacaaggaacttgctcaaggtcacagtactattcaaacctcagaggccaagctcttaggcactgygatatactactggctttgctcagtaaatggacctttcagcttaaaaaatgctgtacatcacaaactaacacagaaacagaaaaccaaacacagcatgttctcactcgtaagtggaagctgaacaatgacaagacatggaccccgggaggggaacaacacacactggggcctgtcggtgggggcgaggggagagagagcatcaggataagtagctaatgcatgctgggcttaatacctaggtgatggattgataggtgcagcaaaccaccatggcacacgtttacctatggaacacaaacctgcacattctgcacatgtatcccagaacttaaaataaaaagttacagttgtgaaattttttaaaaatggtgtacatctcttaatggtattagcatacttctgccatgccatcaccccgtaatatagtcagtcttctttttagggttctcctatagctagattcttgaaaaagttaaatgttctgtcaaattctaaatagaaaatacaatgtgtttatttgcatgaacatatgtgtatataggtatgtatattttaaattaatctgtcttttaattcattgatgtatatacctgcacagtagcctgcattcaagaggatttattagttaattaaactgttctttattaatctcctattatatccgtaacttattgttaggtggaaaggtgaagcaatcagtgtttattcagtaattattattgaaccacgaccatgtgcaaggtattattctaagtgctggggaatatatcagtgaacaaaatagacacagcccctctctgttagggtcaaaggcatatttattataaaacaagtgaagccgaagtttcaggggccctccctgtgcacttcccttcctctgttttcacagtgccagatattttcattcaacatgcaaaaggttaaggtcaccgtctcttttctatcctaacacaacatatttcaacaacaaaaacataaaaaaaaattcattaatcaacttcatcaattcagaggttctggattaatcactataaaacaaagcatgaggtgccttgaaatgctgtagctcctatgcagacttagaaaacagtcctaaacatgtgcatggcatcacaaacagggaggtgtgaaagtgaaaggagcttttcctaactacgaataatgataattttaaaaattcaatgtagcatgctagaagaaaaaatgaattctcttgttctctttagagaataggacttaataaaattgctgtcatgtgaagaggtgatatagagcagagccccaaactaggaaaaaacgagttrcataagtgtgtcaggcaatcagttggatttccaggaagtacactacagtaagagctgccaatagtgagcatcaaagaagttggaagaaaggtatgcacaggctaggatggtcagaaaagaccctaaccaaaatttatagagaagtggcttgtgaacagggtataataaaagaaatactaacttcagttatgtctgttttttccatatattgcctcaagatatgtgagacatatcctgctaatgagcaagttaggtgacaggcactgacttgctaaatacacacaaaatatgctattttgagagagagaaacggggagagagagagaaaaaaaaaagagaaagtttatcctttcacatagaagcaatttaggaagaagtggagaagtagaaagtgacttcatgagatggtatttctagtaactcttgggccaacacactttcttctgtatttcactgtcttcctctcagccactgagagacggcaagtctaccagatggtggcttaccctccagcaatcttatgaaaaagaragaatctattgagttgttaagaagcactaagtcataataaatggacattagaggcaattgcaatgggcttttggagatgttcctggcctgaagattgaatttttgaaatgtgaaagggcctccaaatgatctaaacacatgccacagtactccaggacttgatgcagttacaaaacaaaatgaaaacaactttggattgttttcacacaaaatataaaccttaaatgatacaactggaattattgtatatctgtccttatatttatatctgtgcataaatgtatggacagaattatcttcaaaacctgaaatagtaaattggaattttctggtgtaatatactttctccttgtattagtcagctcgggttatcataacaaaatatcacagactaggtggcttaaacaagagagacatattttctcacagttctggaggttaaaagttcaagatcaaggctctctcaggttggtgttggtttctactgaggactctcatcccggcttatagatgggcactttctcaccatgtcctcacatcacctttccctatgtgggtactgagagagaaagatctctggtgtctcttcttcttgtagggacatcagtcatactagattagggcttcactcttaggacctcatttgaccttaaccacttcattaaaggctctgtctccaaatacaatcacattgagggttagggtttgaatacaggaattttgagagacacaattcagtttgtaacaccccctttggcttaatggtttaaggggtttatttctggtcatggaagtgacgctcatgtatttctttgatatgaacacaaagtaagtgtcaaacatatgatatatggacacactgtaaaaaacaaatagccgcaaatcatgaagcaggatattatcgccagatgtcagctagagtctctctctcygcctcttaaaattgagataagatttattcaaatccctattccattcttataagaaaatgcagtgccctctcaagatttccgtgaactcccaggagatgtgcattttcattgacttgggccctcacttcctgactgcagagtgtttattctccactctgccaggtctggtatttgattttgaccctaggtacagtcaatacattagcctgatactgtctcatggatgctacaagatgccatgacatgcatgagtcagagaaggactttattactcacagcacagcaggcagcacgagtatgagcatgtgtctatcagttcccctttccccactctagtctcatagtgttacatgaaggggcccagacagacacctgcacacagtggggtgcaagacaggaaagaaacaatgagcttggtggacctgctgctttatagcaagcagtcagcaagccttctctttgacctgggggaagagattatctcacccctcaatattattcatcataaacrcaatgctaagaaatggcccaggtaaatagtagtcagggccttgcattcttgatatacccattgtattaagttgaatgktagtctcccccaaatatgtctctattctaatccccaacacctatgagtattaccttatctggaaagagggtttctgtagattgccttgaggagactgatggtaaaaacatgaaggctcaagctacttctggtgagggctcagaaggaaaccaggaatatgctgttggaaactgcagaaaatgtcctcattatacagcggcagaatatttgacctaattgggtcttattgttgttcagaaagcatacaacttttaagtgaggaacttggatatttagctgagcaaattttcaagcaaaatattcaaggtgtagcctgtttttacctgctagatatagtaaattgtgagaggaaagagataatttgaaggatcaccacttgatgatctggcaaattctcagcctatctagattgattatatattttatatatatatgctgagtgttatggactgaatgtttgtgtctctccaaaatgcatgtgttgaaatgcaatccccagtgtgatggcatttggagattgagtctttggaacataattaggtcatgtggatagagctgtcttcctgccttgtgaggatgcaacaagaagtcagcagcctgaaacttggaagaaggctctcaccagaacttgaccatgctgcacaatgattttagacttccatctccagaactgttaagaaataaacttctgttgttggccacccagtctatggtactttgttataacaggcggaatgaagacactcatattaggagtttcactgttagaaaagcatcctctgaaagcaaagggtgtggctagacatccttttgtggaaaagattaggtatgtggttgccagatcctctcaaccatctcagcaacaatcaaaatagtgatgaggttatccaggaaagatttcctgtggagagctcttttgtttagtggcatgaatcctgmattacctacataagaaacctgcaaatttttwaaaaaatgttatctcagcagaagcattgccatctttgactgaaggtgatagagaggcagaggccagaggagctgttgagagcccagaggcctatggttgacagcccagagaacagaggctcgaacaacagaggattattctcaggccttgaaatctaattgaaaatttcctgctaggtattaaatttgtttaaggttggtgacccttttactccttccaattgctgccttttgaaatgggagtgtctatcagatgcctgccccaccattatattttggaagcaaataacctattttctaggctcacaggcttagagatggagaggaattttgccccaggacagatcatgcctggcatctcactcacaccaaatttagatgatgagatttgggacttttgagctgacaatatttagatgagatttcgagctcagagttaattctgtaatgggttgagccatttggaaatgttgagataccttaaagaatgtattttgcatgtggcatgaatgtgaattttggggggccaggtgacagagtatagtgrctcccaaaaagatatgtccatgtcttaatcactggaaccagtaattggaaaaggggtctttacagatgtggtggttaaggatcttgagatgaaaacatcctggattatctgggtgagagctaaatccaatgacaaatgtttttgtaagagtggggcagagggagatttgacacatgtaaaggggaggaggagatgtgaccacagacatagagattggagtgatgcagacacaagttaaggaatgctcacagccccaagaagatagaagaaacaagaaatggattcttctctggagcctgcagagggagcagagccctgccaacaccttgattttggacttctgaccttcagaactgtgagagaataaacttctgctgttttaaaccacaacgtttatggtaatttgttacagcagccagagaaaactaatgtatccattaagacatatagaggggccagagacccatagaggactgtctttcccagctgactaatcctgtagttgttcctttattttgcctaaaaggttgaattttcttccttaactttcccacaaaatcattcatacaatacctttgtgtgtgcaatgagcttttgccaaggtgtggtgagatcagaggcaagccaattacagcaatacaaacagactaaagtactgttaggcatccctgttgctgcaggtttccaacccaccgctatgttgctggtcatcctttctttccctcttgtcattgttcctgcctccctcaaagtcctattcagcttcctccttagtggccytgcctctttattactgatgccctgaaagttttatctgcacctcagtttatcaaggatttttctacacaaagatagtttctctctaaaatataagtataaaatattttccccattaaataataaatgattgcatcagagtaatagtgtttaaaaagaactttgagagattcattgtagtgatggtgaatatgtgagtgggggggagtgaggggagtggtaataaggaaggaaggtaggatgggaccaagaaaacccggactcagaaggatgttggaattagaaccagtcagagctagagaagcaaggtcctcaaggctgagaatatgttctcatgcatccagacatcaaagttacaaagtggaagaatttgccaacttaaaatgtaagtaatgagtgtatttgaaaacaaatttgtcatcactgattttagcaaaatctgtgtaaattaagtacaaagaaattgtcatggttataaaaaaaatccttgggagcagtaaagggttatttatatgtaaaatatcattatagtcttaggaagttgagcacagcctggctttcattctgcaccacagactagagtggagattccctcaggatgaggactgtattttaaatttcattgatgattaacactttctacagggtgggaaaatattctcctactgtacactcttgctgagaatttgtaaggtttgtggatgcatttggatttatttggataaaaaaggatgagtttgttcctaatacacatgagatagatttggttttctgttcctggcaccagatagcaacattatatccaaatggtggcttggattgactggaaagtttcaaataacattaaaaaaattaatttctatttttatttttggagaaggaagaaatgattctgtcttaagcatcagcatttattgctttctattatttttatttttaaacaataccattgttgggctacctttggtgggcatttaggttgactccatgtctttgctattgtgaayagcactgcaatgaacataggcatgcatgtgtctttatggtaaaacaatttatagtcctttgggtgtatacctaataatgggattgctgggtcaaatgataattgtgttttaagttctttgagaagtcaccaaactgctttccacaatggtagaactaatttacgttcccaccagcagtttataagtgatcccttttctctacaacctcaccagcatgttatttttttactttttattaatagccttgctgactggtatgagatgatatctcactgtggctttgacttgtatttctctaaagatcaatggtgtggagcattttttcatatacttgttggccacatgtatttcttcttttgaaagcattggttaatttcctttgcccactttttaatggggttgtttggttttttgctggtaaatttgcttaagttccataccgattctggacatttaatctttttcagatgcatagttttcgaatattctctcccactccataggttgtctgtttactctgttgatagtttattttgctgtacagaagctttttagtttaattaggtctcacttgtcaattttgttttgttataactgcttttggcatctttatcatgaaatccttgccagagccaatgttyggaatggtatttccttgattattttccaggttttatactttcaggttttgcatttaagtccttaaatctatcttgagttgatttttgtgtatggtgtaaggaaggggtccattatcaatcttctgcctgtgactagccagttatcccaacaccatttagtaaatgggcagtcctttccctatttctttctttttttttttttgtcaactttgtcgaagatcagatggttgtcagtgtaaaactttatttctggggctctctattctgtgccattcatctatgtgtccatttttgtaccagtaccatgttgttttcattactgtagccttgtagtatagtttgaagttggataatatgatgcctctaactttsttctctttgcttagattgtttttgctatttaggctctttttgattccatatgaattagaattagttttttctaattctgtgaagaatgtcattaatagtttgataggaatagcattgaatctataaattggattgggaagtatggccattttaacaatattgattcttcctagccacaagcatgaaatgtttttccatttgtttgtatcatctaggatttatttcagaagtgttttatcagtctctgtagagatctttcacttccctggttatctgtactcctaggtrttttattctttttgtggcttttgtgaatgggattattttcttgttttggccctcagcttggacgttattggtgtataggaatgctactgatttttgtatgtcaatcttgtatcctgaaactttgttgaagttgcttatcaaatctaggagctttgagcagagactatggcattttctaggtatagaatcatatcatctgcaaacaaatagtttgacttcctctttttctatttggatgcctttatttctttctcttgtttgattgctttggctgtgactaccagtaatatgataaataggactggtgagggtcagcatcctcgtcttgttctggttctctaagggaatgcttcccacttttgcccattcagtatgatgttggctgtgggtttgtcatagatggttcttattactttgaggtatgtttcttcagtgcctaatttgttgagggtatttaacttgaaaggatgttgaattttatcgaaaggtttttctgcatytattcagatgatcatgtggtttttgtttttagttctgtttatgtgatgaatcacatttattgattggcatttgttgcaccaacttgcatccgagggataaaacctacttgatcatggtggattagctttttgatgtgctgctggatttggcttactggtactttattgaggaattttgcatctatgttcatcagggatgttggcctgaagttttcttttttattgtgtctctaccaggatttggtattagaataatgctggcttcatagaatgagttaggaaggagtccctcctcctcaattttttggaataattttagtaggaatggtaccagctcttctttatacatctggtaaaattcagctatgaattcgtctggtcctgggctttttctggttggtaagctttttattactcattcaatttcaaaatgcattattggtttatccagtttcagtttctttgtggttcaatattmagaggttgtatgtttccaggaatttatctatttcttctaggttttctaatttgtgtgcatagaggtgttcataatggactctaagggtttttagtatttctatgaggttgctgacaatatcccctttgtcatttctgattgtgtctattttaattgcctctctttttctttattagtctagctagcagtctatctatcttgtctattcttcaaaaaaaaagaactcctgaatttgttgatcttttttatgggtttttgtacctcaatttcattcagttcttctctgattttggttatatgttgctttctgctagctttggagytggtttgttcttgttgttctagctcccattggtgtgatattaggttgttaatttgagatctttctaactttttcatgtgtatgtttagcactatcaactttcctcttaacattgcttttgctgtgtcccagagattctcatgttgtatctttgctttcattagtttcaaagaatttcttgacttctrccttaatttcgttgtttacccaaaagtcattcaggagcaggatgtttactttagatgcaattatttggttttgagcaatcttctcagtattgatttctatttttattgtgctgtggtccaagactgtggttggtatgattttttttttaatttgctgagaattgttttatggctgattgtgtggtcagtgttagagtatgtaccttgtgcagatgagaagaatgtgtattctattgttttggtgtagaaagttcttagatgtctattaggtccatttgatcaagtgtcaatcaggtcctaaatatctttgttagttttctgcctcaatgatctgtctaatactgtcagtggggtgttgaagttgcccattattattgtgtggttatctaagtctttgtaggtctctaaggacttgttttatgaatctgggtgcccctattttgggtgcatacgtatttagggtagttaggtcttctgttgaattgaactctttacatgatataatgcccttctttgtcctttctgattgttgttggtttaaagtcaattttgtctgaaattagaatagcagcctctgcttttttcacttctcgtttgcttgatagatttttctccaactctttgcctttgagcctatgggtgtcatcacatgtgagaaggttctcttgaagacagcatacactcgggtcttgcttctttctccaacttgccactctgtgccttttaattagggcattcaggccatttatactcaaggttaacattgatttgtgcggatttgatcctatcatcaagttagctgattgttatacagacttgattgtgtagttgctttatagtgtcaatggtctatgtacttaagtgtgtttttgtggtagctgctaacagtctttcctttccatatctagcacccccttaaggacctcctgtaagggagaggtctggtggtaactaattcccttagcatttgcttatctgaaaagatcttatttctccttcacttatgaagcttaatttggctggaaatgaaattcttggttggaattgcttttgcttaagaattctgaatataggcctcaaatctcttctggcttgtagtatttctgcttataaggttcgttgttagcctgatggggttccctttataggtgacctagcccttctttctggctgcctttaacatttkttctctattttcgactttggagaatccgatgactatgtgttttggggatgatcatcttgtctggtatcctrcaggggttctctgcatttccygaatttaaatgttggcgtctgcaatgaggttgggraaattttcacggatgatatcctcaaatatgttttccaagttgctttctttctttccctttctttcagggataccaatgaatcataaatttggtctctttacataatcccatatttcttggaggttttgttcattcttttttattcttttttctttatttttgactgagttaatttggagaactggtctttgagctctgacattttttcatcagcttggtctattctgctgttaatacttgtgattgtattatgaaattcttgaagtgagtatttcagctgtatcagatgaatatttctttcttgaaatagtcattttgtctttcagctcctgtattattttgttgtattcctgagattccttggattgggttttgactttttctcctgaaccttgatgatcttcatttctattcatattgtgaattctagttctgtcatttcagccacttcagcctgggtaagaaccattgctggggaactagtgctgttgtttggaagtaaggagacattctggctttatgagttgtcagagttcatgggctgtttctttgtcatccgtgtgggctgatattccttcagtctttgaaattgctactttttggatgggttgttttttgcttttatcttctttgatgcacttggaggatgtgattgtggtgtttagtgaactggcattgtctctgtaagattatagggagcaaaggctcagccctgcactcctaggcttcatactctaactctgaggaactggcattgggcccccccgctttgttctctggtctttcaaggttaggcatctgctgcactggaggggccaaagtgttcatgctctatattgtccacaacactccgatgggggaatgccagccaaagctctttgttggggtggtggcagcaggatccatcgtcacttttatgtgacagcagctgtggcagcatggccgtgtgcccatgtgtcagctggggtggggctccagaaggagcagggtggcagcaacctgctggcggtgcatggtagcagtacagcaggggcagggcaccagtggggatgaggttgccagtattcctgtgtgcattcatgccarcatagcaggctgcccacacatcagctgggggtatggtaggatgagcatgcactggcaggggaggagagacaaggtcttctggcatgtgtgggccagcaaagcagtgttggggggatgtggaggggtgtgaggcatgggtaagcgcatgctggcaaaatgctggggagaggctgcggttggggaggctgtggctgggggaggctgcaggtaaaccattatgcatcggtaggggctgttctgctggagccctctgatggccaggcatggtctgtcagtgcaggagctctgatgaggtgccctaggaagcactctggttgggcatctgaagctgctctgcaagaggccatggtcaggctggagctccaggaaaggccagcagacaggagatgctcagataggactggccccatcccacgggcaagactgccctgctctgtccgggtccaacagtcaccctaaggctaaagtctcctataggagcacggcaggccttgagggatgggcgttcttggccatattctgctgttgttaaatcctctgggctccccactggctggagtctgcctttgccacctctctaagcagctgtctttgtgtcagctcaggtgtccgtgggggtcgtgagttccgctgctaggatgctggaggtccatggcaggagcaggccactcctcacctgttcaactgaccccagaagttgctggggaccaggaaggattcctggtgctgggcagcctcgtgtagggctcctagctttctcccccttcagcccagcatccgtgtcctccctcatccactctcaatgccttccctgcaaagacctgttcagagtgtgtgccagccttcccaatgtcctggtttctcggtcggagaggtttcttcsggctgcctctagtcagccatcttggctcccgtcttggtatagtttttgagtaacacaaagaggattatagaaagcatataaaatatttgtagaaattacatttattcttgaagaggtcatgtctaaaattagtgaaatactctttaaaacattttgttttttaggctgggcacggtggctcacgcctgtaaattccagcactttgggaggccgaggcacgtgggtctcctgaggtcaggaattcgagaccagcttgaccaatatgatgaaaccctatctctactaaaaatacaaaaattagcagggcgtggtggtacacgcctgtaatcccagctactcaggaggctgagatatgagaattgcttgaacccgggaggcggaggttgcagtgagcggagatcgtgccattgctctccagcctgggtaacagagcgagactccagtctcaaaataaataaataaataaataaataaataaacgtcaaataaataaataaaacattttgttttttaaatgaaaataaagggtactttaaaaaaataattttaaaataagttgaattatttaaaaatgattcaatgatttattgaaccacaaaggataaaagaagtaattcatataaataagcaaactcattaattttttatcttgagcaaaatatataaatyagttacccacggtcacctgtgacctaaaaatattaaatggaaaatttcaaaagtaaataagtcataagtttaaaattgtgtatcgttccgagtagtgtgacaaaatctcactccatcctgcccaggatgtgaatcgtccctttgtccagcaggctgtctgaggcccctgcccattagtcatgtaggagccatcttggttatcagatcaacagtcatggtattgcagggcttgtgtctgagtcacccttatttatttatttagagatggaatcttgctctgtggtccaggctgcagtgcagtggcatgatctcggctcactccaacttccacctcctgggttcaagcaattctcctgcctcaccctgccatgtagctgggagtacaggcatgtgccaccatgcccagctattttttgtatttttagtagagatgtggtttccccatcttggccaggctggtcttgaactccttacctcaggtgatctgtccacctcggcctcccaaagtactgggattacaggcgtgagccaccatgcctggccaagtcatccttattttacttcataatggccccaaagtgcaagagtagtaatgctggcatattattataattgttctgttttattattagttgttgtttttaatctcttgttgtgtctaattttataagttagatgttattataggtatgtatatatagaaaaaacagtatataccatatagggtttggtattacctattgttttaggcatctactggagggatgggaggatcttagaacacattccctgaggataagagagaattaatgtaattctcattcctgcactaagaacaatgtttaccacatcataaatactcaataagtttattgagtgaacaaaaaataaataggaaaataaaatctgtttattaactgtgtgtataaattcattagttttgtattatggacagttttgaatagagagagaaaaaacatagaatcatggagaaaatatcacaagttatcatacagatatgaacaagtttatacaagacttattacaaacatagagttcyatggaattgaagtgttattatgtgaccatttgagttactgagatgaaagacatttataaccattgcacttttaagtctataggcataaatgtagggatcccattcttaggacatgcctagcaaatgaaagtaagagtcaaatgcaacccaatgggccagagtttcctttatatattgtaaattatatatttgtgcatgtgacaataagattacacactgcaaatgatgttgaaataaaatagctcatgcttatagtccttctagtccagggtaggagaagcaattttctttcttcattattttatcctgattcttatttttattttattttattattattattattttttttttggtgaggtggagtttcactctgtcacccaggctggagtgcagtggctcgatcttggctcactgcaacctccgccttccgggctcaagtgattaacctgcctcagcctcccgagtagctgggactacaggtatgtgccaccatgtccggctaattttttttttttttttttgkatttttagtagagacggggtttcactatgttggccaggctggtctcaaacttctgacctcaggtgatccacccaccttggcctcccaaagtggtgggattataggcatgagccaccgtgccggcctttttatcttgattcttatacactaaaggaaaatttaaaagcagctacattacactcacaattgtactgtttgttgtgttactattcacatatattttacctttttcttctattctgaatattatttttgttattttattttcgttaagcactgtcatcttcttcacaattgctgtttttttaatggcaggataaaactctgtctagtttatatgctaccatttgcatattcacgcccctaatcttggacattcagataattttaatggtggttattaagaactaatttttttagattgctagaaattattaaagctatttaatatgtataaagtgtgttttcttaggccacctaagactgagagatgacataaaatacaaaatttttattagcaaaatagaatttctgtggcccagccacctacttacacacacagagagcctaagtgcctaaacactgttttctcattcttccggagtagataacattctcccagactctagagcatggttctcctggaaacctttgctgcccctaattgtgtcccctgtgtcctgatcactattgcaccacggcccctgccctcggcatgctctagttgctcactatcctctgccctcttccctgtcaatccttctgcagctactgaggaccagtccctcaggcatgggagaaatgtgctccaccttcttaaagtaatgacactctgtgctcacagttagagataggccttacagttcttatgtttttgttcaatatttaatggagacattgttccccctagaagtgcagtatgcatcttcaggaatgggccaaattgcaatctgagaggctgtgtcaaaaccacacctctattcccaagtccacctcttgcttttggcctttgctctcttctcttaacctgaatttcttcctatgtatgtccctgggcacgttttgcaaatgagtcccttctatgaaaaacccatccctgcccctggcccttcagtatatatagatatgctcaaatttgcattgaccacaaaagttagacccttttattttgccaccctttactacaaaatgcatcctttagttctgacactgatatcatagacatcaataaacttcccttgccaaatttttgtggttgaatataaaatgacatgttttgttttatacattatttacgctcttgttgttaaaagactttttcctttctgagtttcactgcatttttttttttkgggggacagggtcttactttgttgcccaggctgaagtacagtggcacaatcacagttcactgcagccttgaactcctgggctcaaatgatcctcctgtcttagacggccattgagattacacgtgtgagctgccatgctcaggctttgctacatttttagaacaaaagtaggttaactatatcaaatccccaatcatatgtttctcttttgaattataacttaaaattatgctccagaagaaagtaggagaataaatttcatatttactaaaattaattcttaaattattgtttccaaaaaaattatttcagagatggtcaggaatcctcaggaaaggagatcctgtaaatttttgtttgtttgatttagagacagagtctctgtcacccagtctgcagtgcagtggtgccatcatggctcactgcagcctggacctcctgaactcaagcaatactctcatctcagcctcccaagtagctggaactacaggcatgcaccaccatgcccacctaattgtctattttttgtagagatgaggtctcattgtgctgccaaggacggtcttgcactcctggattcaagctatcctcctgcctcagactctaagaaaaataagaaatctacatgagttaacttatgcttgactatctggtttacttatggatattaaaatggcaaccagcctgttataatctaggatgaaacagtatcccctttttattgtgaaaatagaggaaactagttagccctgcatgagataaaatgtatttggtgtaagctttcgtgagatttactggaatactttggcctggttactgtcaacacgtgtctgacaaggtcacctttgttaaatatgttgagtttgygatgctattattgcctttccaggcattcacatgaggacaaagaaggaagatttatactctgggtgataataggctcctggcaaagcccaagtcagttgaagactcactgcatctaatagagaactggaaatgtatagattaatgaagcaacctatgactytctgtgccagacttttcaccattgccgtactcttctctttcacaccctatgcctacgtttaacatgatgttcccggtgcctgggatgaactttgccttcctctttatgtagtgaattccaacttgtcctccaagatccagattaattgccatctcctctgtgaaacctttgaacttagatttaccctcttctcaatactgagctcaaggttctttttaccactctttattttaacacttatacattttgatgccattttttttagtaaaattaccataatggaaatgcaaagagaacagggagattttagttttatttatttgcagtatcctcaggaccttaaaaaacgcctggtacaaaggagctgtataaacatatgttgaatgatccattttttaagtatgtatagacacatgggcatggtttggaggaaggaaacaagatgaaccaaatatggttcttattatccatatgattcagttgaactatgaggacagacatcagaagatataggcactgggattgcaaagaagaaatacatgttgaattagacagaatacttccattaattttttatgagctatttagatatcatatgccaagtgtgaaatgatgacagagatctgaattgtaaatacatattaagagaaaaagtatagagaattgagattgtccagatttatcaaaagaggcaggatataaagggaaagatttaagtagctgaaaagagatttagtatcaatggaatgaagggatggtgataaagaaggtcatgctttgtgaggaaaaatgagcagatcatttatgaatagaaattctggacaataaagttgagagatgagccaaacctagactcagagtgggtgacattgcgcaagaaagacatttagccttcatgagtttcagtttccttatttgtaatttgttaataatagcttggttttgctgttccrcaggattgttgtggcactcaaatgagtcaggatgattctgacataggcagacataagcattaagaaacagtaagatgcgagttggaataaacattataatttaaatagaggaaaaatactggaaggaaatacatctgaattaactgaacttacagtagaaagaaaagattatgaatgatttttcccttgagttttctctatattccaaatcattattgaagaacatatagtaattaaaatgcattttattaaaaaaaaatcctaggtgctgagaaagtaagagtgaataaaagaaacaaggtttgacttctcaaggagcttacattttagtaggcacagacaaaagaatatggctatataagataattttggataattgctctagtagtgatacagtgatgaagaagggtgctgctgctacacagagggccaagggagagcagagacctatttgagcaaagtcctacatgccgtattaggtgaggatgttataggcagtggaacaggcagctgcaaagcgcataagcagaatgagctgcatgtgttcaaaaaacagaaggaaagtgagtgtggctggaacacagggagggaggacgagagtggtcggaagtgaagtcagaaagatacaccagggctcaatcatgaaggacctttgaatttacagtgaggacattggattttattctcagttcaatggcaagacataagttaataatatayatctatgcatatatagtaacacatatatgcctatatatgtgaattgctgtataattgaactgctaaatgataaaatgaactccatcataatttcctgccattaaatgatctgcccaggtctaattaatgggggaaaatgaggtygttttatgtacagtcacgtgtcctttccagaattaggtattttaaargtgaaagcagtttggcatcatctctccacgctaatatgttagatgattgataacatattcaaatagcatttattgagctctccacaatggggtgaagataaatgttggttgaaaacaccaggtattttgcatgccaattctggatctctgcttaatttgctgttattttcttttgcatttttttattattcaaaaataaaaaggagcaatggagcatatgaaaaatagatgttaaggagaaaatttgcagatgttaagctttgcagattttgctatagagtatttcagaatgagtatttgtgtttctcttcatggcagcacattatttgtaagaaataaaaagctgaattccttgtgtggacaaatccctgatacagtgattttggcacttacagagggacgttaactacttaaagtccccgttgcttcatcattgacttcattatcattttggagcactctacagaatctgctccctgaaatgcagaggckcaatggaagagcaagcctttttcttccggcctttcagtgcctaaaacaatagacatatgaaataccatgcacttgcaatgctgcctagaaagtaggacatttctttgtgaaagcacatgttaatggaactttgatgtcaattttaaagagtccattctgtcttcagtgtctgcgaaggtaaatattgatcttaagcaacatgaggcatattcccatctccagagagagcattaatatccacacaaccttctttctgtaggatgaagaactggcagcattaatgctgtcagtgtcatacagagaaacatgatttgccttattcctttccttcattccctttccatcagaaataagaattttcaaaaaaaataaaataaaatctatcaaggctttatatgccttggtctttgttctgttttttgaaatgattagcatttctcaatcattcagaaagaagcatcaaaaacaaaacacttttgacagttcccactggaataaaaaagatatgacaccaatccctacattttcatcctcaaaaatgataatgatcacttctgaaagaaaatgataacaattttcaaggagctgtgattttctatctcctttgatgtagtcatcaatgccttttcgacagatgtttcatatagagtccatgtcaagatgttcaaggtgattcagaataaatagatgatacccttcagcccttgcccttgggtggcttagagtcttgttgttttgggaaggacaaatataactcaaattacttaagaatacttagagataatttagttgttttaagtcttgtgttcaaattttgtcttcatcctttcctctttccagctgtgagatatacttgtcccctggaacctcaaaattctctgcaaaacaaagataatattagtaactatcttctagcatttccatgaagattagtaagataatgaattatgcatatatagtatttagcttggtgccgggcctccaaataagtacttaaaaagcagtagttattttttctgggtaaaygttgataagtaataattattaggtcaagcaagttttcttaaaaatggcctttgagaattatacgacacacttatattcatgaattgtaaatatgtgctatttcatatttttcttaataggcattttaaattgttgtttggcctacaatgttggtctcccagaagcaaaaatattttccggtccttcaagtgaacagtttggctatgcagtgcagcagtttataaatccaaaaggcaactggtaagaatattctcttctttatkatttcagtaaaaatacaaaataaatttcatatttgacttcaattgctttttcaaattggtgcctgactgtactataaatgggtggccctcaaatatccttaaatgaacaatctttctttgagagttgacaactgcagactgatcattaatgggatggtataatggttcatttttaaaaacctggatagaaagttttctctaaatattcaaaagcaaatttataataccagttttgaccattaatacataggtaggtagattgatagaatgatagatttgtcttcatttctgatcatgtaaactgatattcattgaactttgtaaatcattacctagttattaatgctatctctggaccatttctaaatggtagaattgtttcctacatttttttctttagcaaggttttgtctacttgcttcattctaagttaggcttttgccctccttgtggtgaagggtcctcacaaatatcaatgcaaaatgtacaaaggtggctttctctagcatattaacaccttttgtttttgccccaaagtgctcccagtttttacatgctatgtgatggttacattttcaaaccatggcttttctacccaggtgaaaaacaaccacctcaatggagatggaaatctagttcccataatactaatgcaagtgaacccagagaaatgaggtaatttgaaagttgtatttgggaagaagcgctgtagctcctattctgccagagttmatgcccactggtggacacaggtcctgccatggggaccttatctccttgttgcagcaggaggctccaaccatccccactcaccctggaacttcagattctgaatctccactctctrgagctcttttcagtgattaaatgggctgttgttggcttatcaaataagaaccgtaatgtatggccaagtgcagtggctcacgcttgtaatcccagcactttgggaggctgaggtgggaggatcacttgagcctaagagttagagaccacctgggcaacacagtgagacctcatctctattaaaaacctraaaatcagctggatatggaggtgcatgcctgcagtcccagctactcaggaagccgagctgggaggttggcttgagcccaggagtttgaggctgcagtgacctatgttggcaccgctgcactccagcctgagtgactgagtaagatcctgtctcaaaaaaaaaagaggaaaaaaccgtaactgtaattcataagcctttttttctgtgtgaacttccatttgatactctaaacaattgaattcaaagaaaggttcaggatcacatgttggggcatgcctgtctatttgatgaggaaacaaaatgaaatcatcccctgagagggcagcatttctcagcaggcatcttggaggatgtaaatcgtgagctgggttttaagtagtgaggatgaagaggctggagatgagtgttaactaatgtgaggagacttagaaaacaatgcatgtagatacagtttgtcaattgtctagaaggataagaacatctggttggaaaccaaagattggcaattattgtaaccatttgggatacgagagagagttgcatgtctaacaattatcaaatgatgctttgataatcataaagtggtgaggaggctagaaagacaatatggtcggtatattttgaccttggaatctagcagatgaagtagctaatgacccacagttttaaatattcagccctaattttttccctcagactgctatattaaacaattcattcaacatctccactttaatgcccagtagacataccaaactgaactgggagaacacaagtatctgattttctgcacaagctaatgaggccaaaaatctttgacttgtcttctttctcctcccctatatcttatccatgagccagtcctgttaatcctatcaccaaaataccaattatacctggccgttcctcactgtctctcctgatgccaccctgatggaagccaacaccagctcttacaggcactgctgcagcagcttctccacctgccttcagcttcccttcctgccagctttattctgctgtctttgctctagccagtgtgaactgttaaaaacatggctcggccaggaacggtggctcatacctgtaattccagcactttgggaggccaaggcgggtggatcacttgaggccaggatttcaagaccagcctggtcaacatggcgaaaccccatctctactaaaaacacaaaaatcagccaggtgtggtggcgggcgcctgtaatcccagctactccagagtctgaggcaggagaatcgcttgaacctgggaggcagaggttgcagtgagccaagatcaagccactgcactctagcttgggtgacagagtgagactccatctcaaaaaacaaacaaaaaacacagctcattccctagattaaaattccttaaaggatgctctgcgattgggtgtcagcctctctcctattatcatcttttacaccttctcctctgctttctatgctccaagaactaagtcttttgtctgttccttgaacatgcctagctcattcctgttgcaaagcttttgcaaattattttctcctgcctggaagagtcttccctaagatcatcactcaaatggttttcatctttcagtctcagctcaaatgtttcttcctcatagacctttcagagcaaccctatctatatagcactcgactgctctctgagtcactccagccttacaggtggatttattttctaatgattagtactatcttaaatgatctatacttgtttatatgctcattatctgtctcctgccactgtctctgagttcagggacactgttttgttgactgctgcattctccacacccagagtgatatctggcactgagtaaaggatcaacaattatttgttaaatgactaaatggaagtcccaattctaaatgattcatcccaagtgctatacaaagtgagctatagtagactgacttaagatgtttgagctgaaagggagcttcagatgaactccactgttctagttcatagacatggcctagctgaggacatctggcaccgagtttgaagcaattcttttaagtaacagctttcctggacagagtaaatctaagagccaccatcagtaatagacattattgaaggtgataagcctttcaaggattgtaaggggctcaaccactggccatgctgctggttggaagttgaacaagacgaaaagggacacagagttgagaggatcccaccaggcagagttctgggaacatgagaggcagccatatctcctttctctgtccaggattacctctaagtatccaagacrttgttgaaagacaagtatatttgtagtttatagtgagatcctagtgctggtaagaccagggacactggacatttctaaatcctgcctggaccttctcatgacatccctgaatgatgtataaacacaggacaataggtctgggaagcaaggcaccactctattattggctgggccagggctttgaactccagtatagagctttctggcaaggtgtagcactgagattaggctcaaggcctaaccaccagatgatacaagcataccccaccatgcaagaggaagagacagcacctgtctgacctgaagggctgaaccatatggaattcagaagcaggaaggacagagaacaaaagttggccaagcaagtctgtctgggtccttttgttgatctggtcttatgaagcaaagaaacmagagaggcaaaaccatgggcatgattttctaaactacatgaggtgcaaaaaatgcaaaacatagttgttggccttaaggagtgtaaaatagagtcagtgaggaagatttatatgcagaataggcaactttgaataatatagaagacatcagtcagtgtaaaccccttgcagttaatggtgtttgttttctttcagtgtcactagctataataacttaagagctcattttcttttcccaaggcctgggtcattagagagacaaggttttctcatgacctctgtcatttgcccagccctgccaaggtaccttgccacagagggcagggctgtggccaggatccaggtgaatgggttatcccattacagtgctagagtgggccatgttaggacaagcagtcttcacgactctcaggctcaaggaaaattatatgaaacttggaacccagaattgcctgtttgttttgacagtgggccctgtgcccttctctactcttaatttatgacagttgcataggcattatggaagtagcagatgtgggaaggactgtttaaacattgactttccttctgatactaatcaagttagttttggacacagaaattggtatgaccatgaattattcctttagcaaattgcgagttctttttccatggatttatcatgtaatacatgcacacacacacaactttgttttctttattcccttactgcttattctgaagctgtcattttggtatctttttcctctgcttactttgactttctttrtaatctttctatctaagtcctgacttcactcctttccctcagacaactcactgaaggctctagtctgagtattcttaaatcacactctgttatttttaaagtacaattttagctctgtcatgtgtgccatgttttctaagaatttatgggcatatttacatcaggatctaccagattttaacaaaataatcttaactcttttgctagtttcatttatgagactttcattgcactatgaacttcaactctagaaacagtggtgacatggctttgataattctggagcctttttaacagtctcaagtgagcgggataattttaaaacaagctgacctcccaagtagagtacctgggcagccctctggctgtaagtaaggctgtggtctgttctcttttcggtgtaggcggagggccatcccgcttcagagccctcacttcacacacaggatgttccaatgtggatgatgcaattcttatcacaaacaatctacaaaggattgagatatgtttaaaatcatttcctggagtttgtggtgatatgcactctttctgtttgtctaatctgaaggcctgttgcaagaacaatctgagctcattatgtgactcaaaaaccagagagaactgcaatctctctgtgtgatgaggactgactgggaattagggtatttccagttgtagaaatgtctttcattctaacaaggactagtgcattctttttccttaaagagagaggagaaatagaaagaacaagtgtcatagcaaaaaataaaaataaaaaaaatccacctatatatgagcttatagttttaactttttaattgagaaaaactttaataaagctctacatgtgttatgaatatagcattgtcatccacagatgtgcctataggagaactttaaataaaaaaaaaagtttaattctataacagacatcaaagattatgtcacgtgatactttgataataacaccacctggtatttattgagtactctttccttgccaaacatgtaatacccataattactctaggagctttgcaaaattattaccccctttacaaatgagaggagtgtgactcaraaatgttaagtaattaacctaagattacagagctgataattaataaagataggggaagctaatgcaaaatgagacaaaatgttccaaaygtacatatttttgtaagtatccaagaaggagagtgacaggatgtagttggcatttataaataatatttaaattttattttaacataaactttatgaagtaagagaaactttcagaatcttgaatgaaaaattctgttagagaatttccaatgttagcatcattggctttaccatcagctgtttcctgggcaaagatgatagttaccatccatcttttcatcctatcatagacaggaatttcttgtatgaatatactcaggagccggagcacaagggttttaccctcagcttccccaccactccctgggtgactttgggaaagtcacacaacttctctggagcagaaagtatgccatccttatcaaactggaatgttatgagcaccttgtgtgagaataaaagtaaagcacttcagggctgggctyggtggctcatgcctgtaattccagcactttgggaggccaaggcgggcggaycacttgaggtcaggagttcgagaccagtctggctaacatggtgaaaccccatctctaccaaaaccataaaaaattagcagggcrtggtgrcaggcacctgtaatcccagctccttgggaggctgaggcaggagaatcacttgaacctgggaggcagatgttgcagtgagctgagatcataccactgcagtctagccttggcaacagagggagattccatctcaaaaaaaaaactgggtcctccctacctcttcctatcccctcaaccaattctcatctgtcatggatgagcttccatgcatattggattagcttcatgaagtccatttcttcttcttggccaagaatgctattctattccaatcctctttccaaaataatcatgtctttgtcttttatgatatagccttttaaatattagccaattatcatcctttatatctctttcaaagataaaagtctcttrccattaggttgtcctggcagtgccatttaacatgccaacttcatttattcacagagtttgcttatatcttatttaattaaattaattaattaattaattwatttgagacagagtctcagtctgtcaccaaggctggaatgcagtggctcaattttggctcactgcaacctctgcctcctgggttcaagtgattctcatgcctcagcctcctgaatagctggaattataggcatgtgccaccatactaggctaatttttttttttttttttgagacggagtctcactcttttgcccaggatggagtgcagtagggcaatctcggctcactgcaagctccgcctcctgggttcatgccattctcctccctcagcctcccaagtagctgaaactacaagcgcccaccaccatgcctggctaattttttatatttttagtagacacgaggtttcaccgtgttggccaggctgatctcgaactcctggcctcaagtgatcccatctcagcctcccaaagtgctgggattacaggcgtgagccaccgagcctggccctccttttattttaaattcataacataaatattccttttcttcttccattcaattttattttttactcataacttagtccagtgtttgattctataaagacattagaaatccaactgtaatatattcttacrcttttattttaactttaaatacttactgttaaaaattttataaatacttattatgctattgctgtacaattaagccatcctcagcactattaatacaggtatccaaagtggcatgtctcatctcaacaatgacaaccccccaagaggcggaggttgcagtgagccaagatcacgtcactgcactccagccggggcaacagtgagactccaactcaaaaaaaaaaaaaatctatagtaggaaggacactttaaatatctcctgatttgcttcttcgttccttcactctggatacaagtttgtgtgtgcacctacaaacacatgaatacatacacacccattgtttgtgacttgcacgtgggagagatatgttgctccagaatgtctgctgtgctttaatgatctataaaaatcctccatgcctcaccaacaagtcttataattttaagctttcctctgtggtaatgtgtgaatatctgtttctggaataaagttcatttacaaaggtgactgggacttacacacacaccttcctagtatctagttgtctaagacatttrcatccatctaactccatctaaagaaggatctggggaatgctaagtggcacaagtggcaactatttattaacttgctgtgccccatatgatgggaaagcaaacagtgcytctctagaagagttctaagggaacttaatatggtaaaaagaaccagcaattttgarcaaaagggcaggggtgcagatatataggttttgctttcacttagacccttgaagtcagtttctttaaatgaaaacataaatagttatacacttgacctcacagagtgtttataaggatcaaaggagataatgcacataaaaaatgctttatgagctataaagcagtttacaaatgttgctattccastttttatcattgatgaaacaaccatctgccaaagcacctagttgaaaggtactagctcatgagctttgatttgcaaaatgtgatggtcttaamattatccccctctctccctccaatagccaagaacaggaatttgtatcatcacaaggctttagggttagtattttagcttttgattttaaattcaagaaaactgcatgtcggatgagaggaagtaacataattagtttttattgattatatttcttctagtgccaaagccaatttctggaatttttatgagacagaacagtaagcttaagatgttttagcaatagtgaagtcagtggactctttatcgtgaaacggaaagatgctgaggatctagccatcccgctaactgaggagacaatgtggaagcctaagaagtctgaggcagcataatgaggcctaaatactaaaattgcctttcaatatatgccaaagaatttaactattaaatttatgatagcagtatttccaaataaaacctaaaaaatgaaatgactctttttacctgtcttccttcttcccagagaygggcagccttcacgggtgaattctttccatcacaaattcattttatgtttaccagcagaaagcaggtaccatttagagctcaccaagcaccttgtgttgtccgtggcctggaactaaacaatataagaaacaatatttatatttatatactatagacttggaaaatttttacgtgcatgtagatacaataagtttctaatccaaagtaaaatatccccttggatggctcatagacctctcaaacttaaaatatctcacagtgaactcttgagctccccctatcgcaaaatcttgctctactgacagcatcccctttaatctgatggtagtgactagtttcttttagcttctcagccaaacacctttaggctgtctttgactcgtattcattcattcattcattcattcattcattcattgaaagaccaactcctcaagaagtcctgctgcccctaccatcacactctatctaaaacaagaccacctcttaccactttcccttctgccagccctgtatgagcactccatcatctgttgcctggatgattgcagttgtcttctaagtactttacatgactcacctgtgcttcaatacaatsattcccaacagtgtggccttcaaaattcttctacaatatgtcagatcacatcatgctgtactcaaaaccctccaatggcattctcatttccctcagctggaaagctgaggccttctattaatcattacgtacaagtcactacatgatctatcattaccagtaggactaccatctccttccactatccccctcactcattctgttccagccacagggcttttgcatttgctgttcccgcagcctagactattctgccactagagtcttaaggtttactctttaaccttcttcaagtttttacttaaatattaccttctcagtgaggccttccctgaccattccgatraagattatactgctctccaccccacactcctaactccagcctgcttatttttctcccaaagcactgatcactaccactatatggtttacttacttattacatttactgtctattttctcccactagaatgtaagctcctcaggctagaaacttttttactgatttattcactagtatatcctcagtacctagaatgaggtctggtacataataggtctggccaccacgtatagactcacagattgtatactgcacaaggcctggacacaccattcaaggaatggtgtcccctggggttgtgtaccatttcagtccccaagagcccaataaacatttgttataaaattgaataaaacaaaatgttttgccctactattttaagtacatctctgtcagtaatctctggtaaaatctctagtattgaagaaaacacttggagaatttacagactcacagaccaaaggaagatatttataacagcccctagattgtgggtttaaaactgtcctacctacaccaccataaatactgcttgctaactaaacaaagtattttgaattccactggaggtaggcaaattggctgtgttttgaaagtctacataatcactattttcccacaagataattgaacagtaagtgttatttaaagtagtcttggaagaattcccagtttcactggaggaaaagaaaagtttatatcttgggattttgttttgttttgagaatcagcacacatgcctgttcatgcaactcttttgtctggttgggattaaattaaatccattacttcaaagaggtttcgccatacttcaacaggtatactcaccaacatatccaatttcccaccttggtaacagtttctcttggtgtgtctcttcctgcacgtaaaatttcatagagaaatataacagcctccctcatcttcctgtctgattaatttaagaatgccacaattttcttggaatagcctcttggtgatgtcmtagcctcttcttatgagggtgagttgtcaggaactaggatttcaccgaggccttagggtgtgaatgaggaggagagtctgctggaaatgtttctaataaagaaggtaagcaaaggtcagtgacttctctgtagtcaccaacatgacctgtagcctacttattaatgtggttcacaatatttaagaaatgagtcatatatgatgaggaaacccttgttcttcaagagttaccaaagtggtctggttttccactattttctattgccttgtgttaagagtttaagatagcataatactgtcagagatgtatttgcatgtatctttyagggaatttcaagtgcttccacatccttcttgttaagtgccacacaactgcacagatgcttacttttctcttctttctgattaaattagaagagctgcagttttcacagaggtggtcatgatgttatgacccctcctgtgctgcaaggttatcaaatcctgaattcttagaaaaggtggtaggaggtgacagggrgagtgtccagggagtgcttagttgagagaaaaaaaccaaacagtcttctcaggaagaaaatagctagttgttgcagctttgctaccagaggctctgataaaaaaaaaaaaaaacagttaaattttagatcagacacacttctctgttgtttctcagcaagcctctctcgggctgtggtgaggatggttggaaatgtgcataatagaatcacctgaatttggtatttgcatttggtattgtctgaacataccctgttcctacctgtcattgggtttgtatttggtgttgtctgaacatgccttgttcctacctgccattgagaacagtgtagcctaggccccacagtatggatgtaccctcccaggacagctgtgcttcrtgtccagtctgcagccccttcatatatcacacagccacacaccccttcacataagtgtggcctgactccctgtgtctggtttctaatccatgctagttctagaacccacctcatctgctaagatcattttcccaatctgggccctctgccaggacttcctgcagctaagaggaaggacactagcctaagsgttaagaacctgggcttccgcacttggttttcactagccatgggaacatgagcaagtcactcatcaatctgtgtctcagtgattccatctgtaaaatgaagtgtaaaatggggataagatcatccccggtggccaggcacagtggctcacaccwgtaatcccagtgttttaggaggccaaggagggtggatcacttgaagtcaggagttccagaccagcctggccaacatgatgaaatgccatctctattaaaaaagtgcaaaagrtagctgggcatagtggtacatgtctataatcccagctattcaggaggctgaggcaggagaattacttgaacccaggaagtggaggttacagtgagccaagatcatgccactgcactccagcctgagtgacaaaagacgagaccatctcaaaaataataataataatttctggcttcttctgcagatgaaattagataatctttggaaaggcttacacatagtaccagatgttgtaaaatttactataattaataggaattaattaatgaatgccaaggggcagagccacacttcctatgatagttccttgctataaggtgctattttgttctctacatttactccatagtaagcttttgtttgagaaaaaaaatgccagtttggtgcgtagtagatacgcagaggctgagaaaggaacagatgacacaataacacaatggtaacagaatgtataatgcttccctctcaacttggttgatttgttttttttacatttacttggaccaaacaagcaaaaatacatgctccccagaagaacagaaataaggattttctttgggaggtggaggcgggcggatcacctgacgttaggaggttgagaccagcctggcaaacatggcaaaatcccctactaaaaatacaaaaattagccaggtgtggtggcgcgggcctgtagtcttagctacttgggaggctgaggcaggagagtcgcttaaacccgggaggtggaggttgcagtgaaccaagatggtgccactgcactctagcctaggcaacagagtgagactccatctcaaaaaaaaaaaaaaaaaaaaaaaaagtaaggattttctgcttaacttttccttaatcaggaaactcttttttaaatgatagcatagaatcatccattcatttgcttgttcatttgctgttgttttttttaactcatttgttcaacaagtggttattcattgctacaggcacagaattcctagccctcatgtacctttcctctctagtgagggmtttagtcagtaggaaggcagctatggggcaatatgattttttttaatgggatgtggaaaggtcagaggctatgtaggtacttagggttacctcgagttaaaagagccgggggacttcctagaggaagtggtgtcaaacaggagatcaaactaatgagtagacattgccaggcaagaaacagcatgtatgaaggtttagaagcaacagagactctaatttgaaggagaagctaaattcgatatgactgaaatgtgatttcaggaagacacatagaaaaagccaggkttagagaagaaagagtcagattctttcctttttacactttaagatatgtccagcatgcaaaaatcagagttaatgctgtgtaatactactatgaaatgaagacctgtacagatggagaaaatcaaggctctggaagacaattttcttggtaccgactctataagattcctaatttcttctgagctatcatgaatttgaaagacatcagatatgctcaaacacgcgttccaattctgcactggttccctcccttcattaaagtggctattgggacttactaacatccaacattcagatttctatctttttcaaaagccttaacctatctgcctggtattattgtaaacctaactatggtaatattttaaaaggtaaattatggtaaattattagctcataagaagaaaaaatctttcaactctaacgttaaggctgactgaattaaagtgtgctagagtgttctatmttagtttgagaataattttataagatgaacgaggagagaayttattamtgaactattaactttcaaaataatctgcattttcctttttccctaagtgttcatgctattctgtctgctaatacttcaggttaaaaccttcatcctttggtgtccatttttgtaaccttggaccattttaatgttttttctactggtaaactagatcatatattccaggtcatttggatttttattttacttgtcacatatatctagttttactagatttagaagacagcagtctgctttaatccttttgtatctaccgtacctcaacatggggcatatgttgtttaaatgataattataaaatatatatacagaaggctcatgaaakaattttagtttctttgatattttaacccttcccaatactgacatgaaaaaaaatggaagcaaatatgcttccrtattaattgaatgctgctgagtaacctgctgcagtttctaaagatcaaactgatacctgggctctttctgtgcaatcttctgtggttctaagtgtcaggtgagtgcttctgcaagaaaacccatattctctaggtgaagttctgaaggaaatgaaactaacygaaggaaggaygtaaacaccaatctcatcctgtattctagatatatgcactttgttacacataaagatagcttgtaatgtatttgttctgtatttttgctaagtatcctctyataaagacagttagcataaagccactaagataagatatctgctctctaaatgagtcaacatatgaaaatkcttagggcatagaaagcactcagcaaaggctagttgttgttcttggtttaaatttggtttcattctttagagctgtsctgaacaatacgtagccacgagccacatgtgactactgagcacttgaaatgctacttttccatattgagatgtgctctaagtgtaaaatctacactgaagttcaaagacttaggaaaaatgaatgtcaaatatctcattactaattttgatattgcatgctagtttggatatattgagttaaataaaatatatttttaaaattaatttcacctgttgctttttatgttcttaatgtagctggctactagaaaatttgaaattatatatgtggctaatattcgtagcttgcattatatttctattggacagcattgctttagagagactttctagggtgtgtggcaatgcagcagtgttacagacattgatcaaagctctttatcagctaagcagaaaggcagcaggtcaaatcatagctgaacaaatataaactgttcacattgaaatttaaatgtgtttttcactgtttgtgatcaggtttatctttaagaaactatacttaayactttgtgtctaataaaaaaaatgtgtttctaggttactggttggttcaccctggagtggctttcctgagaaccgaatgggagatgtgtataaatgtcctgttgacctatccactgccacatgtgaaaaactaaatttgcaaagtaagtttaaatttacttgcaaggcatgtgakttgtcttagactcaactgaaaaataacatcagaacaatcattgttctgtcttaaagaaatacagacagcttttttttgcccttatgtctttagtaatatggggcacaatcatatccaaatttccaaaacagtttggagacttgwcttaacaagatgcrtggaaaatgtgctatctcctggaccatttacctayagaccatggactggtttccatcaacatttagaataattttgatgattacttgcagaatcaaggctatccttgaatccgaggctatccatatttctttctctcctctttgcaaaataaaccattaagtttggaaacatcagtacaagggctgagtttggaggcaccaaaaacactctgtgtttcttgttatgtctaaatgatggcattctaataaaacaaatccacaatttggaattatttgctgttttaattatccccatctcagatgcctcctattaatgccaaaaatttactaaaggttcaagggtagacagctaaatgagtgacatttccatgtaatatgctgatacaagtaaaaagtcactcaatttgatcatcattacatcatcakcagcagcagcctaaaaaaacagccctgaggaatcacggagttcctctgaagaattgaggcatgaattagaaaagagtgttgtgaaaatcaagggaaagaagagtttcaaaaatagtgattaagacttggaaacaagggmagtggtgtttcttgcatatctctgtagacctaatatctagaataatttatggcacataatagggctcaataaacatattttcagtgaagtagaaggaatatcagtagtgtcaaatgctacagaagttgaaggggatgaggactgagtaaatgtcttcagcttatttaagcaggttgtgggtgatctagatcagtgatctccaaattttttgaacactcagtatatatatatatatatttctaataacacaaatatatacatttggagtgagtgttcaaagctttattatatagtccaaaaattttagtatatcacccctaacatttcatatcacccttaacttctgaacactcattcttaatgtatatatttttattatttttaaagctatatacatgtactggcctatcttctcaataataccttcacataaaaataaattttaaagaataacaacatgcccatagaagttctattattttctgtcttcactctaacagatcatattttgtgtaacttactcacctagaggataaatccaccagtgttatggggagaaaatagataacaaagaatttaggagtgtgtcwgtagtgaatgtacaaggagtgaaagttgacctccatttccagaagttcagcagtgaagggggagctgggaaaaacaattctatgggatagcagtgtgagaagatttttctagtaaacaagagatgatactttttgtagggaacatggaggcagcagtaaaaagggatgatttgtccaggatagagttaactgattaaaattaatgtcatttgtacctgagaaatagagtcttaaaaagagttcttccttctctaagacacaaaggaaggagagaaaaattaggagttctaagaatgatctttacacaatgattagagaaactgagattaccctggaagtctgattcatcttctctgcagtagtcgttattcactgagtgatgggatctgagttgaggttggaggcttgaaaagaaggggtgaacttggctgggcatggtgtctcacgcctgtaatcctagcactttgggaggccgaggtgggtagatagcctgagctcaggagttcaagaccaacctggrcaacatggtgaaaccccatctctactaaaatacaaaaaattatccaggtgtggtggygtgcacctgtattcccagctacttgggaggctgaggcaggagaattgctagaacccrggaggcagaggttgcagtgagccaagatcgctccactgcactccagcctggatgacagagtgagactctgtctcaaaaaaaaaaaaaaaaaaaaaaaaaaaaaaaaagaaaggtgaacttttacaacagtcaccctgggaaataagggaaggaatccaattaagaataagtgacagaggcaatgatagcttggcagagatgagaaacatgactgaatgatggtattactaaagagaattgcaatgttcgataactcaagaatggatacagtggttgatgccctaggtcagtggaagacaggargtggagagatttatttagtatattatatgactcgtctaatttccttttaacattcacccactattgctttgagccagattctatcatagggcattctttgataacacttcaaggatatttttactgacccagaaaaaaaaaaaggcattagatagagctactgtgactttcaaaagagaggcaaaaatgatgtcctcaaatgtgttttgttttgctagaatattgtaaaaaaaatcataattaaacatctataagtcataccctctccagagcccactccttactgtcttatgctctgcagcctcacacattaatgtgcgttaccagatcactgaaagcatcgcgtttccccacacttcattatataactcaagtacctatattgatgacactaaattcaatgctacatgcaaacatgggtgtgcctgttttcttttaatatctttaagtaaacgaggaatttttaatcacttttaaaaattgttttccctttgaaagcttcaacaagcattccaaatgttactgagatgaaaaccaacatgagcctcggcttgatcctcaccaggaacatgggaactggaggttttctcgtgagtgtttactttacaaatcattattcctctcaagaaagtacatagacagtagtgtcttctcaccatccctcccaatctgaggatttagatgtttagaacttgctttttgataaattatgctatttatttggctatccartgttgaatattcaaaataatgttgatgtgtagactttttaggataktcagcaaaaccactgctactgaatgttttgaagaaaagggaacaaaaagaaccctgattctttgcccttggaaagtgtgctgagtatttgttgataacagcagaatcccaaatctcatttctacttcctgtaggatcattcaagatagtttcaaagctaaaaagtatttttggtttttaatcatttcctgtaattgttgagtaatctggtgttatctgaggcatggagcagtctctcatgtcagtgctcactttcatttagttacaaaaagagtaaaaagacatcactaatyagtgaaatagaatgccttatttaacaagtgcttttggaacaattaattgattaatatttacatatccaaatacactgtcaagtgaattgaaagttaatataaaaaaactrgaaaaaaatggaaattttctgaaggatggaaaaatttctgagtttagagctaatagaaaaaataatataggaaattgttgaaaggatttgactatataaaaaaagggaaaaacatcacacaccaaaaaaaaagtttgaagacaaaaacacaatcttatttgaaatttccattgactcatataggtatgtgtatgtatgtataaccctgttaaaattgtcttagagaggttgggcgcggtggctcatggctgtaatcccagcactgtgggaggctgaggcaggtggatcacatgtggtcaggatttcgagaccagcctggccaacatggtgaaaccccatctctcctaaaaatgcaaaaatcagccaggagtggtggcacacacctgtaatcccagctactcgggaggctgaggcaggagaatcactgggacccaggaggcaaaagttgcatgcrctgagccgagatcgtgccactgcactccagcctaagcgacagagtgagactctgtctcaaaaaaaaaaaaaaraaaaaagaaaaaaaagtcttagacagcataattcaactttacaytagttttatctgaaccattggcacgcttycttaaaaatcctatgttttataactgtattattctaaaaatgtaatcaattttcaacgtcattctatttttactaatggatattattattctgatgactgtgctgccagtaagtgaattagatattgcttgtgatatgtgttaacatcagtgcataaatsaatattgcaatggatctttatggtttatgatattccaaggtctttacaataaggttgctttaatctttttgttttttgattttaaagttgcaaaaatttaaaaaaagaacatactgatatttagagattacagaatktgcctcaaaatttttaatctataactcyagataaagtaaaaaatgaaaggtaaaaagcaagagaatttgagagattaattagcagtccrggtagcaagcagagaggcagaaagagagagaggaggagaaagaaaaaaagaaaaaacccaaagtttcctttacatacttagaaggtcaaaatcataagatactcttaagaattatgtggaaaagactgacaatcatcacatttttttgaaacttcttaagttctgggcttaaagtaggaatgtagttctggcacttacaattggcatattttaatttcaacttcttaatgctgttttccattgcttttaaaacaaaaaaaawttttgaatacttcatgagttctttttcaaagtgattttaaaaaaagcttaggaatggggatatagaaaccaataattagtatctgttatttggtaaactaaccaaagacattaataatgactttcttctaattaattggcaaaataaatcagttttatagggagaaaactatgccttgttcattgcacatgaaatatggccaaagctgcttcccctttgacagttaaactgggtcaaataagttttcttttatttttccaattacttcttgcaagcccatactcttctgttcagttttataactgattcacaactttacataacgttaaattctgtaggcattttttaggatcttaattagatttctcttttgcacttgtctcctttttcatgtatcaattttaaagttatttaatctaatgtttctmytgtcatttaatcatgatttaatcaggagtttttggcattcaaggactcctgaaaaggagagaattgggattgcattaatggagatattaaggattggagcaggtataatgtgagcaagaagacaagtgccattcagcgttagtgactgcagttaattgggaagtggscaaagttaaaaactggtagtcagtgaacctcatttgtgtttgcttagcatatggagtaattttgaactgaattttcacacaacatttgccctctygactctcttttacaaattagggaatctggcaacacaacctatttcatacccgtgggcaggcagaaaacatagtggtctgtacataggcatgggttcttcattcaccatgatgtctatacctgaccccaagccctcttcaagcgttactgccattaggtttatggtttctgctgagcagtatgaatggaaggaactgcagaaaactaatgttcagcaagaacaatgataatgatgctagctaacaatattatatggcatttgctatttacctggcattgttcttagtgttttgtatctatagacccatttaatctttacaacaatcttaaaagatagaatgtrtggttatcctcattttacagatgaatcacctgaggcccaggtaaatgagagacaaaaagtgaacctgcatgcattctcctccttggtgttctctggaaggaaagcacctgttttatctagcttgttgggagacctcataggctcctcccttcactgacacctgctcccaacagtctcagcactcctcctcccgcaaggcttgccactgggcacagagcacctgccaccttctccatcacttctgctttccccraaggcattactgactcattggttttgagttgacaattattagtatcttagaaaagagtagagatgatttctgagctccataatggagaggtagaaggtttgcatttttcatgtgtttccattgattgttttctcatttctttgaagacatgtggtcctctgtgggcacagcaatgtgggaatcagtattacacaacgggtgtgtgttctgacatcagtcctgattttcagctctcagccagcttctcacctgcaactcagcgtaagttattaatgtgcagatggtctgagcaatgccttacagttaaaggagggggaaaaggttatcaactagtggcacccaaaccctccttaagtctcatttttatatggctgtgaaatatgacttacctgtggaaatctgcttctttcctcttttcctgtgtagcctgcccttccctcatagatgttgtggttgtgtgtgatgaatcaaatagtatttatccttgggatgcagtaaagaattttttggaaaaatttgtacaaggcctggatataggccccacaaagacacaggtatggctarcagaaatgcataactaacttatggctttctttctgaaaaaaatattgttagctatgaagtcttaatttttgtatttgccaaatccccattttaaatgcatttgatggtagtttttaaagttaattgaaacttttactacattgggttattctacctatggctttgcccagtgctggtcttttgaccttagagttctatttctgacacaagcattaaaggtatgggayataacttttttttttttttttaagaccaagtcttgctcttgtcacctaggctggagtgcaatggcacgatttaggctcactgcaacctctgcctcctgggttcaagcgattcttttgcctcagcctcccgagtggctggtattacaggctcctgccaccacacccagctaatttttgtatttttagtagaaacaggakttcaccatgttggccaggctggccttgaactcctgacctcaggtgatccacctgcctcagcctcccaaagtgctgggattacaggcatgagccaccatgcccggccaggatataacattttaatcttcctttagtttcctgtctttcccttctaacccatgagttacattttaaaattcaatatryattttwatgtccatttggaccaataattaatttcttttgtttattccttgctggtaaaacaattattgaattctgaaatttgtataaataagtcactaagcatagttcyascatttatgataatattttatagttatttatcatattccagtttagcttgcccttttgcctacagaaaaggtcttttcaataattttatatagttctttatattttaagaagtctttaatttgcttttacatcttcttgaggtaggcacctaaagctcaatagtattattttaaagttcagtttctggttttggattttttttttcctttctgattgaatctgccatttcctgagccattctggttgtagcagtatactgaaccagtgtcaacccggaccagttcactgttaccagtgtatgctcatggattgcatcttatactctaatgtccaacatctaatacaaattgttgacatatttttccctaaatgctttccagctatctttattgaaatttgcttctctgctttcctgttcactattataacatgttgttatatgtttctcccattgaaattgcwtttcagtaccaagagtatctcaatacccacagaagctttggaaatttccctgtgggcattttccaggacattccgctaaataaaactacatatagcactggtttccagaaagcaccactcttaaagccccttataagttttcatatgyatctccttatttcctctgtttctaaatgagttaccctcataatgtgactaattttatttaagtctcctataragaattcacagtcttcctcttttrtgtcttcctaycacagtgcatctgattcctctctagaagtggtttaactcaatctcttttcttacagcctaaatttgaccttcctgtaagttctaacctaccacatttctttaaatcttttttcttctttttcacacagaagtcctggggctctgtcrtgggattactaccatcttcctctcgtattggactttgaaattctcagttattttttattctttcctccctctcaagtcttacatccctagagaaaggggtccaggaatattatatttctcactatcttcccagtgcctagctcactgctcccttggcaaaacacagcagatggaactcagaaatccastcctcaccgcttccacctccttacatactgacctgtatttcagagagcctcttattgccattcagagatccctcactgccactcctgttctggaaagcccatctcctaggcttagaggatgatctcaatgcctgcaaacaaggacattaacagaagggtgtgaccttattgatctctaggattagggaatgctcccaaacatcttgttcagaaattctttcaaataagatgctctccagtggcattttctctgaaagccagaaactccctgccccatatgcacatatagcatsttctttccagtgttgttgaagcccataatagaggaaattcagcacaataaatagacctcaattgactacgctgattaggagcacattggtttttgttgtattcaattytaattatttattacacagttaccatcctttgatgagatgttactcttcatctgtgattgcttatagttgttcgcgagcttctgtccattggtaattagaaagtttatttatatcaagtttaatcttcctgttaaaaacagtgttctaatagtcatccatattaaaatattatatggcagtattaaaaactacaaatattactcttgggaatcaaatcatacactgtagcacatcatctttyttggcaatagtactgctgttgtacactgatggcctctaacagagaagaaatcattccattgaaagaaaagtaactatcaagaacaaagttggaagtgatgccttaaagctaccggcccatgtctaaatgtacttttgatttttattttattggttaagtagaaattatttttaatgtaatgacagcccattaataaatgtctcctctgttgaaggtrgggttaattcagtatgccaataatccaagagttgtgtttaacttgaacacatataaaaccaaagaagaaatgattgtagcaacatcccagacatcccaatatggtggggacctcacaaacacmttyggagcaattcaatatgcaaggtaagttttggtgctaataggccaatgttttcataatgtaaaacattatatttatgtaataaatatgaaaaagtaaggaaaagacaaagaaaaataatatacctggtacctaatttaaatcagaactaataaagaaaaaaacatcagagcattcwatgtcttgaatactttragaaggcagctgggaaagttaaatctttgattttaggatatttataagatatcacatgatatttaaatgaatttatgtgaagtaaatgaaatgagaagaccttagattaaaacagtaggaaatggggcaatctgtcataatttgttaatattcatcagagattcagacaaattgagctcatggatcacttggtgcaaattaacaaagaccacagaatcttaaacatacgagtttaagtttattatgcttattacaatcagtgggaaatgtgaaattataactatacaggactctctkgattcttatctcaatttctctattttctcagatccactgacctttcttttcactctattttttattttatttttattatactttaagttctgggatacatgtgcagaacgtgcaggttcattacatagtatacacatgccatggtgatttgctgcacccatcaacccatatctacattaggtacttctcctaatgctatccctctcctartcccccaccccttgacaggccccastgtgtgatkttcccctccctgtgtcctcattgttcaatgtgctctcattgttcagctcccacttatgagtgagaacatgcagtgtttggttttctgttcctatgtaagtttgctgagaatgatggtttccagctccatccatgtccctgcaaaccarataccttcacaaaaatgctaaacacactccggttgttaaacaaattaatgaraacaacaagcttgccttcccttaaacctatyctctctctttgtcttgtgcattccttctttttascaccataattctttttgaaaaaagcaactctattccctccctctacttccttgaaacttacagttctgccactagataagcatgaccctcttcatcccccaaccctgtggtcccacctyaaacctcatcctttctggctcctctgaacatttgataatgatgaacatacgctgctattcctaaccaagttgccatgacaccacaaacttctcgaactcctgccaaattcttttgcctcttcactagctccttttcctattttttcttcactaaacagagccctctcttctttactgctcttctcctgtagggattctatccactgtcatgscatcarcagcagcactgttgggttatctcattgytatgttgtcagccctacactctctcccaaaactcacactggcatctagctgatgatgaatatttttatttggagtgttggctcacttaycaaattcaatctgtcccacactggccttattcttttccctaccactcctcatgaacttgccattttgattcatgccactgtctcttgcctagtcagtcgaactaaaaatttggtttcctttattctttccactcttccttatgtcacacatctggtcagtggccacatcctgtcatttctatttctgcatttcccattttatctgtcttcttyttctgtgtgtgtatttcagttgctacttccrtcaactggtgacaatcccaaatstctcaaaagcagattccccacaagagaagatatgattggtttggttcatcattactgtctctattcagggacaataaaggttttttgggccaggccatctcataagctgctggccagtcaataggtcagctgccattaggtgaagcgccctttctggacacagcaaactggactaaaaggacaaagaagttgagatgaaaaatggctttcctgragttagaaactgcaacggcccggttttcagcagggaaggtgggagtascatttttccctgraaggagcctggggccctggcgagctttgttctccaggacaatggccactgtccattgaggaaggacttgcctggctttcatcatgtttcaaaactttggttttctcccttgggccattgtctatctccctcttcccactatttcccaagctaacaggttttagtctgcccagtgctaggagaatcacccaacattttactcatccctcctagaatgtaattgcctgtctctctctctctgtctgtctctcatctctttctttaaaacattgaagataatctgaaattatttcagtaawtgttgccatgttttcattcacctcatttcattcaatgcctacagttgcagtttattgttttaagcactgcgggtaattaaaactaaatgagacacagtttctgtcctcaaaaaccttagaatcatacatgaaatttacagtgtatcataaagagaatgtgacactcagaaaggatctgatgtggatagtgtaattcaaatttggccraaaaatgcagaatattttctatgtttctatagtctacattatagaatacaaaaaagattttaggaaataaaatgatatgctcagttttataataaactgaaactcatatgtttaagattctgtgrcctttgttaatttgcaccaagttatccatgagctcaatttgtctgaatctctgatgaatattaacaaattatgacagattgccccatttcctactgttttaatctaargtcttctcatttcatttacttcatataaattcatttaaacatcatgtaatatcttataaacatcctaaaatcaaagatttaactttcccgactgccttcttaaagtattcaagacatagaatgctctgatttttttctttatttgatactatctattaaaatttgaattgtgtgtatcctgtgtcccaataattttactgctaagattttatcccatttgaaaaagtatgccaagatatatacacagggatatttattacagccttacttgtaaaactcaaaatgkcctaagcatccaataatggggaaccggttaaataaaccagtcttccttcatatggtcctccaaataaaatattatgcagacatttaaaaaaagaatgagaccttcatgtatatacatgtgctgatatggaaagrtctccatcaaagtaaaaaacaactgtttagaatatgccctcatttgatgcaaaggcataagaatgatacagtggactctggggactcaggggggaaatggtgggaagcgggtgagggataaaagactacaaattggattcagtgtattctgctcaggtgatgggtgcaaatctcacaaaccaccactaaagaacttatttatatgaccaaataccacctgttccccaaaaacctatggaaataaaacattttttaaaaaagaatatgccctcatttgagtaaaagtttaaggggtagactatgcctgtacctatattacatctaaataaaacattttctagaaggaaatgcaagaaactgataatggtgcttacctgtggagaggggtttagtgtcacatttggtttatacctttccaaatactttgatttttttttaactgtggatatctattacttttaaaaaaataagtattgataaagtaaacacaagactaatgcataaaatttataacagaaatatctttgctttattaattcatactgattaattcaactttcttagaagaaaagaattctaaggaatactgggataaatacatgcacacatatacacacatatgccctgacacacaagacattgtttttaatgtcaagcaagrcttccatttgtatatgtttctctacaagctacaaatggaacattaaatatgtcytcagarttaatatggagttacaatagattgtgtttaaagaagctagtttcatgtttctattttaaaccagaggttctcatattaacttcatattttgatagcaagtctttatttaattttatctgccacagaaaatatgcytattcagcagcttctggtgggcgacgaagtgctacraaagtaatggtagttgtaactgayggtgaatcacatgatggttcaatgttgaaagctgtgattgatcaatgcaaccatgacaatatactgaggtttggcatagcagtaagtggcttttcttttcacttgtcttgccgctattgggtaaatctttctttatagcatcacttctcaaggctgcactttcccattggctgttcatagttgaatataaaagaaagttcttactctatctctgcttcttgatgattttcaatcctgtctactaaataaagggttatggaaatgttgcttgatttacttttccagagggaatattgtgttcaaaatagrctagaatgtactcatagggaaaatgtacagcagtaatgactgcacattctcttcctctattttcaaggttcttgggtacttaaacagaaacgcccttgatactaaaaatttaataaaagaaataaaagcratcgctagtattccaacagaaagatactttttcaatgtgtctgatgaagcagctctactagaaaaggctgggacattaggagaacaaattttcagcattgaaggtaaaaaaaataacctcctttcaagaattttcttcaaaatgtttaaataattgtttattatcacatatttgctttactaatgttaacttgtataccatgtataaaaagagctactacaatcagtaagagaaatggatgaaaaacatgaataaatagtttataaatgataaaatacaaatgactgataaacataagaaaatattcccaatttacaaagtatatttctaaatactttcagtaagtatttaaaaacataaattaaaccgacaatatgttttgcctaaaagatgacacagaataataatgtttaatcctggagagattatcaggaagcaaagaagctcatacactgttgataggatgataaattgttatgacttttgggggacaatgtatkawtatctatctattagaatcataaatagttttacctttttacactgtgttatgtaagttctaaaattcttgaatttgtttacagtaagcatatatatttttaaaattagaaaaatacagcaaagatttttaatagttcagtttttgaggaagcattttatttataggacctaaaataatttacttaggtggccttggaaaatctagttagtgcagaaagatcacgtgttcaggagctcactgtgtgggggactagcacacacttcacagttggttaaaagaaaaaaaaaacacacatcacccaaatcctagttcttgatggttaacccgaataactctttgcaataaagaccatatgttattggaaacctatgtatcaggtacagccttagagtctggggctaaaggaattgcataaattattcattcatatactcaaatcttgatttgattatccattggaattacccaaaaagcattattgcttcttcagtatcccatggtgcttcaaagttgtttaaataaccatttaaatccagcataccctgagataacacaaaatcactaggctatccacactgataattgtatttgtttgtagtggaatgaatgagaacaattgcaatctacaagctagctagaaatgattytgagcattatttgctattatggactttggggaacattattctattttattaaaaagtatctctactcatcctgtgtaaattattttatcttctaaataagactatgttgtacagtacagtttgtcttcttttctatattaaagtgtgagtccagtaatttagcttccttttgtgaagattagtgaaacytagccattttgatcacactgtatggaaaataagtaccaattgcatcttacagtgttagtgacacaggcaagcacatatacagaaccagaacaaacttcccaattggtaaaattcctactcagtcttgaattctgattcctaatagctaactcagttatctcccagcagtcttcactacagatcaattgcccagcccttccaactgcatctgagatatgtgtacattatcagtacccatatttcaaagctaaaaattcagttagtttcttagctagtaatgatcaagtttttaaaaaattatcatctcagttttcaccttaccttataccctttgttgagtgtcctttggtatcaagaacgtcatacatattctgctaaatacattaatgttcaattaargttaatgccaactttgaacactaccttggaagtgttgttatttccataacctgctagaacactttcttagtaatttcttcttcccagaatatgcaagctctgtatttttgggtgagtattggaayagtgtgtgtttgtgtttgtgtttgtaggcatgtgtgtacatacgtgcctgcttgtgtttgaaaacttgatttaaaattactgacagtaatacaatttttaaaattgaatgttccaggtactgttcaaggaggagacaactttcagatggaaatgtcacaagtgggattcagtgcagattactcttctcaaaatgtgcgtatatcagatagcttcaagccaygttgtcatttggcataacacttccagacacagtagccttatacataaaatgggaagacagccatctagggatcagcccttctgattcctagtcacggtcatttagtttctttgtgctgctgatttacctctaaaatttgaaggwtaataatgtcttcccttccctgtttcacagggatcttatatgggggaaaactgatagtataccagaaagtctttgagtaccccagggcacagactgtatattaacttaaggtattattcctgcaggaattttctttgaatcaattaactactggaaatgtttgttaaaaacacgtactcttgtcatcaccgtcatggtcgaattctgaatkgtcatagtatctttttctaagagcagacagaaaagagttgaaaaaataaggaggtaggaaaaacgtgaggtggaattggaatacaacactgtcttttcagctcggggaastctatttctatctctcagaaacatccacctcctgggcccctgattctaatttgagtcaggaggtgagagagatagtgaaaggaggcgaaaaaaaaaagaaagagatcctgggaattatttaaggaacagtaggaaatcccaggatttgatcggcaggtcagaggaccaagaacagcttgttttctrtctagaatcaaaggaactgactttttctggatcatcaatccttagagatgctcatagaagttatggatctttccctcagaaaaaatgtaaatgaatctatgcacggagaattttgcacacaatcccatgaggtttttgtacatacgctgaagtcctttcatgcaccccaaatccagagtccctcaatttactacagtcattcacataacttcatggtctcttatcctcaaagtagaacacatcttttccttacttgctatttttcatggcttgtattttttagtccaacatcttatctttggtacgctctaagatagaagaacaaaaaattaaaaatagtgtatctcatcctcaccaaatctgcctcgtttgatgatttatagcattgagtgtttagattgggtttcaagtcaatccagagtaggcatcttcctttgccctccccacagggctgacaaatggttattttccttccaatagattgaatgtcacagctaaagttgcctcttgtagctgtgctattatcaaatagatggaatataggaatatactggaacatttgagaaggggtcaggaagagagaggaagaaagctgaaagtagaacaggtcagaagagggcctcccgagccgtgtctgggatagcagaagtatctccgtctctcccgtgtcagtacttctgtttctcaagcatgtctcatatccggctgtgagctttccttataaatatgtggagtgagagactcacttctgactcctttgtaaagttcataagggtttaccattggcaaatatatgcctttgaaagggaaatttgaagatggctctgtacctgtcctgtactacagrttattacaaaggtttgtctgtataacatatcatactaaataaagtccaaaataacacagccaatgggaaggcttgttctctagcacaaatatattaagacaattctacratatgtcaatatatgttcatatatatttcatcatttttaataaatctaaacaacttatttcaatgttttgcctaccctgcattcttatgttttaaaggtgatttgtttcaatgatcttcatttttcaattattttaggatattctgatgctgggtgcagtgggagcttttggctggagtgggaccattgtccagaagacatctcatggccatttgatctttcctaaacaagcctttgaccaaattctgcaggacagaaatcacagttcatatttaggtaaggcatggyaataattggctcagcaaacttaagttcccttgctttaaaccagctctttgttgaatctcagggtgagttcagcaaaatccttgaactgtcatctaattatcatatttattacacatacatatgttgtctctttgccaatcgggccttaaggcataactacttattggaatactatattatactcactagtttcttctggctggtcaagtggttgtaattcctggaacatgattgtgttcctccaaaatggaaatagttcccaaaagtcaatacagtaagtgatagtcttatagtattttagagctcttagtcttcttgttcttataataagcagccactgattttgcagacttactatgggacagttcctgagctgctagtctatctacataaacatttaaatctttccaacaagtctttcagggatgttttgcctttgagagatagcaagattaacaacttgtctaacgttcaacaacctagtaagcggcaaatccagaatctgaacctcagcctgtttccaagacctgtgttctttctactgtgcaacactaccttttaaatacatttattcattcgttcaagaaatattttttgaatgccaggttcacaggtggctgatgagaacagcgtggaatctagaggcagttttataggtagaagtcccacctgcaaagggaagtgctgcaggtcaaaggacaggagcaattcatcttagaaaaaggaagacatgtcctcagtgatgtattcaggagcactagaaactttgcatcacatctaacacaaaaggatctctggtcacctttactcacttcttttaactttattttgctcaganagtcaatgktaatcactctgttgctccttcccttttaggttactctgtggctgcaatttctactggagaaagcactcactttgttgctggtgctcctcgggcaaattataccggccagatagtgctatatagtgtgaatgagaatggcaatatcacggttattcaggctcaccgaggtgaccaggtaaatctcactgtttagcaggtgaaattaattttaggggcaactgggcaggtggggagtcaggtgaacagaaatggaaaacaacatggcctgagtgcctactctgtgattggctctgtaatctgagtttacttagtgtattccttaaatcatcacaacaataccaagaagacagccctcccttttgacaacttactgggaattwagctagctttctaaggtcacacagcgtccatggattgagctgtcattaaaactcagtcctttctggactcagaggctgtcctgartgattacatccccttcatgtttttgactccctggattaataatgcatggatattatttagttgtgatggcaggcatgtaaccactgctttgtaggtaagcacacactaggaacaaggatttggagaggaaataatgagaagaagggagcagcacaacattataaggactgaacttttacatctgaacctgtcagaatgtcctgttggttttgaagattctaaaagtaaaacaattatcttctctgccactttcagctgatgggtgacagtttggtagttagaccctatgatgaatcccagatatggcccactacagcaaagatctgttgctagagcaaaggccagctgattgcttcctgtttccttactaaacagttttgacccaggggcttgacacacatttaaaatgagcatcactaatccctgacaaccaacaaaaagtggtttccttctttaagctggagaaacttacaaagatttctcttctctgagattaagtgtgatcctgctgttcctatggattttctaggagtaagaagacccgagttcttgacttccgtgaccacaaattagctatggtcacatacttttctctcttttttaatattttaaagaagttcttctttaatttagaaaataacagtgacagtgttatggaaggaatcatttcttagtcatttctaaatcctcaaaaagtgttcacataggcatgcattgaacgttgttgaatgggatgaaggttcaaagtctcagcttttcttattttaatttatctccaccttgtcctcctgtcccaatctatccagcaactacttacctgtctcatatcatgccatgtacacttacatcatcatatgtgctttcccacttccctctgcctagaaaactccatgtccttcttactttgcaatttgaatgatattttaactttctaagccttcctgactctcctgctctctgatcactcagcctttgggacttgcctctattacaatttattttactatagaagcttaattatttattctccctgcctctacccctcctgccttttgctatgacaaacctcacatacctacaaaaggtttgccttatyagtatgtctttgaccccctggcatcagaaacacctggaatgctaatttaaattgctgtgttctggatcacatcctagacattacttcagaatctctagaaatgggtctcagggatctgtatttcaaaggcattttcttggagattcttgtgcacactaagatttaagaaccaggtgttagatggtgttagaacctgagggaaggaactgtgctctctgtcttcatgttccaagcactttgcaaatagtaaacactcaatttttgtgtattgaatgagcaagtaaatgttcagtgtaatattagaagtatatgaatcctaggaattctaagtttaacatgttttattactccagattggctcctattttggtagtgtgctgtgttcagttgatgtggataaagacaccattacagacgtgctcttggtaggtgcaccaatgtacatgagtgacctaaagaaagaggaaggaagagtctacctgtttactatcaaaraggtaaaaaaaaaaaaataaactaatagtttaatttgctttagtactggtaatttaacttgcatttggaaagaaaaatttattattattgaatgataatttgcacagatagtatggtttacatttcatcatttttgaggatgtccccattaagttatgattttaaaaatcacattaacaggaaaaactagagttgaatgtatagtgtactgccattttccatgagaggtctttgaatatatagtctcttatgcaaataaagccattataagtgcacatcgtttattgaaatatgcacacacacaaacatttgtgtatttctctagtatcacatgtaattttttgcgataaagacaacaataacagggcaatgctttcttgttatcagttgacagtgaaaaacagaagttttaccaagcactttgtaaattccttgtgatctcagatgcttcctacattagtttgtcaggaagtgtcattgcttagtgtaacatttaggcatgtatccaactcttgaagtttcaagtccttccacaaaaaaacaccatacattaacatggcaaagcataatttttccaatttgtggactgaactctctaaatccatgtatataagtgtagtgaactccatgaaataaaaaaagaaaaccaaattaaaggcacagattgacatagaaaattatatgctccttagtatataagaaaaggagaagctgatgttaaaatagtaaatactatgtttaagtattgtgatattttgtaccacctgatttattgatatttatgtaaaaattaatcttttaacagaagtaattaattaaaacaattctaaagcaattatacatataaagaatgtgtaattgagtatcaacaaaggctggacctagttacttgttgaaaaactgacaaatccccccttctttaaatatttcttacttgtgagatatactgaattatcattaattgttgaaaatgaacagatcttttaataccgtgtcaaacgcagtaaaaatttgtataagattatattagaggagaaagaacactgacccagtttcrtggttgagaaacattgctttcttgtgaagtcatgaaatatttccatacttgatcataaaattgaagaaaaaaactgtgttttacaaggaaacgtcttttcctttgcacagaattatttartgtttttaataatggagatattaacaatctcattttctacttcctgtaccactataattatgtcactatttggtaatttttacagaaagcctaaattaagatattgtgttttattttgttctgtgtctgctttaatttcattcaagatattagtaattttcaccagaaaaattttaaatcaaaaggttggaaatagatgaagatcgtattattgagaggaaaatgagaccaagaaatggatgctgttcagctacagtaaagagaattatctcctttgaccttggtttatgagcagatatttatgaccttactgaaattcttatttataattctgatcataaatagttcaggtttaaaattctatccatttttaatattaaaaaattagtttggtcatcgattgctctgaattttattttcttttttattttatcatatttctttcacttttttaaatagatggggacttgctctgtcacccaggctgtagtgcactggtgtgatcatagctcactgcagcctctaattcctaggctcaagcaatcctcccacttcagcctcctgagagctaggactacagctgtgtgccaccactcctggctaactttttacaaaaatgttttatagagacaaggtctcactattgctcaagcaggtctcaaatacctggcttcaagtagtccttctgcctcagcctctggagtctttgggattacaggcatgagccaccacacccagctgctctgaattttaattatacaagttgtaaggtttgctttaatcatccttttgtttcccctttgcaagggcattttgggtcagcaccaatttcttgaaggccccgagggcattgaaaacactcgatttggttcagcaattgcagctctttcagacatcaacatggatggctttaatgatgtgattgttggttcaccactagaaaatcagaattctggagctgtatacatttacaatggtcatcagggcactatccgcacaaagtattcccaggtaatccatgagctgttatggtgatgtatgtatttgtgggtcttatcatattagacatagaaagcgtcatgtaaaccatgcaatccgtccgccttattttgtaacttcattctttcactcagcaaatataaagtgagcctctactgtgtgcccaagcactgttctagagtctggggatgctataagaacaggacagacacaattctgatctttgtgtgccttatattatattggaggagacaaataaaaagaaagaagtagataagataaagtrttccagatagtaataaaggaatttttaaaaaagcaaatgaaactaaaataggaaataaaatttcagcaataggagtatcaggtggttgaaggggtgactaatgaggcctcactgagcagccaattttggagtaagactggaaggaaaagaactaggaaattaaccctgtacctgaacttgcatcaatttgctccaagtccactgatcttttcactggtttatgattttttattaaagatttatgctgtcccttcgatgaaaatgtggctgtaagagtgatgcagagatcagataataagatgtgattaaaaaatgaatctttagaatttgtagagaataaacacaatctgggacattactatatagaaaatataataatgaaattcagaggctgccattttctggttcagctgttgtgtactataatttcgtgtcaaacctgctcttttagaaaatcttgggatccgatggagcctttaggagccatctccagkactttgggaggtccttggatggctatggagatttaaatggggattccatcaccgatgtgtctattggtgcctttggacaagtggttcaactctggtgagtcaggaagagccagacacaaactaactaaaaattacctgctaagaaagcagaacagatgtctgtactggtattatagaaatgccacatgcattctataagactatagggaatcgatgtatcatagtttgcacaaaggaataaatgtgtttttccaagtaggaaaaatagatatatttgcttaccattagaaatatagttctctcctcatatggtgagtaaaacagtacatagaaaacataaagttctggaaatggtatccaggctatttctgaatgttatcttcctataaatagccttatctcagcatacagaagggaaacctcatgagagtgcattcaaaaatactgaaaattcagaccacacaagtaaagtgtaacttctatgtgactgaatggtatattttaaaattattagtcataaacaataagccattatttaggtttagctgacctctcattgacctccacaggagttgaagattcagagagaacagtgtgaaggtcatgtgattcaaggtcaaaaataagtatattgggccggcaagggaatagaatcagaaagaagttgtttattcaatcaagaatctccattcatttgtctctgtcaaaaaatgtgctttaaatgtacaaatatttgaagaacagaaaaataatattcattgattattttttatttctgagtttaatgatactatttacaaatctcacttgtgcttttaaagaatgaagtacattatttttattgcagaatgaaacttttatgtggaaaaaataaaactcaagaataatacttaagactttaaaaaaacaagaaaatatatttactgaataaatcagttaaaatcatttcagagtagcatatcaagagtaaatacacatatcccagaacctaaagtataataaataactaatatgttaaacatgtattgtgttagtgatgcagtcacaaattaaaaaaaaaattatctctgtctgccatcttagagctttcaaatatatactactgctaaagtgctttgatagagagtagagagaaaaattcagtaatgctggtactgggtcctctatgataaaggatataatacgtgtgctcagtaataacatccatccatctgttactctttatgtcttttaggtcacaaagtattgctgatgtagctatagaagcttcattcacaccagaaaaaatcactttggtcaacaagaatgctcagataattctcaaactctgcttcagtgcaaagttcagacctactaagcaaaacaatcaagtgggtgcgtagatctgaaataatctgtatagaaattggttggcttacagagttttagtcctgaatataacatattttggtttgtaggccaagagaaayaagggttttagttatagacacttaagtttccttacactggagatgcccgagaatggttcactagtcatggaagatttgtttagatcttccttccacrtctctagaaggttctgctgcagaaagttgtaatctctatgacataaccaagggccctcctgcttccatcctttgagtttctcttacctccatttctcttacttaaaaccttgagcatacacagattatgctgaactgccactcaaatgactatatcatgttggctatgccatgatctatataggacaggttcagtaaaagtatcaagtatttttcctgtygttgaggaattaataaacatgaaataatgaaagaaaacatgaaaagcaatatataacttttacccagtgttttaaatgttctaaataatacagagaaatgagtaaaagtctgaattatgtctcatcwgatggggaaggatgaggaaatcattgtgggcaagcatcagcaggaattgttgtcttttctcttgggctggccaagttgtctttcaaggcctggcagaggtcctgcctcctcttcaaagctttttctaagcacrctatctcaccttcatctcttctgccccaattatctcaccatgctcaatgcatagcttgcaatttaacacttgattcaaagctaccttctttcattaactgctgcttcatgggtcccaattcccattccgtcagaatttggctttaaacttcagaacttgtagttcctataggaattcaattaagtgacaaacatattaacttaaagctgaaaatacagaagcaggttatttgccataattcataccaagatacaaataagatgagaacacaaagcaaaattagattcaaatcttaacatgctttccatattttcctacttttcatatccatttggaagttttccatgcagatgttcaaagattgacccaattttgagtagcatatgtcacttgacctgccatgtagcacatctaactgagcacacatgatagttaagtcaaaaaccgttgctgcataaacattgtggctagtctgcctaataggttaacttgggaaatatattatttggcagaaacagcaaactggtcagctcttctggccccgaagcatagaggtgtctcatgtatcttccctttttgactatacttcaacccttatggtgatgcacactcaaaaattctactttcagagaatttccttcccatccacaggctgccgagggtttctggcctttcttactattgggcatctttccctttaaatcttttttcctgatgccttcaggtccacaaagacaagccaagtgaaatgattgtgagctcatttgtcacttcattgcttggcaataatagtatgtaagacgtgaatcccatcttcacaactgtggaaagtgaatttataaagcatatggtttctatcatttattgcatcaggtgcacacttcactttaagattaataacatagcccatgaagcgatgtatcatttttataaagctgcttgaaaaaaaaaggaaaagcattataatgtggactaactttgtcctaactgcactcacctccttgccattgtttttcctttacatcatcttcacaacttatttttagtttatttaattctttaatattttatctatctttgttggcattgttaagtcactggagcaagaaaaattgtacaacatatatgatagatttttttcaaggtaacatgtakaattcatgttttgggaagtatatacaacctttaaaatattgaaaataataaagtaagatagaataaccccaaataaggcaataaggcagctgatgctgtgaatggcaccaggtgttctctctcaattttggacacacggccagtggactttagttgaaggtaataattctgatagtttagacatcggctactgacatcagttattatcacataattttttttcatgagttggtattaggaaacagaggttcaaagagggtaagtaaattgccccaagtcacagagctcataaacagcagaattaggattcaaaccaagtctgcctgactgagactttattgctgcagtgttgcatgcatttccctatgtgagcatctagaataggtcaagcactgtccatgttcccttagagtatctcagttaatcttcacaataacaattaattcttacaactggrtggaagcagaaagaatatgagctcttatttcaaaaatacccaacttttacttctgactagccatgtgaacttaggtgaattattttacatcacttattctagtacattatttgaaaaataagataataaaattcactttccagattcattgtaaaacttgtatggcatacatgagaatgtgtccagttgcaggcgctcagcaactgttcctttccattctgtgtctccgtgttatgagtaatgaaacccgtgcttgtgggagtgagcaatttgcccaggttcatcacagtaggtttcctggcggcaagtctagtttcctttccactgctcccagccacatttctctgaatcacatttctttgtatgcacagtcacctacgtcacatcagagctagaatgacaaatgctttgtggtgctagctatggttcacaagccaccaatatgaagactatttccatattttcttgatgtgagatactttgtccaagaagacacaataaagcaaagatgctttttcctataagttgatttgaaataacatttctttatgattttttttatcatagccattgtatataacatcacacttgatgcagatggattttcatccagagtaacctccagggggttatttaaagaaaacaatgaaaggtgcctgcagaagaatatggtagtaaatcaagcacagagttgccccgagcacatcatttatatacaggtaaggcctcaggaacatcccttttgactttatttcttcctaaagacragagagtggtaaaagtcaaaaatrgaagcttatgmgttagaaaatgctcacccttccaatgaatgcctttcttatgtaattccataaataagaagcatatttactttatgctaatatttatggtcacaatctattatataagtcarcaacatcaaatttcatttagaattgcaatgaaagggctaaaaatacaattcttaaagaaatcatagatacagtgttttcttaaatgtttaacagagagaactttccattggcaataaatgttattttgatattttcctatcagggaaaaattttatttattgttcagctactgaaaaataactccaattgtggtttctactattagatttaagttaacayagatgaaatatagtagattatgagataacaattatttgttctaatcgtatgctgtaattactgtatttaacatggattttgaaaatttcccaagtgagaaaaatgcttttcaggagaaaacttccagccggaaatttattttataaatgatgtgaatatttccaccttggaaaccacataatggcatttgaaaggataatttactcaggaaatcacttttttaaaaggatatttaagtactttcttagaatacagttctcagaatttaaggtgcgaaagaactgccagggaaacttttgggaaatgtatattctgggttcttaccatcagaaatctaggtttgaaggcccaaggaatatgcagatctaaggagcamcccaaatatttctgatgtaaatggrtggtacagagagatcttacttcaagaaatgctaagtgtaaacactagaaaaacataaagttgacggttagatgaattaaaatcagttgagttgtttagttcatttttcaatttgaaggtttcttgtttgtgaagacgtagacttcttttttgttaaagtgacaattttatagattccttaaaggaaaaaatcttatttcccttctctcccatcctgtgctgactggtggatcagattatacatgcaatccctagtgaggaaatggagacagccaagctgtttttctttaaagtttaaaaaaacaaaatcctttttcactatttgatatcaatgccagttaaagtacatcctacttgctaagcccgcagccagccaaggaaacatctcctcatagtccagagctgtcatggtagacaggcccccagaaggaataagtccttctgggaggacttctgggaggcccccaagagttaagagtaagtcctgcctgtgaatggactaaagaataccaagataccgcttctgaggaaaaggcaaattcaaatgttagggtttcatttgtatagacatagtgcttttttgacaagaactgatgagcttaactaagaatccctgcttcaaattcttactagacccaagtctcytttggtttcttagtagaagagaggctaaaagcagaattaggatggaagaaaagaagcgagagtcttgattattcacaacaaagatattctacataattgagagctgactgtgctctwaattgtaaacacatttggaatcattttcttgttttaatgytgctatgcyctaataaactgactctgtctccccctgtatgtttgtgtgtgtgtatgtttaggagccctctgatgttgtcaactctttggatttgcgtgtggacatcagtctggaaaaccctggcactagccctgcccttgaagcctattctgagactgccaaggtcttcagtgtaagtgcagcttacacttcctggatttagactggcaaataaagttccacagtcactgcaatagtgtctgaaggatgkttaggatgcagcctgaaaattcttaattttctaaatgaactacaattacatatgcataaagttcactaacacttaagttccatgacagcagggatttttgtctttcttgttcactgctgtgtttccactccctagagcagggcctggcccattgtatgtgttcaatatatatttgttgaataaataaataaaaataaagtaaatgccttgtgctcatactcaaaaaatattaccaatacatatgaagctctgcgtatagctgtccccgccatagacactttcatctagctccccctgtgcaaatgattatcttgaattgtgtgtttattaatgcttttctttattattttgttaaacatttatatattcctagaacattgtttggttttgtactttatgtaaatagaatmatattctatgtattcttctgtaatttgctttttcaacccaagagcaaatgtatggatcttttttcctttttcgtagattcctttccacaaagactgtggtgaggayggactttgcatttctgatctagtcctagatgtccgacaaataccagctgctcagtaagttttactttaaagctygttgtaaaatgtagaaatwaaagacatactagattactttattcaaaygaatgtttatagagtttttctacaaaagaaacattcataactcataaatacctttaaaaactaaatttcaatgtctaccatccacataggagtaaaacaataagaaatataaaattatctgtatttaaatggttccattccctctaatacaatagcaacaaagaacaatccaattgcatttacttatttgttgtcagtatcattttgatgcaaagatagtttattacacagcaattttctcagtattctaagtaagtctaaagagtttagttttttaatgagtgaaattttaaaatactggcctttttatttaacagtaatgrctttwcccccctcctttttacttttaacagagaacaaccctttattgtcagcaaccaaaacaaaaggttaacattttcagtaacrctgaaaaataaaagggaaagtgcatacaacactggaattgttgttgatttttcagaaaacttgttttttgcatcattctccctrccggtatgtgatgagaccctgtacttacttccaccatgcttcctacttatagatcactgtcttctctatgtcctctgagttgtttaaagaagcaccttaaccctcarcatgatcaatctgaactttgtggcttccgactagttaaactgcatgagaacatagtctggctctatatctagattctgcttgacagcttgggtcagtttttcccttatcctgagacttggcagcagtagccagacactcccrtaactcttcttgagctatcagtgtgatgaggctgctgcattctgcacagatgtggtgcacttgctctgagacatttgagtcccaaagcttagcctgagctttgcaactatggttgttgctgctgccaagatgatgcacgccagcaaagccaactaatcacattgacttgatcattataccaggagcacacttgactgtgagtgctccctggtccctcctctaccaccaaattatgaagaaaaaagggagagaaggaaaagctgagattttccaaatgagctatctgattaaaggattaaacaatgatttcatttaatttagagttaatytgatcttaataggcttagagttytaaacctaacctgaccttggtgtttaaacaccctgtgccaagtggcaactacttcctttaaagggaaaaaaaaacctgaagaaaactaaaaaaaaaaaaaaaaaaaaaaccctcaaattacttaaaatacagacaaacaccaacatatgattttactttcttctcttgaaaatgcttcaaataaattgagaagaacatattcctaaagccagcatttcaaaatattgaattaaagctattcgtgcatctgaaaataaaaactatcatttttttctggggaaaaaatacagtatttaatcttttctttgttttgttggatgttctaggtatctttagggttagcaataaaagtagtatattagccacctgggcagtataaaatttcaagtcttgaggtataataaattatttcagtatgaaccaaccttactgctaaaatgccactgtacctcttttaccaggtgcgtgcatacacacacaaatgttgtatgccaattgatcattgttgtttccttggtcttgttcaggttgatgggacagaagtaacatgccaggtggctgcatctcagaagtctgttgcctgcgatgtaggctaccctgctttaaagagagaacaacaggtacaacttgcatttcatcctccaatccatacaagccctccttagcacatatgctaatttaccaacataacatcttgctatcatgatttgataggcatcacaaaataactagctgcatacttagsggaagttttcaatatctaaatgttttctttaaattattaataaaaatgggattttctccatgcaattcattccaaaaggtacacatactatggaaagttctttttgtctaaatatgttgagcaacattggtcaaagcactatacacagagtcacagagatcatttattaacccctagtaacaagtttcacatcagctcaaagcttccaaattcagacaggtatatacgcctggataacttacatgtgtcacttggaagtcaagcttctctaattctaatgtgaggcatagtaaaacaaggtggacaaataaagatattccacaaatttgaaagcttaaggtatataaaattcagaatcaaatttgagtgagtttacttttatgagaaacattttttttttcacgttggcctctgagtatgaagcatcatagactgagaaattttaattttgtctttaggtgacttttactattaactttgacttcaatcttcaaaaccttcagaatcaggcgtctctcagtttccaagccttaaggtaaaacataatgaagtcatgaatggaatgatggatagctttgtatttctctttaagtaatttcctaatgtttctttctatagtgaaagccaagaagaaaacaaggctgataatttggtcarcctcaaaattcctctcctgtatgatgctgaaattcacttaacaaggtaggtgaagcagtgggtaacctgctatcactgacaccaactctagatcagaagatttttggctcatggctaaagaagtcctctgtatgctcattcttaactgaagaatttgaattaaaattcttgtcaactaaaacaggagtccacagacatattggtccctaggaaaaccttgagtgactcgttaggcttattaaaccaatgagagtagcccagaaaggcagagaaagatcccygtagccacacatcacaggcacactccacattgcaggccctctgagtagctgcaaacattctcaaaatgttgaaacagaactctcaaaggtcctgagagttgtcttcactttcttctcactgcctacttcccattgtatgtgagatctcaagcagtatccccattcctggacattgaagccccaagcacaatgttttgcacagagtaggtccacaataaatattgaatctagtcactgtttgaatattcaaatattggaactagatcaagtctagtttctgagggaaaaattcctcacatatcagattagggttttcttccagccaggtggaaatgaggttttttccaaaggatgttatccataaagaaatgctttgttccctgtttttacctgcccaaagcaagcaaacctgagagcagtggtgtaaatgtcactggttgatacaggctgtctttaattgttcagagggacaggtgtcttggtaagtgggtaacacacaaattccacaggttctaataggtcgatatcactttaactcacacttagaagtaaggtgagttcatggcacagacaaactggaacacagttgtgcagatgcactgggcacaggtgatgccctcctacaggcctgggaaccagagttctctacctggtgaagcaataggacagcttcccagcacagatcaatgacccctgaatagcacactgcagcactttcccaagaaatccagtgacagcaggtttgtctaacttctaccacatcactccagcccctaagagcatggaatctgtagatcatccaatagctctctgagcaaaaacaaaaaggaaaatatgtcatcatgtctagagcttgagccaaacagcaaagatgaaaagaatgcttctgtatcaagtgagttgcaaatagcacaagcagaaacaaaattccgtccaaataatacatctctgaaaaagtcatcagtaactgcagacttcaaaggatccccacttgctaaaataagaaattggaaacaaatgcaaccaacccaaattgatgttaccacattacctgaattttttccttcttatatttgatcctttcttctaaatattttttgtcaatacagtctttttattattctactctcctacaatggccaatattttcccagatatttaagaatgaaataaatataagattgaaatgagactttacttttactaattatcatcttaggcaggtatttttgtaatggcaacttgaattcaaatgtattctaatgttctttaaaatatatcctcaaaaaaattaacgtagggaattataaagaacaaaagttaaaatgggtcctagtcctactacctagaaaacccaaacattggagaaaggtagacagtgagaagtcatccctccccaccttccctagtgccactccccataagagactgttttcagaatatcttccagatacagggttgcttatctaccaggatatatgcatgtaacacacacatacacatatatatacacacacatgtgcacattttattacccaaaaggaatgataaaacactcttctgtaccttgcattttacataatcttagaaaagttttcatatgaggacatacagatctaacttattccagtcctggctggatcataatttatgtaaccaattcaatattaacaagacatttggttgttttgcatttttattttgttttgtttaaccatcataagcaatgctgcaaaaaaaataacaaacatctttgcaaacttttggaaaaaatcctacacaataacttagtgtatttcttagcaacaactttgatactgtataactgtacagttatattgtaaaaaaaatgatgggtagaaatagcrataatagtattatttctgaagcaggatccccctgagtrtagatatttactattataaatatattgatcaacacttaagtaacaaatggaaaagtgtcagatctctttaaaatgcaaatgcagaccatattaatttagaaattggccccatttaggatctcacacaaagatcttctggaaggcataggaaataattcatgcacacacatccaagctttctgtttcaaatcctagtcagttttcccattttccatgtcaggctgacaaatcattgtttcctctcatatataaccttgacaaatacatccactcaagtctccctgtgacatattttccttttaaggatatggaaaaaatcattaaggcataaaagagggaaagacaaggttttagtaaagaaacccaaaaaattctacttcagaaaatatccaccccaagtttttaagaaatagaatcaacattctataattaacgtaaattgtccagtgggaataaatggaaaggatatgcacagtgttctcagacccctaccctcactgctcatcccctaatcccccacgcaaagaagctacyctggttggaatcccacctcagagccccagaaatgagtgaggagaggggaggtccccagtttcattctagtctgagtggtcctatgagggtttctctgatctcatcatcactttgcttgcagaacttagttggcaatcttaagcaaagaagttaagatcaatccagtggctttaggtccagaatactaaaacctctggatcatccatcttaaaggtggtctctacactaatggtggaaacagatttgaccaacctcattcagacccaaaccattcaaaytggtttgcaactaaagaaggataggaagaacgaataatacaggcatccaataatgaacactgaaggagctcaataccctattattatattttagccacaccaaagtgaaaacccctggcttataaatccattcattcamctaacaagtactgattgtctactatgttaacatactagtcaatataacagtaatcttgggaagacttctactatcaattctaaagtaatacttttgtacttatttagaaacttgagaattggtagacatgtaatgcacaaactcttagcagaaaatccacaaagaaatatgttttcaaaggaatttatgttagtcttagaaacatacattggacgataagcccataggcaagcatttctttttatttggtgcttttgtaactaaaagtaaaatttactttaacctaagctataagatacttaaataaaagaaatattaaccttcaagaacaaaagcaaactaaaatatttggctttacaaacatcatccaacagatctaccaacataaatttttatgaaatctcttcggatgggaatgttccttcaatcgtgcacagttttgaagatgttggtccaaaattcatcttctccctgaaggttggtaagcctgtcataaggatggcaaatccaggagaaagtgagaagaaaaaaaatgagtctggaaataaaaggagaaagtaaaaagaaattgaaagagatccgtggttctcaaacttgggtgtgcattacaatcacctggaggaattgtgaaaccacagatgctgggctttatctccagcgtttctgattcagtaggtctagggtgggcctacacatttgcatatctaacaagctcccaggtgatgcttatgctgctggtccaggtgccatactttgataaccaataggctagatcatagttaagtaaacaactgggctttgtgcatagttatgtgtcttgggtaagggatacttgatatattttgaaggcaaatgttcaacattaaccaacagagcattactataaaggaaggtattgctgtgggtaaaagtctttggcatataattattatgccaatttatcctcagagaccacttctgtttgagtttaccatttgtatacaaatctgtacagtaatactaggtagtatctaaaaatatttttgaaccaaattctatttactattagtaagcgattattaatctaaagattactaccagttaaagataaattaatttgtgaaagaataactattttatattgtaattaaagttaaagaaactttggaaagtaaaaagaatttatccactatcctaagccaataccattttatttttgttcatttctcacttgtttgttacatggttgcaactctgcaattttgtgataaaaaaaatctttagaagaatctttatgatctagatactacaatagaatttataaaatgtggatggtatttggcaactacattctttaatggggcatctattcaattcgcggtaataacattcatagagtgtgtaataagtatacaccagccatggtatcaagtgctttacatatgttatcccatttagttcccagatcggttatgagcttggtattattattcccagggatgttatttaaaatatttaaataaccagtagtgtatgagccctggccaattagaacagaaacccccacccatgagaacagatgctgtaccagtgccctgtgccagcacatacatactgaatttctgatcatctttattttacaaataagaaaagcatagagaggtcaagttccttgcccaagccacactgctaatcagcagcagactgggacacaacactccggcagcccagctccacagatggcatttttaaccatttataccacatgtctcacaaagtcacaaattacttacccattaacattgtagatgttgagtttttttccattgagccatttatgcccagtgttccattattggcgcactaagcatgtgggagttacttatatcctactgctcaaggtcattgccaaggtatgatcgaaatttcaaaaaaattgcaacctcaggcataaatgcgttttaagaggtgagacacagagacctgaagtgtgactataaagtaatggstgactttcatttggactcagtcttaccacctcgtagttgcccttcatcaacacggggttactggtgaatttccttgcatcatgtacatcctgttgcagtactggcacattttattctctacataggtaacaacaggaagtgttccagtaagcatggcaactgtaatcatccacatccctcagtataccaaagaaaagaacccactgatgtacctaactggggtgcaaacagacaaggtaaagattaaaaaattgcctaaaaatgtgtactttcaagatgtaaataacccatgagattagggtgatcatrtctgacattttacagatgggaaacagatggtaactcctatgcagcctgggtgccaactgactagcagttaatttcatattagaaaaaatattgttacaagaaaacaaatggctgagtctagggaattgcaggtggcagaaattattccaaaaaccccattttggcctggtgaagatctgactttgacaggccctgtgaaggctgggaggtaaggggctggacctatatggggagcatagcaggtcttcacagctgtgataaggagctggtcttcaagcagccagcctggactttcgcctggtaatactcaaccctggctgttcattttaatccctctgttcgctcttttaaataacagtgcccagacctaacccaggcaattaaatcagaakctctaggggtaagattcttacaccagagtttttctttaaccacccccactccatccacaccatggttctaacacgcaacctgggctgagaagcgctgctctagccaaacctcttgacattggctcatcttcagtccaacagttgtattattcaacagttgtattatttctgtagtgtgcataggaggctacagaaaaatcaaaatcctaaaatgttccagagaaaattaccctgaattattcacagtgtttagctattgcagatttgcctcatcatatgtgggctataaaaacctagcccacctcatcagttcacatcaggagcatttaaatacttgatgttcacctagagattatatgaagtgtggccaggtcagtggcgttgaaagaagcctaacagcccttcccagacccctacaagtgacagtaggatttcctaacatgttgaaaggaacatcataaactgttttgcttctgaagtctgatcgggtgttcttcttttataggctggtgacatcagttgtaatgcagatatcaatccactgaaaataggacaaacatcttcttctgtatctttcaaaagtgaaaatttcaggcacaccaaagaattggtgaggacaagttaacgtgtgaaagctcccctcattcatttatttcacctgtgatcaggacgctgcttttctcctaccagctgatatcatagagctttcttattttgcctttgatgcttatatgagtcaagatttagaaaatattaggttggtgcaaaagtaaatacgattttgaaacccacaatttacgtttgcaccaacctaatatgtggtcaaatctaggttactggaattatcttatgccacttcttacaaaatataagttccagactttatgacatcagaaaaactcatgtgaagctattgtgtttatgcgttgtgcactttggaaacaaggcaaagagctgtgaaggaactagctgtgtgctacagaggagaagccccttaaatcccccttccacataatactgatgttttttatttagctgtgaaatatgctgctgcacttctctgtttttcaatattttgttatttcctgttctcaagctatgcctgcttctttgggaaagagactagtctagcatctggcatggtgctcggcacatattaaatattcaaataaagtaaacctttagtaagcaataactcctaaacaaacctcagctctcccctatgaacaatattggaattctcctggttttctttaattgcagttgttttattttgtgaaggatggggaaaacaggaaaccagaagaataaaattatttcttttaatgtgtattaatctacaagtaggtaaatgcatgctgtaactgaagtgggccacgctaccttttggccttgaacataggccaatgtgtcatagattttcaattaatgacttcattttttaatgcagttttacattcatggaagaattgagtggaaagtacagaagttcccatataccccctgtcccacacagcctcccccactatcaaaatcccgcacaagagtggtatatttgccacaatcgatgaaactacattactatatcattatcaaccaaaatccatagtttacattagggttcactcttggtgttgttaaaatccacgctgtggaatttgacaaatgtaaaatgacatgtatccaccactatagtatcatacagtgtatattcactgccctacacatcatatgtgctctgcttattcatcctgcccgccccactagcccttggaaccactgatcctttttctgtcaacttgtttaaaaacctagggagtctataattaggtttaatgacaaattgtagtacattttgtgcatgtttactaatttatttaactagtacattgttgctaaacaagttacagttttggggggggttggtttttaggtttttttactcttagaaatagtagtgcaataaacaggcttggggtactttgttccacatattgctgattatctcctgaggctatctatacagacaggaaatggatrgggtaaagagtgtgcacttggtacattttgagatatagtcccacaatcccttgaaggagggcrggagagttagaactactaatagctcatgagattgcctgtttccctaggtgtgtcccagcactgagttttatctagctttaaaattttagcatttattttttaactcttactaacttgctctctcttttacctttgactcaatactataagaactgcagaactgcttcctgtagtaatgttacctgctggttgaaagacgttcacatgaaaggagaatactttgttaatgtgactaccagaatttggaacgggactttygcatcagtaagtatcagttttatttgttagatttatcaatagcaaggaaacataagtctgcactgacaagttcttcccctttgacaaaataagtattctggctaatgtctgcaatggccaaataacccagagcattttaccctgaaaggcagcacacttccatcgctttccaatgcccatccaatttagcagtgcctcagagtcatctgggatacttgtgaaagggtctgtttctcagactccatgcgacctaccacatcaatgggaatggtgtcagggtcatctctgcggccctgggctacaaggggcagcctgctttgtccccctctaggggttcctccactctccatcttcccagtctcctgtgccacacccaaatcaaaatgtctgtgtctctgtctcactccttgagctctcagttaattgtatgattgatctcaaaccacctagtagatgaatctagcataaagatatgtcttcctatattacagccaggtcatcaccctgctctcctgttttacccttttcctgttgggagagcccagtgggcacatgactttctaaatcatctcaatccccatgaaagtttgaagaaaaagccaaaacaatgtcattgtttttttccatatggcaactgtgagtctgctctagttatatttgctttcagcagggattttggtagctagaatttcagtctggcatgaaaaaatataaggatagacaggcctccttaaactggactgcttgtgtggctagcattccttttactgacatgggctccaattgaggaagaaaaacagaaattagtctgaaacctcctggggatctttgtagctcttactagattttttttttctttttaacaaataaatcagttcccaaggtgcttacaaccaaacgctactcatttttttttctgtttatcatttcatgatctctccaataaatccacttcctgctatagagttttgtaaaactggagaactcagcaccctccaaactcatccctggagtcaaatataagcaatattcttggacaaagacatagaagaaaacggaatagtaaaagttagaacaaaatgcagaattgggggaatggggaagtgaggagttgaatatttcttctggcttgcttgcttgcttttactttgttttcttgttagttgcatttgctttcaagtcttcaggacaattctaggtcctttaagacgtgaagcgtgccgttagttgttatcaccttcccagctgctgcagtgtggtgctcagttttgctccattggttcttggctccttggatttgaggaacaaatgttttcatagcaaattttgccaactggaaggaacactgactgttgcacatcaaaatgcacacatgccagctctgtaaaacacatttggattttcttgagtttaagactacatcactttaactgtgaaactttttaaagtaccttcccaacgatcttcagaagcagtttatttctgggagtaaacttcctagaaagtgtagtatttatgctgctttaatgtggctatggtggttaaactaagaaaacacccttgagatgtcaaggtatgtcaagtgacatacaaggattgtgtcaagtcctacatatcttcctccttcatgaaaagtcaaatgtttwtcctcaccttgcttccagcaatttaagcagcaaagtggatgtttctcagaccacttaggagatccagtctgaaatatggatctcatttcctgtatttgaacccattaatgcactgccttttgttgctaccctttctctgatgtagtgcaaggcaacttaacatttcaagtaatttcattacaaagtgattgatcagggctccaaattgatgatagagttgctgccatttgtagggagaagscttgttgaacgctagcaggtgcgttacttcactctccagatgtgtgtggcatgcttacctctacttgttaaccctgcaggatattgtatgcctgtgagaagggcctattttgagaatgctataagaaaaattctttcatctttagtctttggggattatgaaaccagcatttacttaactgctgctttttttcttaaacttaaaccattatcaatactcttaatgtttcccccaataatatgtttaagagactggtgagcatggttaatttctgatccaatcatctatattgagaaaattaacagtaaccagagactgagccagtggaaaggaaataaattgctcagtttttggaaatacattctttctggctcccagatattgtttagcaaattacctcacagagtatgtccaataatgtgccctagtaaccagaaaaactgagtcctagtagccacagcatgtgaaagcagctctaacatctaagcgctgcattccgcttcacagtagcatcagacctaatgtagagaaaatagtgaaatatacacatcaataatgtttctattgaaaaaatagacttttttttttcccccagacagagccttgctctgttgcccaggctggagtgcagtggcttgatctcagctcactgcaacctgtgcctcctgggttcaagtgattctcctgcctcagccgagtcgctgggattacaggtgcccaccaccatgcccggctaattttttatattttttagtagagtcagggttttgccatattgaccaggctggtcttgaactcctgacctcaagtaatctacccacctcagcctcccaaagcgctgggattacagatagaagccactgtgccctgctgaaaactaggctctttttctgtaactagatggaggaatgaatgtaaagttatttcgaattagtaagttaccagtgacatcagcataaaatatccttcctatatacctgccccaaattaagtattatttgatagaaacacttagataggaaatctgaagttatactgatgtgatataacaagctgaaaggttcagggccatgggtggtcaagttcaagtgcacttttaaacactatcattttacacacatgtacccagaaggaaagttctcttaccttttaaatgttggttttccattccattgtgtgacttattcaggtaagtatacaaagatgccaagtttacaattttctctcatgtcacaaacttattttttaaaaaatctgaactgtgatcttcccagttagaaatattcatttttaaatcctcacttttcaacccagttctcaagttcagatctcctcagggagatattttaacctactcatgtctggatcccaccccagagagttgatttgtggtggcaaggtgcagacagacatgtattaaaattacccgaggtatttctgacgggcagtcctgttacacagcactggtttaagcacacacagattctggatgggtcttcagaaccatttgctcttgtcacattccaccaggaaataaatacataaatcataagcatgccagcttctctgcatttgctgctgctwcgataaaacatattccttattcttatgttccagtcaacgttccagacagtacagctaacggcagctgcagaaatcaacacctataaccytgagatatatgtgattgaagataacactgttacggtgagcatatcacacccttccctgtgagcctcrgggtctgtgatggcattccayttctaaaagcctgggatagtcactcttcttacctacatgtatgtagaagtatcttactaaaactttaaagatctgatgtttattatgttgagattttggcgagggtgtgtgctacttaaaaagttcagtgatacacttgccttcctccatgccccccactcatgtcagcaaagctggctttcctagaggtggtgatccagtgagaagtacaacaaaaggggctctatgttctttgggactccatggtgtctcttctcatgactaagccagcagcaccagttcttcctttctcctcctgcttacacaaaatggtctggagcttaggccacaaaacttaatcatgcttatttaaatcataaattgtattttgaaaaatttttaaagaaaggtactgaagcatgcttaataaataatgcatttattagagggttttaaaaaatagttctccttacaactagacactgacactgtgtggcatgtccattcattagatcttacattcgggaggactataaatggtccccttgataaaaaaaaaaaaaaaagcttttacagagaaatgtactttcacagaaaacaaaggctctctgttctaagagctggcatgagataattttcctctgcactgactctggttagaatatgccatgtttagatacagtgggatttccatgcccagctaatctgctggcagagccctgagcattttcctcccagtgcttgtgttaggagttgaaagccagtttaagagtctgcccccaaggccagcttggcagttggcctcagtccactsctctggcttggtcaaaaagttatggccccatgaactatgggcctcctcactccatgcctgagagtgaagctcacagcactggagccccactcttgtccaagggaaaatgattcyacgcaacagagcacacttctctgcctctggtttaggagcctcagtgaaagcctacaccctctcttcagacactggggcctggaaaatcagaaatagagccaaaggaaatgcagacttcaaattcaaaatgctatgaacttagcataggggagaagtattatagattttttttaaaagctcattttagaaaaacatagtgttcagacaatatgtgaaactctactgaagactgtttttagaaagcagtattaaatatatcaattggaaattcaaatgaacaattttaataaatccattagattcctcttttattggtttcctctgagcaatactaataaataacagaagccaattactaggtgcaaaagtaattgtggtatttgccattaaaagtaaagaaaggctgggcacagtggctcaaacctataatcccagcactttgggaggccgaggcaggcgaatcacctgaggttgggagttcgagaccagcttggccaacatagtgaaaacctgtctctactaaaaatacaaaaattagctgggtgtggtggtgcacgcctggaatcccagctactcaggaggctgaggcaggagaatcgcttgaacctgcgaggcagaggttgcaatgagctgagattgtgccactgcactccagcctgtataacagagagagactctgtctcaaaaaaaaaaaaaaaaaaagtaaagagaaagtacttttaatggcaaagactgcaattacttttgcaccagcttaatattactcagttgtgtctatgaaaaattttttaatctaaacaataatttggataaatttttgaataaggtatstaacctaaataataacttcacatgttcctaagtatctgttaatttatttgaatgcctggcccacttaaaaatctgatccacaaaatgctatagtcatgggtccatagggatccgtggttccctgggttagaaagctgtggaaaagagagaagtaggcttatgactgccattaagcagtgagctacaagaatttatcatcactttattcataaattgataaagccttacattttagctcttgaagatacaaatgaaaggaaatacagtcaccaaggccagttgcaagtttagcccagcccataaatttatgacaaaaagcagctcatctgccattgcaatttaatgttacatcaagtaaataaaacacatattatcctcttcttttgcttctaaatacagctctttaggaatattttctaaagagaatgcttgagacactttccccaattaattaaatttcccctaattaattaaaaactgaatatacagttttactgttaacactcagggcagccattccattacagcatctcaaagattgccaggaagcagatacaaagaatcctaagtagcctgaaggacaacgttcccactgaaaaggtcaacttgacccttgagatattatttctacttttccaacaatatcaacttggaatgaggtttaagtgaaactagtattttagacacccaatacaaagctgctgtttcatcaccatgaagttgggttaaagagtttcttcgactcccttccccaaagctgtttgctttcacttgatgatgctttcacttgatttgaatgtatgccagaaatggaagtttctatttcataagtaagataagcatctgagattgtcaggcatgatgtagccacaagacactgatgtagttaaagcggagaaactagaaaagttgtattttttagctggttggactttgcaggaagattttctctaaaattattctgacaatgtttgagatacgccatcatgagcaagtcttgtcacctttctagagctgtagaccttcacttacagaattagagaattggactagaccatctccccccttttttgtggtattaaaataactcaactgtgaactgacatttccagattcccctgatgataatgaaacctgatgagaaagccgaagtaccaacaggagttataataggaagtataattgctggaatccttttgctgttagctctggttgcaattttatggaaggtaagaaaagctttatattttaaaatacagggctcctgaaggccagccttgaatttgcttrcaaaacatcaacttcaggttttatatggtaccttctctatcacaaggagaaaagaaatgcaaatttgtttataatttcttactcatgtcattaaaaacaaccagtaaggatttttcttcttttaaaccttcctttcatccagagccctgaatgttttgttcagcttcaaataagtagacgctgaaaaatgtagctttatgcaatgcagctgagctctctggatataaatttccttctagcaggtggtagatatcaggtcatcagtctgcacacctccyttcagagcctcagggattcccagaggtgcatcagaggacgtgggcagccaagggggtcagaggcaccttacaaaataagccacgggtggtaacattcttatatcatcacctttacagctcggcttcttcaaaagaaaatatgaaaagatgaccaaaaatccagatgagattgatgagaccacagagctcagtagctgaaccagcagacctacctgcagtgggaaccrgcagcatcccagccagggtttgctgtttgcgtgaatggatttctttttaaatcccatattttttttatcatgtcgtaggtaaactaacctggtattttaagagaaaactgcaggtcagtttggaatgaagaaattgtggggggtgggggaggtgcggggggcaggtagggaaataatagggaaaatacctattttatatgatgggggaaaaaaagtaatctttaaactggctggcccagagtttacattctaatttgcattgtgtcagaaacatgaaatgcttccaagcatgacaacttttaaagaaaaatatgatactctcagattttaagggggaaaactgttctctttaaaatatttgtctttaaacagcaactacagaagtggaagtgcttgatatgtaagtacttccacttgtgtatattttaatgaatattgatgttaacaagaggggaaaacaaaacacaggttttttcaatttatgctgctcatccaaagttgccacagatgatacttccaagtgataattttatttataaactaggtaaaatttgttgttggttccttttakaccacggctgccccttccacaccccatcttgctctaatgatcaaaacatgcttgaataactgagcttagagtatacctcctrtatgtccatttaagttaggagagggggcgatatagagamtaaggcacaaaattttgtttaaaactcagaatataacatgtaaaatcccatctgctagaagcccatcctgtgccagaggaaggaaaaggaggaaatttcctttctcttttaggaggcacaacagttctcttctaggatttgtttggctgactggcagtaacctagtgaatttytgaaagatgagtaatttctttggcaaccttcctcctcccttactgaaccactctcccacctcctggtggtaccattattatagaagccctctacagcctgactttctctccagcggtccaaagttatcccctcctttacccctcatccaaagttcccactccttcaggacagctgctgtgcattagatattaggggggaaagtcatctgtttaatttacacacttgcatgaattactgtatataaactccttaacttcagggagctattttcatttagtgctaaacaagtaagaaaaataagctmgagtgaatttctaaatgttggaatgttatgggatgtaaacaatgtaaagtaaracatctcaggatttcaccagaagttacagatgaggcactggaarccaccaaattagcaggtgcaccttctgtggctgtcttgtttctgaagtacttaaacttccacaagagtgaatttgacctaggcaagtttgttcaaaaggtagatcctgagatgatttggtcagattgggataaggcccagcaatctgcattttaacaagcaccccagtcactaggatgcagatggaccacactttgagaaacaccacccatttctactttttgcaccttattttctctgttcctgagcccccacattctctaggagaaacttagaggaaaagggcacagacactacatatctaaagctttggacaagtccttgacctctataaacttcagagtcctcattataaaatgggaagactgagctggagttcagcagtgatgcttttagttttaaaagtctatgatctggacttcctataatacaaatacacaatcctccaagaatttgacttggaaaaaaatgtcaaaggaaaacaggttatctgcccatgtgcatatggacaaccttgactaccctggcctggcccgtggtggcagtccagggctatctgtactgtttacagaattactttgtagttgacaacacaaaacaaacaaaaaaggcataaaatgccagcggtttatagaaaaaacagcatggtattctccagttaggtatgccagagtccaattcttttaacagctgtgagaatttgctgcttcattccaacaaaattttatttaaaaaaaaaaaaaaaagactggagaaactagtcattagcttgataaagaatatttaacagctagtggtgctggtgtgtacctgaagctccagctacttgagagactgagacaggaagatcgcttgagcccaggagttcaagtccagcctaagcaacatagcaagaccctgtctcaaaaaaatgactatttaaaaagacaatgtggccaggcacggtggctcacacctgtaatcccaacactttgggaggctgaggccggtggatcacgaggtcaggagtttgagactagcctggccaacatggtgaaaccccatctctaataatataaaaattagctgggcgtagtagcaggtgcctgtaatcccagttactcgggaagctgaggcaggagaatcacttgaacccgggaggcagaggtttcagtgagccgagatcgcgccactgcactccagcctgggtgacagggcaagactctgtctcaaacaaacaaacaaaaaaaaagttagtactgtatatgtaaatactagcttttcaatgtgctatayaaacaattatagcacatccttccttttactctgtctcacctcctttaggtgagtacttccttaaataagtgctaaacatacatatacggaacttgaaagctttggttagccttgccttaggtaatcagcctagtttacactgtttccagggagtagttgaattactataaaccattagccacttgtctctgcaccatttatcacaccaggacagggtctctcaacctgggcgctactgtcatttggggccaggtgattcttccttgcaggggctgtcctgtaccttgtaggacagcagccctgtcctagaaggtatgtttagcagcattcctggcctctagctacccgatgccagagcatgctcccccyrcagtcatgacaatcaaaaaatgtctccagacattgtcaaatgcctcctggggggcagtrtttctcaagcacttttaagcaaaggtragtattcatacaagaaatttagggggaaaaaacattgtttaaataaaagctatgtgttcctattcaacaatatttttgctttaaaagtaagtagagggcataaaagatgtcatattcaaatttccatttcataaatgrtgtacagacaaggtctatagaatgtggtaaaaacttgactgcaacacaaggcttataaaatagtaagatagtaaaatagcttatgaagaaactacagagatttaaaattgtgcatgactcatttcagcagcaaaataagaactcctaactgaacagaaatttttctacctagcaatgttattcttgtaaaatagttacctattaaaactgtgaagagtaaaactaaagccaatttattatagtcacacaagtgattatactaaaaattattataaaggktataattttataatgtatttacctgtcctgatatatagctataacccaatatatgaaaatctcaaaaattaagacatcatcatacagaaggcaggattccttaaactgagatccctgatccatctttaatatttcaatttgcacacataaaacaatgcccttttgtgtacattcaggcatacccattttaatcaatttgaaaggttaatttaaacctctagaggtgaatgagaaacatgggggaaaagtatgaaataggtgaaaatcttaactatttctttgaactctaaagactgaaactgtagccattatgtaaataaagtttcatatgtacctgtttattttggcagattaagtcaaaatatgaatgtatatattgcataactatgttagaattgtatatattttaaagaaattgtcttggatattttcctttatacataatagataagtcttttttcaaatgtggtgtttgatgtttttgattaaatgtgttttgcctctttccacaaaaactgtaaaaataaatgcatgtttgtacamaaagttgcagaattcatttgatttatgagaaacaaaaattaaattgtagtcaacagttagtagtttttctcatatccaagtataacaaacagaaaagtttcattattgtaacccacttttttcataccacattattgaatattgttacaattgttttgaaaataaagccattttctttgggcttttataagttatatattttactatttttatcttatacattcactttgctcacatccaagactcaatttaagaagactgaggctataattaatttgccataagtgtccagtctatgtttctagcagtgaccacaaggatcttcttttgtaagactcttaaactgccttcgaagttttgagacagtgtaaagcattgctcctcaaagtgtggcccagggacagatggtgctgcatcacctggagcctgttaaaaaacacagatctcaggggccactcaaaactattcaagtcaaattgtaagttctacagcatccccaggtgattcatattgcattgaagttgagaagcactgctctaaagcttaccttttgaaataaaatgtgtgcttggaatagagagggaaaaaaaatcagccaaactgctgcaacatgcaaaagcagagtcatctgcacagtttaaaaaaaatcataataagcaggaaggtttaaatatttttaaagagtaaatatgctgaaataaatatgctgtaagttataaagtaagtacacgttgggctcacagactgccatcgctgtacagatggcagagtaatgcaaagacagggtggaaagtgtgtgtgtgctgccataaatagcgatgcaccagcatctccattcatgtctgcggcgctctctcacatgcctccctgcccatcgcagttgtgctgagccgtctcaggagggcagctcactgcagcacaaccatcaataagtgtgtctgctatatatctcacattaaaatacaatcttggagagctgaatgtgggaattgcagctacttgggaggctgaggcagggaggatcctttgaacccaggagttcaaggccggcaacatgagaccccccccctcccagctcttaaaaaataaaatgttagagaaagagagcactaagttttatttctttgtttttcacagagcaggttaggaaatgctgtacaggttaggaagacctgtattaaagcaatcatttatatcccatagttaactggaaaataattttatacttactttttaaaaagtacttctttttatttattctacatcacttgttaaaaactacaaattgcattttcaaaaactccttcctgatcctatcataatcttttaatatttttaaggtgtcaattaaagattggacatcatcttacataaaatcagggcctaattttcatttcggaaccactacagcctgactttaaagaaaatggctactaaactgaacttttggttctatgcaaaattaaatctaagtaagactcaagttgctaagagcaactttactataacttttactatggctctggctctactgccctctgctggatgatccaccgaactacatcacacaaatcattcttgagagatcttcactgtaccaggtgctcagtaactgtgtaagatgtctaaatcacttatttctcaaaaaaggctgaaaatatattgtgactctatacatcatatccaaaggacaaaaatgtccacaaaataagtcactcattgaatatctgctgttactttcattcaaagatgataaaaatcaatttcattttaccacctgttcaaaaatacttgaaacataaataatttgaatttcctatttcttaagtgaacttacctagcaatcatgcaaagtcacggctttaaagtgaccaagaaacactgcaggcaatctgattaaaggctaattattttttttagattactcttctagttacttgaagctaagttacagagatgatagaaaagctacatatcagagtgacagtagccccttaatatctgaaccaccaattaactctgccactcctaagtaagcaagggtcagtaaagatcctatctaagtcaagtgcaatgcactaaaatctttcaaggccattccatcccagttctggcatgccccaggttaactccttaacctctctgttggagactttaaaagcataacagtctcagttccaaacttagaataaagcctacttaatgaaggcatgattcttttaaaacataaagaatgttctatgttctttaaaaacatcattaccctcaataaggaacttctaaagaaatatctaagtaggaaagtcttgaaatccacatatacctatcaacattgcatatgacataacatccatttaacaacctatgtccaaaatcctagaaatgtccagtgacccagtaaccccatgataatgtgcttttagatataatgcaacagccaacacccaccccttctctccaatggggacaggcggaagctcgatggcaagccagagtgacactgaactgtgaaggtaaggctgagaccaaacaggcaacccgaacccggcagaggaagtaggcggagggtttgtctgcccttccagtatccttctggcccaatctctccagacggactaatgaacaagcatcaactgatgtaaccaggtgattcctaaagtcagtgtggctgtcctatgggtcccagccacagataagatgcagagtgttcctcaaggtattttaggttggcagaaaaagatcactgggtgggtgcctggcacaaaacaggcattcaataaatatttgttgaataaatgggttccttaggtaaaagatgttttcactacatataacaaataggattactacgtttcttatttgtcccagacataagaaaaaaatccttcaatctaagtgtctgaaagtatagcttttgttcttaatatgcataatgcaaattttgtgatgatgccgactgcccaaattttgcctgtattttattattttatgagctatgtgtttacctgaaatttgctgagagtagaccttaaatattctcaccacacagaagaggggactatgtgagctgaggaatatgttaattagttggattatggtaatcacctcacaatgtatatgtgtatcaaaaatcacattgtatactttaaatacatacaatttttgtcaagtatacctaaataaagctggaaaaaaaaatttaagaactatatgggacttatatgtacaagtctatcaaaatactataaagcttaaccagttaaaaattggggcattgtttacctaaacatttcaacacaaaccaccttgttgctagttagctttatgacaattttgtgctgatttgtatattgatacaaaattaacaactaataaaaaacaacaaaaagttttctggtaagattatagattctgaaatcccagaaatctccataatgagaactattttaggcaatttaaaaaaaaagaaaatactctttttaaacttttgaaatcatgggttttagtttattatttttaatatatttctgaaaatgtataatatcaagactgtctgataatgcttttttaatactttccagttctgccaacattcctgtcatgcatccttaataacaatgctctcccagaaccgggatrgggggcggtgaggtggggttggtgggggagtacgtttctgagctagttaaagtcactgaggagggcccatacctcaatgtgtgttgagttacaattagaaattagtcatggaaggacatgtctaccacagatatctttcctcacatttaaattattccatttcttcctacagtcctccttctatctttagttccattttaaataacccttcatcctacatacccatttatcttgcttcctttttctcccttttgtcccactagtataagagattgtgcttcagtaaactatcctgatgtggagagaaaaaaatcaaaatgtgatcaataataatagtttaacaaagttaagattgcatgctctaaaaacataagtgattaactgttggatgcccaaaagcactctttgtttcctttccaagttgatgactcttcgtatatttyctaaaaaacaaaatcataacaggtattaaaaatagaccattctactatacgaatataaaatatatttgaataaatcagacaaatgaatatcacatctatttcaatggctcctcttttaacaatcatgacgagagacatcatgggcaaggttacataggggaagacagaaagtctttagttttaaacatttttttttctttccaaacatacctactacttcaacatttctaaatatgcttttccaaaggcagatatcttcattagctgttgaattaagtggtcacctctcagaagttcctaaacaagtttgagctgccctctggtatgagctgttctttgacatatgcactctacctacctgccacccttccctatatcacagatgatctcaaagcacaggccgagactagaaccagactagaagttacatagtttgtggaaaggaggggtaaggagaacatatcactttctcttctcactctctagtcacattccatttctgtagggagaggaattcaaattcaactgtcctctgaactcctgcacttcctcggactctctatggacaaacaaaagcaaaatacgaagcccaactagtcctcaaagcatgaaaacaagaatatgccccaactcctgctcattacctgtatttctggggttgctcccatctactttctgtccactgactgtgcaccctttcctccctggtgaagaaagctacccctgccttccaggcttgcagctgatcttagaatgctcttcctacctctcgctctctgggggcctgcctcctgttgtgtcagccttgttcacagcaagggaacaatatatctgagcttcactaagtttcctttcacacatattctatcctctaatccctacgtattctaacaatgggcttcaattttattctgaaaacatggtcatcaaatttcccaggccctggttatgagtccaacttgcttatttctaccactgactgaggcaggtcccctgggaaggaggggagaagtgccctttaaaagccctggctctctgctctggtcttttcatctactgagctgttcattaactcctcagctttctgtcaaccacaacgctgtaggcaattctagacaattctagacattgaatgtgcaaccacagaacaatcccactgttaatgttactacaccaggggagaaactagggagttgggccttttcatcccatcagaatgctctatttaaccagagaattacttgcccttattgacagaaaacatgccagaagttcctatttctgtttttaaatccactcactgcattttctcagagggagcaatatctcaccatttttttttcttccctaaaaaggacctctaggaaaagcctctttcactttaaagaatttctattttagccattacctaaatagctaatgcattattctcactctccaacagaaagaccctctaattcaagggaattataatccaaggaaaataacttcatgtatgaacccctccaacagtccagactaggaattctcactgttatcactcattgaggcttactgtgtgccatgcattctttggggcacatatttttcatgcttaacaaatcttggaaagaagatatttcacagataaagaaaacaagatactacagtcagtaaaaagtccataaatatggggggatttatctaaaaattcctgagaaaaatcaggtccacatgctaaaatgtgttattttcttaacttacctttttccatatgggcaccttggcttttaaagtatcaatggcatagctcacagcttcaagagatgcagctctgtgggctgaggacacagcaatgattatgcttgcttctgacactggaaccaagctttaacaagatgaagagaaaaaaaaatcaccatcatctctgaatctacgtgtt

SEQ ID NO: 8822 - DNA, 107450 bp, Homo sapiens
tcatagaaacacaaaatatagtaggtatagtcattgtgtgataaagtctttgttaccttgaatttctacgtttttgttgaatacttttttgacttttccttcatatgacaccattttataatattttcagtgtacataaaatagaaaaaataattcagtctttcttttagtatgtttgatttaaatttgtttcttgttatgtggaaatatttgaagtcatttcaagttcaccacttatgtctaaacatttttaagattgtcatcaaatttcggaaaaaatcctgtcagatttccctgacataataagctccaaggtttcaggacattaaaagagttctaatgatataattaatattaaatgttctttaaattgaaacattgaaaactagtttgacctcaatgtcttcatttcaaaggtgcgttgtaaattttatggtattgttattgatgccaatatattgtgaatgacttgagcaagttttcatttttactaggagaagaatcaatgagaatggaatcatccacttaaaattttacacagctgatcatagtctttatactttttaatcttgtttctccttcactacacatagacttctggtgtcgggcatattcatatgtgctgtcttcagacactgaagttttgtgttatgatgcaaattgatttggcacaggggtggtaggagtattcctggaagccattcttacacttggaggaccatcagttatcaaattatatttaattgagactgtaaaatataccacataaatctcaaactaatagcattctatgtgtaactttttcttgcatccttcaaatgcctgaaactgtaatgtcaactgaatcagtggaaatgcaatgaaggggaaatcagcatagaataagagagacagccgttcattctcttgcaattaagagattaattctcttcaattttttacaaaaatagatgaccatgcagaaacgttattaagggccagctcaggtccttgatggtgtctgttcaaattaggagccctgaagcttagacttcattagcttcatagaaaaatcaagctctgttataaatattagtttttaccctttttctttacattgagatgctgtgtaatagttgtattatgaattcattcagtaatttatttaatttgtcatttctctgagtcctttttcctccatctattttaatacaaccgccaaagcaccattacttaaataatgcatgacttacatttcttcctcaattagatctatcaaagattctttattgcctgtaaaataatttgcaagtttttgatctggaattcaaaccattcctcatttaaagctccttttacttcttccacaatttccttgtgcaaaaccactgctccaatgtgagtcttctcattaattctagattagtccccacactttcctattcttcacagtctcagtggtactcttcccttaaactacagtgtaatatccaagtgttcttaaaatcatccctgatcaaaaccagtgttcagtaatttctctttcttgtaaacttccttcgaaaattttaatcataacagtcatttgttacttagcatagatattaactatttctaattttttaaatatggatttttctctaatacaaatttatatccttactcttctaaatttttaatgtccaaatatacatagtatgtatttgctgagaatgtgccaacatgaatattgaaaataaattggatccatttcatgtttaatcttagtattaatagttaactatttactatctggtctttctaatggtaatctaatactacataataattttatgagtttaaggcataatatgttgctaattttcttatgttctgaatttctttataatagacttttgtagttttgaaaagtattgatgaaaaaagggaaacaaaaacactcaattgacattagccatcagtctttgaaaaaaggtaggataaagaaaaaatagtaaaaataatacatctgaaagatatttgttgaaattaattcaagaggattatttctacttggatagtagagtggcattttacattcaacaattgcaaattaggtgaagatttgtatagcaaaatcattcctgtatgtactttaaattatccacaaacatatatatgtgtgtgtgtaccttcaatacttttacagtatatgcataattgtaaaataaataaatgtgaagcatacactagagtacatatgtgaatattttactatatttttaaacacatattttaaacacagaccactggatttgatacctggctccagcaatgtcttgtgaccttaagggagttgctaaaatgttctgtggttcagttcagtcatctatacctttgaaagagtaatagtctcccatttcattgtgttgcattaagtattgaataaatgtgcttagatctgtgcctggtatataattaacactcaataatattaatcttagtaagtttctggaatactctccaagtgataatattgctattagaatagaaaccactattggaaatttaagccccaggtaaaatgtttggattcatactcaaacagataaaactaaggaaggaataaagaagaagtttaaatgatctagtatgtcaacatatgtgttatcagttaaatcaaattaaacttcagaatgatagttcagaattcgaatttgcttgattattcatatatccatgctattttatttcttatttttctcagaacaaatgactaagtctaactcttattccttatatttttattacaaaaataaaaataaaaataaaataaaatgtaaaattcacattggaagcaaaattagagttagggtgggccatttaatatgagaaaatgaccaatgcaaaagaaggatatcacaattctaaatacgtatgcaagcatcatcatagccctaaaatatataaagattcacagcattaaacagggaaatacacaaatccacatttataatgggagatgtaatacaccctttcaatatctgatggaataatcagacaaaaacataataaaaatacaaaagattttaacaaattacaaacttgacctactgacataggtagaattttgactataatgggccataaagaaagactcatcaaattttaaaacagtrtaattatttagaatatgaaattaaaaaagaaatcaatttaaaagataactagaaagccaaagttcccagaaatttacactttagaaaagttttaaaaataaactattacagtaagaagagcttggtgatatagacccacacatatccagcacctgacttatgacaaaggtgaaagcatgtcagtacagaggaaagaatgatactttcgttgaataatgctataacaattggatatctctattttaaaaatgcatctggagctttttattatgctatacacaaaagacaattacagttgttctaaaggtcttaaatgtgaaagataaaataattcttttagaagaaaagcattgtgttctaggactaggcaagctttcattaaataggacacataatgcactagtcatagaaaaaaattgaaaatttgctctattttaaaattaaggaattctttttattattataaaagacatgtaatactgaatagaaagaaaacccacagactggaagaaggtatttataatacatattaataagattattttcatatctagaatatataagtaattatatataaacagttcctacactccaataagtcaaagacaaacaactcaataagaaaaaaatatgcaaaggatttgaatagaacctttaccaaagagggtatctaaatgaccagttaccacaggaaagtttctcaacttcatgttaagggcaggagacagggaaatactgggtagaagagggtggtccccaagcaaaggccccaccctcaagcctgaagacctgtggccctaaatgaggacaggcatttcaggtttcacacccaaaaagttgccttttggcccgccatgccccgctgtcgtacccccatataaatcccaaactccaagctccagaagagacctacaagtgaggagacggagaggcaagccgacaaacaggcctgcgatggcagaatgacacagcagagaaagagaggagggacatctggactccgaggggagtttggccagggacgggtggagaagagtctggccactgggaggcctgacactgggcgaaggtcaccttcccactccatcttgctgacagccacctccaccactcaataaaaagttgccctcatccctcgagcccccgtgtgatccgattcttttgggacactgggcaacagctggggatatagagggctatttcactgtcccactacccatgagataaggaagagggtttgttgagctgattaacacataaaccatttgcagatggcaaagctaaaggagcacactgtaacatacgcccacttgggcttcggaaatcgcagacacccacccctagatgctgctgtgaggccagagcccgaaagcgctcactccggttcccgcacckgtgcatctgtgtgctccccctccccgtaaggggtttgagctgcagggcgacctaactggcaagccgcacacctgttgcatgtccttcaaggggaatcagggatctctcacatttcaattagtcatcaggaaaattcatattataaccacggagaattattgctttgtgttaccagaaaagctaaaattacaaggattaaaattaccaagtatctctgagggtatggagcaacttggacactgctgatagaaatgtcaagtgatgtcaagtgttataatccatttggaaaattgtctaattttatccattacacctaaacataaattatgtcccagtgtttcactaccaagtatgcacttaccagaaatgtggattgtgtttaccaaaaacctcataatataaggcccatagcagcactattcataccagctccaaactaaaatctgctcaaatgctcactaacaggcacacagataaataaaatgtgaactattcaaaaagtggagtattaaatcgcaataagaatgaactatctgtaactacatctaacaatgtgtttgaatggtccaaacacaatttttggtgaaaaactctaaacataagaataaactgcttctttttcattatacaaagtacaaaagccagacaaatatattccatgttcttgaagatcagaatcgtggtctctgtgtgtggggggtgtgggagagggttgagaggcgtattgactgaaaaggagtactggggttttctgggatgtaataatgttcagtgttttgaccttggtggtggtttcacaggtatctttaccttctcaatatccagcatatgatttatgttttccttatacatattacactacaatacaaagttttaaaaatcagcatttcaatttgttgatttttggattattaaacctatttacgtcaaatgagagtgagccagttgcttcatacacatatacaaaaagtatttagaaaactaatttcataaattgctagaaaagcagacccccaaattcatcaagcactgcattcttggcaaagtttgtacacattgtctgggtgctgattgtgaaaacattgcctaaaccaaagttttgtatgtgatttcttttaaagtttctcttatttcctgttctgaggtttatacacaatagacccgaatagagtttgaataattgaagggtttatgaaatccagaggatatcaccagctgctgatttgcacataccaagaacatgaacattttccaacggagaatttccctagcttaataagaaaaagtccaagagccggtcacagcattaacatttagtgggagtgcagtgagaattgggtttaacttctggcatttctgggcttgtggcttgtggttgattttttatttactttgcaaaagtttctgataggcggagcatctagtttcaacttccttttgcagcaagttctttcctgcactaatcacaattcttggaagaggagaactggacgttgtgaacagasttagctggtaaatgtcctcttaaaagatccaaaaaatgagacttctagcaaagattatttgccttatgttatgggctatttgtgtagcagaaggtaagattaaaagagactcttttctgaaaactrtattatgaaacatttgctaatgatgcttttcacaggagtaataaaaatttgatttagaaaatgtgcttaagtattctgtaacttgacaattgagtggcttttgacattgttgagtttaaaaaatgtaagaaccttatttgaatggtatatctaaatattcatcataattawatttaatataaaatagaataaaatgttttaataawcatttctgaaaaactatgatctggaataatcatttcccttgtaattatcataaaatgtaatttacttttttgcttaggagtataaccaaaatgtattatgtgaaagcattaagaaggatgtgaatatacatagtcaataaaagccatcaaatcataatgattagatttatttcaaatatgattttaactcttcctaaataaaaattcatttatcatttacaactgatattgtcatgaccttagaattcttgtagacaagtattacttgtattatcagaataaaaatattatataaatttgaaacccaattgaatatacaatatttgtaacagttaagttgttcaatagagatttttttcctgtagttgtatataacatatattcttgaagagcagtcttttggagtagtgaatatgaatgtaggagtttttttctgacctcagtaagacaatttctggattcataataaaatttaattatatcactgcttcttgatagattaaaaagcttattcttggaggaggtttgctttcctagtttttgataggtaaccagttatgtgatagatatttggtaaacatttttaaactgaatgaattacatattattcataatttctaaaatcttttcacttagtaaagaaattttgattgagtgaccattacatagcctctaggaactgaagaatattagcaaataatacaaatctctgtttcagtcttccaatctagaaaataaaagcagatatattcttatagttatacactttggtaatttaaaaaatattcaaatatgtttaataccttttgaaaggttgaaytattttcagttatattttctaatgttattgcttgttctttggcttgtaaactttatatgtagccactttttaaatgaagaaaacaattatttccttgtacatataaatattataattagtattttaaaatgaaacctttttgtatttacaaacagttccagaacaatgtcaatattacctattgtaaaagacatctttttctgtttctttgtgtaaatatttctgtcttttcttactaaatttatgggaatgtttctaaygtttcatacctacatactgtttgctccagttttacatagataccatttgtcatataagggagatttgttttatttctaatctttaaaatcaagaatcaatggcaagtttaataaacagtttaagttattaaaaagttgaatttgaaatattattaaaatagagtacatcaaagtatatgtgataattaaacaatagtgatttaaacatcttatttacataattgattattgctgacttgtttcacttttattttatttttcatcaatgtgtgtttamatgtggtatcagtttctactggtgaattgaacatcggcactatatatgttatggtgaaaatgatataaatctgattatttcctaaaagataaagcacaactttgtatttaaagcaatgcttaggccagcctcataattttcataaaagcacatgtaatgcaaaagccaatggagaaaaactacatgaattttcagtggatatcagactcctaatttattccttgtttcccaaatactctctgaaactaaactagttcgagatgtccatcagttctattaatctaccatatctaaaaaatttttacttaacagagtagctttgatcatgaaaaatactcacatatatttcaatatttgcttctgtttatattttccacattgaatactgaataccaaattgagaagatagtttgaatactatcacaatctgctttattcaacagcataacattttagcattacttctgctctgttaagagtgaactttcttcaaaaaaaacactattcattactaagaaagaattatagccagcaggaataatttgtaatttcagctttctatttgttttctttttttaatatattgggtactacatagaacctttctaatgcaatatattgtctacaataacatttccaattgtgtaggaacgttaattgcctccttgttttaacagtctggctcagggggtcactgcaggctactaagaattgggtcagatttacaggacaaagtttaaaataacagtttctcaatcgtaccacctaatttcacctttttgaaatatagtatgaccaaggttttgaatatattatgaccaagcagattttttagatttagggtctaacaattgtgtactatatgaaattaggccacagcccagaaattccaagatgattaaagtgaataaattaaaactctactgaaacatgttcaagtaaatactggctgtgttgtttgggagacatgttttttaatcctggagatttagagtgcagaaacgttatttcaggtcccagaagactttatagatcagagattgatggattccattacartcagagaaaggagaatagtggtctaaaatcctaaattgtatgtttgaatttcagtgtgataaataagaattcccctttgctcccccaaacccccatattttcagagatagtagtatgtgtakttatctatatggtgtgatttaaattgtgcgatggcccaattggcttcaatatctcatctcctcctaaaatactttacgtgttgatattaatattactataatttcaaccaatctgtcatttacatggaatgacaaatacactgaatacatattttaggatagttaaatttagtattattcataatttactttgaattattatcatctgacaacttccctgaaacaatttcagtgggcgggggagggtagaaatggatgttgatgaggataagaatagaacaaagtgattctggaagatggggttttcccaggtaggacagatctgctggttgaagtgctatagtgagtgctataagagaaggggtagagaaaatgcccacagaaatggcacgagcctgagacgtctgccaaggcaagctttgcttattttaaatttaggcatatcctgggaatgcatatgctactcttttgcctacatataatttaaactaaaaatgaaatatctaagtattgctaactaaaattattcttaggtagaagtaagttcccaaatataagttcaaaagcagattggtaaatgttcttcatgtgtggcctttggtttctaagatctgagccagtctacattgacccacttttatttgcttaatcctcgattgtttattctgcagtcttttgccacttttcattcttcccagttatgccttctcctcctccccacacacaccatcccccacctgcctaggcctttgagattctgccacccaatctatcccgtgctcagttaactaacgtgtactttacccatttcttcacaaaaccatagtacatggaaaggggatgatgtaattgacaaaaaagtattgcattttagcttaaaattataaggagtcataaaaagatagctcagaggaaataaagtaactgaacatcaaaaaatgaaacaataaaaaggaaagaaaaaacatttgacagaacacttttatttcttctgacattttaacttagccaagtttttcataaaccttgttaactggaaatgtaatagatagaaaagtgattattcttccaggccgggcatggtggctcacacctgtaatcccaacactttgggaggcccaggtgggtggatcaccatgtcaggagttcgagaccagcctgaccaaaatggtgaaaccccatstctactaaaaatacaaaaattagccaggcgtggtggcgcgtgcctgtaatctcagctactcaggaggctgaggcaggagaattgcttgaatcagggaggcggaggttgcagtgagctgagatcatgccattgcccttcagcttgggcgacagagggagattccatctcaaaaagaaaaaaaaaaaaaagaaagaaagaaagaaagaaaaggaaaaagcaatattctttcagaaactcctgaactgtaacataaatttaagcttaggacacataggtcagatgtacaatggaattacaaatgttagagtttcctgggttcttgcaacagagttttaagtgcactaaacagttatcaccttgtcttctcttatattttctagtcactactgtctactacgctttttccacaggctgtccataatctacagatataatggaaaggcttccagatagtttcattgttactcatctgttctttcrctcattcatttttccatcactttaacttccacaagtactacttagtaatacttggtacaatgtgtgttgcgtttttttttttttttctctattttcagggtcctaattgtactgtctctttgtggctgagttcgttttttgtgactggaacaataactggcattagaaattagctattcaaatacacatttcaagaaagttgtggaatttcaacccatgttctgatagtatcttgttttatctctaattatgacatacttgttattctatccaacttcatgtgactatcgtctattctcctatctgctttttatggttctggaattttcttcttgctcttttcactgttaagttgtttgtttgtttgtttgtttgttttgagacaggatctcgctttgttgcctgaggctggagtgcccacgctggagtgcagtggtgcgatcatagttcactgcagcttccaacacctgggctcaagcaatcctcctgcctcagcctcccacacctagctaaatttttttcttttcttttttctttttctttctcaaatgcctattaagtgtgacataatctctattctgctttgtctctagagtttgtttctttaaacaattctttactctgtttacaaaggtatatatgttacttctgaaatgatctttattctcatgttatttataaaataatttgaatatttcttattttgaaaagctaattagatcatatcgtatatatgcatatagaattgacccttgaccaatatgtgcttgaacttcaggggtctgcttactatgtgaatttgtttcaactaaacctgggtcaaaaatacagtattggtgggttgcaaaacttaagcataggaaaaactgacttttcgtacatgcggtttccagagagccaaatgtagaatttaagtatgtgcagattttggcctgtgtgggagtcctggaatatatatcccctgtgtataccaaagccaaaggattattgaataaatagtattactatagatcagtgagaagataagaaagaaatttaatgcaaaatacctattttttctatttctgttttgttcatttgctttatttttttccaaattgattttgtaactttgctttataatatattctgatacctactaagtttagaagtaggctatttaaaaaataatatctactgttttttatgcacaaaataattttagaaaaatagaataattgaacaaagagaccaactttagtctaccaaaacaatctagcacaaatttgattaaggatttcccaaatatataattttatcatgatttatttcatttgaataaaaacacttttcaactaacagttaaaagatatattgacattgaaaataagtaattagttctatgtttgtatgtcaataataagtaattagcttggtgtttgtatgtcaataatgcccccttaaaatttgaaagtgaaaaaattaggtaaattaagattattaaaatattaagtaatattgatttttagctttgaccaaaattatataactattttcctcaaattatagtaaaaacattcctactctttaccagtagttaaacgtattcacactcttaattcatgggctaaaaaaaaacttgattttgtttagtattattcttacttttttgagacagggaatcactttgtcacccaggctgcagcgtactggtgcaatcatggctcactgcagcctcrayctcctgggctcaagcagtcctcccacctaagcatcccaagtagcagggattacagccaccttgctcaggtaattttttttttttttttttttttgagatggagtcttgctctgtcgcccaggctggagtgcagtgtcgctatctcggctcactgcaagctccgcctcccgggttcacgccattctcctgcctcagcctcccgagtagctgggactacaggcacccaycaccaagcccggctatttttttgtatttgtagtagagacggagtttcaccgtgttagtgttagtcaggatggtctggatctcctgacctcgtgatctggtgatctgccggccttggcctcccaaagtgctgggattacaggcatgagccaccgcgcccggcctgctcaggtaatttttaaaattttttgtagagacagggtttcaccaygttgcccaggctggtcttgaactcctggggtctattgatcctcttgacttggcatgtcaaagtgctgggattataagcatgacccactgcatccagactaaaactaattttaaattgtaaaataaagccaaatgaattaaagcttcaccaatgtagtgttttgtaaacaaaattaactggcaattaaatgacttgtaaacgtaagatgaagtattcattgtttaaactcaaatacttagatatgatggcttagtctactcattaatctagaatgagaaaaatgagatggctatttcttttagttttaagataaatcacatctcaaaaaaatgtttctgtgcctttcaatttgtatgcatcctatttaataagcccgttgtacatacatgctgagagtttgactacttgggccaaaataaccgtttgttgtctacttgaaggtggttcaactgagcttgaacattcgattgttagtcaattcaggcaaataaaagttatgtcacaagatatacctaattattattagaactcagtgcagtgaatcattaccttaaatacttttgctatggcatgagttgataatgatgtaggacagcaagcccccaaattgggtcttagcctgggaaggttcttggttttgtccagtaaagaattcaagggtgagcctgtggtgttaaacagcaatttttgttgaagtggcagtgtatagcagcctcagaggcacctctccttgctaagcagggctacccataggcagtgtgcccacagtagcagctcagaggcagttctgcactcatatttatatgcacttttaattatatggaaattaagaggtagttaatgctgaaattgccaggaggaggatggtaacttccggttgttgggtcattgctgtggaaagggcctgtaacttctgggtgttgccatggtaatggtaaactgtcatagcacactggtctgtgtgtcttacagggaggggcttccactcagacctgttttggataatcctcaatttggtccagtgtccaagtcccatctcctatctcaataatactcaatacaataatggttagaacaaaagcagacaggaaagtgtatctgaagtgagaagacctagacattaatgaaaattcttccacgaactatgaaaaacattgttcttcaattgtggggagcttacattttgatgtggggagatagatagaaaacctaatgaacaaaaatagttatagcattgtgaaaaattttgtgaaggaggtaaagtagggcctaagagaaaatagagatggggatggtagtatgtagagacattaggtgggcttggtcttggggactagaatgagtggatcactttgaggacagaacatttgagtagaggcctgaaagatgagacaaagccagtcatcagaaatctgtcgtaaaattattctaagaggaggaaataacccgtgtaaaggatctaaggaaaaaataagtttgaaatgctcaacaaaatataaacaaataaatcagcgtgactttgcacagtaaatacrtgggagatttaacatgatgagatccgagaaagtggcaagagccagataaggggttcccaaaccaaggraaggagttagcaatgctggataagtaaaaagtgaagtcatagaagaattttaatcacaggaatgacatgaccagatttgcaagaatcacttgtcactctgtgaatagactgaagtaacaggagagtagaggactggaggctagttagcaggcaagtttcatgaccaaagtgacagatgatgatctgaactaagattttgaagatggtagtaggagcaagggaaaatagaacaggggcggtcatatctttttcttacaagcagaatcaaaagatgccatttaacactgatggaaaaagcaccagaattttaagtactatttgaagagaaaaggtaatcaatatgataattctttatatatagtaaacatattcacagagtaaatattgtgagaagttggtaggaagattttgtggaagagatgtatccttgttttctacatctggttgttaaaagcaatgaactatatttggaaatcaagaattaggggcacaaacgtatcacctggaaatataataataaccagaagggaaagcatttacttctcactaggaagtgagcgggctaaactttttttgtgttaatggattactttacttatttattttttccaataacctgaacatcatcaaatggatctaaattttgaaagtgaaaaacaaacatatcagcttgtaattaatcagttttccttttgtgcggaaggggccggggattgtgttgttatgatagagtattagcaccatctagtggagtagaatatgtttacttaaattataaacatcgaaatagtgcaatgtggaatcacatattatatgagttcactaatacaaatttgcaaaaaggtcaagggaaaattagtgcccataaaaactttcacattattttgtaaaatataattttatatggtgttttctttcttatgaaatattgcaaaatgttttcatatggatttgttccaccatgttaatgggcacttctaaaacttttttctttgggctgctacaacaaaatattattaactgcctagcttataaacaacaggaatgtatttcttacacttctgaatgctagaaagtctaacagcaagatagtaccagcagattcagtgtttggtgakgtctgctctctggttcatagacagtgccttttggctgtgtcctccaatgatgaaagggacaaggcagctctgtggtgcctcttctataaaggcacacatcccaaatcatgacagctccaccttcacgacctaatcacttcccagtgtccccacctcctaatactatcacattggtaattaggtttaaacatataaattgggggttgtggggaggttgcatgtattcagagcatagcatatgccttcttaacttactaaagtctaataataatttatcactcaggattcaatgcgggaagcttaagtagaagtagaagattacctatctatcagtcaattaattgattgacataccaatctcctatctacctacttaaaaagaggttttgttttgtttgttttgttttgttttgttttttaaataaattgcctcaaggaattgtgagcatgagataagcaagtctgaaatccacagggcaggtagtcagaaaaggaagattacagacaggatggaactcacaggaaaggaagctgctttccacagaattccctctctttttcagaggagcctcagccctatgtttcagacctttcaaatgatttgatctggcctatctagattacctagaatgatcagcttgtttaaagtcaactgattgggagtgtatctggcaacatattttctcaccaacatttagattagtttgactcaataactgggaatgctgacttaagcaagatgacttattaagaaaactgtcacagctcattaatacctttctgtttttctggacactgtgaagaacttaaaagacattaattttattaatccttctcacagtttacctactattgtcatgtgttttatgtatatgggtgtatacacatacatgtttgtatttaaaaccatgtaaggtaatatttttattattttatagtcagtattcatttatatttacttgaacatttaccattttctttgtttttcatttcttctttcatcctaagaccttatatttaggatcagtttcagttttctgaaatatatcttttttctctccttaatgtgtatttatagtggcaaattctctcaaattttattaatcagcccgggcacggtggctcactcctgcaatcccagcattttgggaggctaaggtgagtggaytgcttgagcccagragtttgagaccagcctgggcaaaacggcaaaacctcgtctctacaaaaaatacaaaaattagctgagagaggtagtttgtgactgtagtcacagctacttggggggctgaggcaggggaccacttgagcccagggggtcagggtcgcagcgagctaaaatcacaccactgcactccagcctgggcaatagagatcttgtcaaaaaataaaataaaataaattttatgaatcaaaactttattctcaaaaaattatttctgtatatagaattctatatagatagttatttcttcctgaaaatggaagtgattaatacctggtggcgtctgctattgctattgagaagtctttgtaaatctaaccattactgcttttaaattaatatttttctctaacaaggttaagatattttctctttggttttctgcatattccttatgatgcatataggtgtgtttttttactgcttggaattttttaattcttggatatattaattggtatgttccattcattttttaaaattctcttccaacattgctctggcttttctatcctcattgactcttagctcatcttgtgtattttccacacatgtgtgtctccatgttgcatcctgtattatttcttttgacctgccctcctgtccacgaattctttttacaactgtgttatctgctattaagctgtccattgatgattaaaatgggttttttcatttttagaaattatatttggttctttttaaaatctgctactactttgttataatttctttcctcagatatcattagtcaaacttttctcttacatttaaacaacagaattagtattgttgattatagtctgtatatatttattccaatatcaaatatctattttgttccttatgaagtttatggtaactaggtgctttttctcccgtataatgtctttgacatttgtaataataatttggtgcttaagaaaaaaatcttcctcatattaaagttacaacttatcttttctgggtggctagaagaactttcagtgtgagactaccttaagccaaatttgtgctttaaaattccttggtgctctaagcaattcaaagctgggttcctgtaagaagagtgtggtttacttccagttctcccttatcctgtgggtgaattcatttaggtttccaactttgaattttgttgctttagcctaataaggctatcaaaaagcaagcttgtgtcttccccaaatggtgaatgcccacagtgcagaaaaaaattggctgcctgttttcctttctgggttctgattataccaagatatgttatggtaattctttactgtctcgtcagctttctaaatgcctctatgaaagtatttatttcaaaacatatgttttccgtttttttccccttttgtgacagggtctcaccctgtctctcggctggagtgcggtgacatgatcatagctcactgcatccttaaactcctgggctcaagagaccctcctgtcccagcctctcacatagctgggacaacaagtgtgtgccaccatgggtaactaatttgtttctttaattttttgtagagatgggatcttgctatattgcccagggtggtctcagactcctgggctcaaggggattctcccacctcagcctcccaaaatgttgggattacaggtgtgagccaccatggctggccacctggttttattgtgaaggtgtcctaagtgataagattaatctgaaataatgaatcccaaggcactcaaattttttgtgaaatagccagacaataaatattttagacttcgtgwgccataatgtctcgctactcagctcttctattgtaacataaaaggagtcatagacaatatataactatatgagcatagctgtgttctactaaaattttatttacaaaacaagcagcgattggatttggcccacaggttagttttctggcccctgacctaatgtatctcactataacagaaaatatatactgactttccttcttactattataaattttatgcacataattaaatattacccaaaccacaatttttaattcagatgggtgtagcataatttgacaattttcataaatattctaattatatccattattaaaaatgctggaataaacactctgtacctaaatatttcacaaaatctttaattattatttgttacttttaaaaaattgaaattatttgtcaacttacgtatgagtacttttaagattctttattgctaagttgctttttagtgaagtaatagtcatttatatttcagttttatttaataataatatttatattacctaattttccagcaaaattgattatcatctcctttacatttttgtgttaaaattggtcaaaaaataattttcttttaatttttatctcttttaattattggtaatggtcacgttaatgcctgttcttaagtaaatgatctatcctactctaacatttttctttagatagtgtttagtgcttttgttactgcaagaagtgtttgtgttaagaataatttttcagttaaattttctccacattttgtatatatgattttttcacaaatataatttttaattaacaaagttttaatgtgtatatgttctgtttgcaaattgctttatgcattaagccttccttttttgatatttattcatactttttaataaatatatttataaaataaatatarttatagatagatggcactaagataatagtaagttaaaatgacatatcatcatatatagcagataattaaaaaattataaaagaatgaaacatrtatgtatttattttaaatttgtttaaacctaactctttagtctacctggcatttgtgtgcatgtgtctgtgcaaataaagtaaggattcaaatttatcccatttcatttccagtgggttttattttttatttattattattatatttttttgagacagagctttgctcttgttgcccaggctggagtgcaatggcgtgatcttgggttactgcaatctccgcctctcaggttcaagagattctcctgcctcacgcccccacgtagctgggattacaggcatgtgccacaacagttggctaattttgtatttttagtagagacggggtttcgacatgtttgtcgggctagtctcgaactcctgacctcaggtgatccacycatctcagcctcccaaagtgctgggaatataggcgtgagccaccgcacccggccccagtggattttaattgcaagcctgccagagtgagtttcaatttgaggtagtccaagtttacacagtacratagacttacccattgccaaggttacttggcttgaaggaaaatacagaataaggataaaggcagtatgcacaagaacagcttgatggagatttcaggcactgaaactcagcttctaatatcttaacccccaccaggataattttgctgatgaaggatgaaagttgatgccagtataggtcacatccatgcccggtaacaacagaattgggtatccttagtttaaatactttagttgtcaccttgaacttggagggtgatttatgtgatcatcactattatttgctgttttctattttctttagatttcatttaatgttttactagtttcttgaattagaaatttggataattgatttccaacagttttttatttctaattcattcgagttatatttttttctctctaatcagtgcttcagcatcagcccacaaattttaacatatatttccattattgtttatttcaaatcatattctcatttatattatatttttctttaactcatgagttatttataagtgttgcttgccaagtgcggtggctcacgcctgtaatctcagcactttgggaggccgaggtgggcggatcacttttgggaggccgaggtcaggagattgagaccatcctggctaacacggtgaaacaccrtttctactaaaaatacaaraaaaaaaaacccaaaaaatagccgggcatggtggcgggcacctgtagttccagctactcagatggctgaggcaggagaatggcgtgaacccaggagtggaggttgtggtgagctgagattgggcactccagcatgggggacagagcgagactccgtctcaaaaaaaaaaaaaaaaaaaaagggttgcttaacttcaaaaattttgtgaattttccacttattttctgttagcaatgtctagtggtcagggagtatacttagagtggctttaattttttgagattggtagagatttgcttggaatgaatatgcatcttgcaattgttgaagacagtgttttattaatataaaaaacttaatttggttaataatgttgcttatatcttgtatatccttatttttctatttcttttctattggatattggaaacagtgtgcttaaatctcaaactatgatggtggattgcttacttcttttatttctgttatattttgaagatgtattaatagttttatgcaaagaggcatgctggtaaatgtaaaacaaccaactattttttaaaaggaaagggaacaaccatgatttgtaaaatttgctgagtttcatggtgtaaattctcacaatatggtcaatttcaagttaccaacgtgtcatcaggagacattgtattagcaaaagatgtgtataattggctcctatgagtcagtatgagccagctccagcaaacattgttcagacacatttgcaattattacatctttctgttaaagtagcctttttattaatatgaaatgactctctttttatctaataatactttctaactaaaattatcatttgcttgatattaatacattaatatcattcttactttggttgatacttttctagcatattggtttttatcatttactctcaatttatatgtacaattttattaaaagtaatcatcatatatttgagttttcttttatgcttttatccagtcagacaatctttgtatgtttagtatggtgatgaatccatttatatttaatgtaattactgatacagttcagtttaagtctagcatattgctacttacttttgcctcaatttttctctcttcttttcctgccttctcttattttaatcaaatagtcttgactatctcattacatcatgtattctagttattttatgtatctcaatattattggtttagtggctaacttagcaattacaacaaaacatgcttaaattattacaatttattctaaattaatatttttaccacatcaagactatggggaaaacatcacaacacttttattttctttaccttttcctgacacttttgctactattgtttcatattatactcttgaatttattaaaaacactattaaacatggtctattgatttaaacagtcaaggctcttttttatttgagtaaaatatacatagcatagggtttatcatgtttcaatagcttttttatttactcttctatttattttcttcagttctgcttattcctttttgtacttctttgcttatattttagatcagtttccttcagcccagagaacttttttagtatttttctatagttgagtctgctcttgttgaattctttctgcttttgtttgcttaagaatgtgtttctatttgctttcatttttgaagtatattttcaccatttatagagttctctgctgacttttaattttcagcactttagtaatgctaagacatatatattcagacttcagtatttacttccacagacttggctgttatttttactattctcctggaaaaaaaatgtttcctctgtctgtgatatggtttggctctgtgtccccacccaaatctcatcttaaattataatctccataatcatcacatgtcaagggaggaactcagtgggaggtgactggatcatgggggttgtttgtcccatgctgttctcatgatagtgagtgagttcttatgagatttaatggtttaagcatctggcatttccccaacttgcacttctctctcctgctaccatatgaagaagatcctctcttcytcttcaccttccactatgattgtaagtttcctgaagcctccccaaccatgtgaaagtatgaatcagtttaaacttctttttttatgaactacccagtctcaggtaattctttatagcagtgcaaaatggactaatacagtaaattggtaccaaggtagtagggcactattataaagatacctcaaaatgtggaagtgactttggaactgggtaatgggcagaggttggaacagtttggaggtctcaaaagaagacaggaagatgtgggaaagcttggaacttcctagagacttgttgaatgctttagaccaaaatgctgatagtgatctggaatatgaagtccaggctgaggtggtctcagatggggacaaggaacttattgggagctggatcaaagatcactctaactgtgttttagcaaagagattggcaacattttgccccttccctagagatctgtggaactttgaactttgagaaagttggtctgaaattggaacttatgtttaaaagggaagcagagcataaaagtttggaaaatttgcagcctgatgatgcaatagaaataaaacccgaattttcttgggaaaaatgcaagcccactggagaaatctgtgtaaggaatgaggagccaaatgttaatcaccatgacaagggaaaaatgtctccagggaatgttagtgatctttaaggcagcctctcccatcacaggcctggttgcctcggaaggaaaaatggttttgcaggcctgggccccactgctgtatgcagtctcaggagttggtggcttgcatcctagctgcaccagctgcagccatgtctaaaaggggccaacawacagcttgggccattgcttcagataatgaaagccctaagccttggcagcttccacatggtgttggtcctgtgggtacacagaatacaaaacctccacctagattcagaaaatgtatataagtgcttagatgtccaggcagaggtgtgctgcaagggaggaaccctcatggagaacctctactagggcaatgagcaagggaaatgtaggattggagcccccacacagaggtcccagtggggcactacctaatggagctgtgagaagagggccacagatcctccagatcccagaatggtagattcactgacaggttgcaccttgtgcctggaaaagccacagagactcaatgccagcagtgaaagtagccagggcagggggccataccttgcaaaaccattggggcaggtctgcccaaggctgtgggagctcacctcttgcatcagtgtgacctgaatgtgagacatggaatcaaaggggactgttttggaactttgagttttaatgacttccctattggatttctgactttcatggagcctttggtccctttgttttagccaattcatcccatttgggatgggagcatttacccaatgcctgtattcccattgtatcttgaaaatgactaattttcttttgattttacaagctcatatgtggaagggacttgccttgtctcagatgagactttggacatggactttagggttaatgctgtagtgagttaagacttggggggacwgttgggaaggcatgattatgttttgaaatgtgaggacatgagatttgggaaaggcaaggggcagaataatatggttaggctctgtgtccctacccaaatctcatcttaaattgtaatcaccataatccctgtgtgttgagggaaggacccagtgggacgtgcttggatcatggggcagtttctcctatgctattctcgtgatagtgaatgagttctcatgaggtttgatggttttataagcatctggcatttcccctgtttgcacttctctcttgccatcatgtgaagaggtctttccttccccttccaccatgactgtaactttcctgaggcctccccaaccatgtggaattgtgagtcaattatatctcttttctttataaattacccagtcttgagtatttcttcatagctgtgcaaaaatggactaatacaatctgcttttaagattttgcctttatctttggttttcagcagagtatcagtataggttttcttggtatacagcattttgggggtttttagaaattttgattttgtgagctgatttctttcatcaattttggaaacctttgagctattgtttcttcaaatattgcctatgttcattttcttctctattgttagaattccaattaaacatgttttataacttgactctacaccacacatttttttatactctgttttgtttgttgttgtttatacacttttgtctttctatatttccttttggttatttttacattaaacttcctctaagtttaataagtttgtattgtgctgtgtccatttgattcttaaaaccatctgacaagttgttatttctgatttttgatccaattttaagatagcacatgatttatgagtcaattttattttgaatatcttttttaaattttcrtttctatattttctatagttcctttaatgttcctaaaatagctgttataaagacctaacactaattctaacatctgaatctgagtgtctagttctactgaatatttattttctctttttgttcacagttgtttttgcttttttgtgtatcttttaatttttattcaaaatcgtatttttaaacaaaaacatgtaatgacaaaagtttatataacttactctcatcaacaagattgtttgctctttcttgagccactcaaaaatttaactcagagggacctgggtaacacttttagtttgagtcagtcccatttctggtttctagtctcaaagattaaaccctcttgggtttttaaagtcaagaatctggttggtttcttctatctcaaaagactaatacacacacacacacacacacayacacacacacacacacagagtatatacatatacacatatatatacataaatataaatatgtgtatatatatatactatatatgtgtgtacatatattagacttttgagatagaagaagccaacacatatatattatgtatgtgagcatatgwtatatatataataaaagccatttatatatatgtttgcttttctgctgttttgactctgttcttatatatatataatcttaaatgctcatatataaatgaaacagcagaaaagtgaacatatatataagagcttttattatatataaataatatatatatgtatacagctttwctgctgttttgacatctgctcttaaatatcatccagagtgactttcaaatatggcatgttttgatgagaatactagttgtgtatttgagtcagatccattttcttattgagactttttttctatgagacaacgggaaagtcagtcttcccgtatgaagctacctagactctagcaaagcaacctgatttggcaaagtttcagaattcttcatgctagatatagcctccttatgtttggttctttcttacctcattaccattcttccattcagactaaatagaggcctgatcttcaatccatatccagagctgacaaacataaccaggtaaaaaatggccagagaccctatatttacttgaaacaggtccttcctacttgtgttttgttcatttaatcctctttgctcccacaacttacctttgaacatacacatgcacacacaatttgttgttgttccaatttggagtagaaacattgttcttttccatcctattctatcttatttggagtgcctgtataattctgtattaacttatcatgctaatttttgtaaatataatttttctacctgtaatgcatattatacatctctttgattacttaataactggcttccctaatagaatggaaatgctttgagaacagatagtttgtttcttcattgttttttctttataacttagaatagtgctcaataaatatttcccaaattaatggaagaatagtagaatgctctccagcaattaagagtaatataacaaaatatatctattgctttgcaaagttttttaggtgtttttccacagtgaacattcttataaaattatgtagatacaaattttataaggtgaaatgtatagttacactacatgcatgaaatgtatgtttactccatagatatggggttaggagagagagagagagagagagaaatttagatagacctgtgactgtctaggcatttttaaaagcaacaattacctaaatatactgtacatttaaatagayactttatgcacttattttgtttttattgtttgtagattgcaatgaacttcctccaagaagaaatacagaaattctgacaggttcctggtctgaccaaacatatccagaaggcacccaggctatctataaatgccgccctggatatagatctcttggaaatrtaataatggtatgcaggaagggagaatgggttgctcttaatccattaaggaaatgtcagagtaagtacttaatacatttgtgaaatttatgaaaactaggtgtaaaaatacttaagatttaatattgtagcaattatgcctgaattatatcactattgccagtcaaatacaaaataatacataatcttttttttttgttttgagatggagtctggctctgtcacctaggctgcagtgcagtggcgcaattttgagatggagtctccctctatcgcctggctggagtgcagtggcgctatytcggctcactgcaacctctgcctccctggttcaagcaattctcctgcctcaacttcccgagtagctgggactataggcacgtgccaccacrcccggctaatttttgtatttttagtagagatggggtttcaccaatgctgggcaggctggtctcgaactcctggcctcgtgatccacccacctcagcctcccaaagtgctgggattacaggygtgagccaccgtgcccagccaatacatcatcattttcaaaaaggggtggtcatcctccaaaattaaaaaagcaagcatatagtttaagttcaattatgaaataatggctttgctatgtttaattttccttacattcaatctgtcttcttatataatatcaaatatacttgttcccccactcctacataaaatatattccttgctattacatactaattcataactttttttttcgttttagaaaggccctgtggacatcctggagatactccttttggtacttttacccttacaggaggaaatgtgtttgaatatggtgtaaaagctgtgtatacatgtaatgaggggtatgtagtccatacgaaaagaggtttataattaagatagtaaataggaactctactactttatatatttttaaggttattatatttttctatgagcatttaaaaaagtaatacacaagtacctgaaagtttaactatgatggaaataattaaatctggataccatattatctccttaacattgaaaaatttaaatgaagtataacttctctgatagagtataattatgggagagtgggaaaacagtatgcacatatataagtattcacccaacaagtcttcacgacattytattttgtgcagagtatcatgggagttcaatgtgtcaggaacaataggaattgtaaccaatttatattgtatggtaactgttttgacaggttttataaaatttaaggaaagcaagactttcacctgcttataagttttacttacaactaaggttacttaatgtcccaggtctgcaaattattcttaccacatggattaaaaatactactctttcagaatcattgactctgttccttctaaccaactactgggttttcattgccaaaatcatcactgtatatcctcagtgttattttatcccccttattctctgctagatgaaaaattattttggagaaaaatttatgtatgggaaaaccaggattagatcactataatcgtatacttcataaatataaatgtaaccaaatattacaaatggaataacattattatttccccattttttccttaatttgaagcaataaaatataatagtttaaagcttagtcactggagtaagcctgcctttcaaaactctaccacttaacatttatgggtatttaaaaatatatctcttcactaccatttcctctcctacaaaacagacacattttatgtgcatcatggattggcaggaaaaataaataagacacacatctgcagcccttagaagagaccttgagatatagtagataccaaataagtataatttcttatgaatttattctctccttagtcactacctgagggaggtttttcaaatacatttttagcccttcaatcattactgctgatcttatcacacataaccaaataggttataatatcctggggctgaattttttaatttgctaccttcctcacctctgaaatatttcttttatcacaggcttgtgtcctctctttaagttcagcacttgacttggctaaggagataaaaatgtatagatctgaagcctctagcaatgattgcacattttgcacatgtcccagggaactcatattcaagtagagcattttttagattcaaagggcaggcttgatgggttactaaaattacttaagttcaacattagatggcttggatgagcagatttgactcactgggtattctcaggaaaaaatctctacgatagagatggagagatggaggcaagtgctgaaagtaaatcacacactaacaacttttggctggcactatctttattatgtagaaaccctaaggtgttcagaaaatatcagaatcatggaggacagaaatacggtctaagactggaggagagggaaacataaggttagtcgttggttactatggtatttttagcttttgttttggtgatagttcatggagcttactatattattgaatttagctaattagataattcaatgaaaaataagaatactttgtatgaaacaataatgattttgtcgtgaaccaaggattatgattattttcagtccatgcaccaagaaggagagaaagataaagggagagagaggttaagagatttttcatctatgaaaattagaggaagaagattaatgttctagagaacgttaagaaatctaagacagagtgaaggaggaggagaaggaggaaggaaaaacaaacaagaaacaagaaacaagaaaatgcatatgctgttcattttccttaatatggagtttctggacactcagaatggcatcgagtttaaaactgcatgtaaacacacattatgtcaacgttctgttattttttggttttcaggtatcaattgctaggtgagattaattaccgtgaatgtgacacagatggatggaccaatgatattcctatatgtgaaggtagacataaaatgtatttacaagtatattgaaataaatatctaagatttaaaaaaagtcttacattaaaatatcttaaagtctctattaaatatttttatttaatgtttttttttctcatacaatgtagagtgggaatctagtctttttattactacattmttggtgtttcaaaagccaaaaacgaatgcagcctgatctgatataataattgaagtattagacattaaggaatctaaaactgatttttatttccttttggattctaatgactagaaacgcatataagcatcattagctaaataaagaccagaattttgcctttattaatgaagaagaactcacccagtaaccacccaaatgcagggatctatggtaacagctgaagtggagaacgtgattgagacctcccactaagggaggttgcctgtggacttacctttactgaaaagaggaataaactaagggcgagctctgttatttctcactggtctgtaaagcaaacagtgaaaatgagaaaatgtagattctgttttcatgttttgagctaataatccaaatctctagtcattatggaaataaaagaaatcaaccagagtagtatttcctaattccacagtgagtggcaagtggagagagatacagaagaaacgtgataatcattcaaaaactgtcaactacagaaaataatggaagattttttcatctatgaaaattggaggaagaagattaatggtctagggaacatctacattgaaatcacctgggatgcttgttaaaaactaaaatctttggttactaaaaaatgacctactgaatcagtatctttggggtgagcatgcaggaagatagccctaaaatttttattttaacaagcatcctgagtcattctatagtacaataaagtttgaccacaactttagagaaattggaaaatattaagtagaatcaaaagaactactcaaattattttaaacactkaggtcgaagaggatggaaaattaacgatgatttctctattgaagttaatgtcataaagtttgcttttacatcttttaggaacacrgtgttatattattctagggcataaatgaaaatgtatttaattatctcaagctttatatttcttaattatttaaaaatactagtttgttactacaaaaatacaagctagcattgaaagtagtaattytcattgtccactcccatagaaaagaatcaggaataaacattccatttgcttgtttcttagaggaaagtatctctagcaaacaggtatatcaaatgcttctaaaaataatttaagtaatttcctccaatcttatcctgaggatgattttatacatacacatatttttcacaataawcttttaaaattccattagaaaacattacatgtattttcttcagttgtgaagtgtttaccagtgacagcaccagagaatggaaaaattgtcagtagtgcaatggaaccagatcgggaataccattttggacaagcagtacggtttgtatgtaactcaggctacaagattgaaggagatgaakaaatgcattgttcagacgatggtttttggagtaaagagaaaccaaagtgtgtgggtaagatacacttactgttttagtatttttagctttttaaatgtaaatatacatttaaaacatcgttcattctaaggaatatcagcaatattaacaatagctaatgtttattgagcacttactatctgcctgtaattgagctaagttctttgcatgcatcatttcattttaactttcaaaaaactccatgatttacttactcatcactttcattttataatggaagagactggtgcaaagaagttaaatcacatgccctggattatcatggcataaagagtcaagttaggatttaaatgtaggttatctgacaccagagtccatgctttaaccataactccattgtagttgtctcttaggttgaaagagaatgctaagtatttctgctgcaagctgtaagacctctggaatagacatttgtttttattttgaaagccaaagattcattatgtatttccagagatacattagaatgacattcgtttttgaataacacttttaggaagcagacctattttatatttgtactgcaagtttactataaatgttgctgaattgaacagaatccactaaataaattgttgcctcttaaaaaaagttttatagtaaactgtaagccaggatttttttagtcataatactgccaacctgtgcatcatgaccaatcaaagattttggcttctgtgataaacatcgtggttgatttgtttagtagtaccatagttcaagttcattttaccaataattgtttggcagaagtttctggcatatttatattttaatattatctaaaatatctaaattatttttactattaaagtctgttatatcttagatacagataaaagaatttctcttcttaagaacactttgtaacaacaatagttctttatgttaaatctaatatttttattcagcatagcaaatattatgtactttagaagtacatggatggaatttacatccttacaactagattcctgtggttagtgaaaacttcctggaatggctgatgcctacgattaagtcttaaagaaaaaaaacgagattttgtagatgaaaatgagagcaaaagcataccagagttcagggaaagggaagtggaagggcagtgaggctttaaggagcatgaagcaccactgattcttgtccattgttcctaggcaccttagtctaggatgcaagtagggaacgagtcagtgataaatagaaggtgggccaatacatagtgctgaggtgctgcatgcaccatgctgaagaacgcgtcttttattcagattgatttgggaatcaatgaaggatttcaagtggagttacgatgtgtctacctgagaggtcattaagctatacacaaggaaaatggattagaaagtgggagaacagagtttgggaaactacttatgattggcacaatcccaggtaaaaatgtttgagagaagtgggtataaaaggtataaaagatgatggccattttttttttttctgaggaaatcttggctaaatagtgatgacacaaaaacaggtcagttacttttcagagatgtaatgacaatgagttaaatcaatgtctttgacaaaaagtcctgttgataattcctgtcttatcaataactagaagatgtgttattttttgcaggtcattcagtgaaaacatcacaataaaactatatttatgatcaattttatttatacagttgatgaatgttactggtcactatttatttcaagaaggctaatttatcctgaaactaaataaaatcagaagcataattttaatcagaattttaactttcttcagataaatcatttattaagyggtcaagtcaaaacagaacttttgtttggttgactgatttacctgatggaaacaacatttctgttttcatataattatgtcctggtcacagtcctttaatttgcaataaacattttggaatttaatcccttttatttagaaatttcatgcaaatccccagatgttataaatggatctcctatatctcagaagattatttataaggagaatgaacgatttcaatataaatgtaacatgggttatgaatacagtgaaagaggagatgctgtatgcactgaatctggatggcgtccgttgccttcatgtgaaggtaatgttacctttattttctggatctttataaatttatcacatattttaattaattcttttaataaatccacttattttaatcaaaagtagagtgctaatttatgtaaataaactattataaaaaacatatagcattttctgtgttcaakgttcattttgagtacacttcgtacgatacacacactctgaaaacagacataaacagggccagaaaagttcagtagcttattaagtcattggtctatcatcaaaaaccatgtctggatcagagtgaggactataatagacttcctaattctcagtaacatacaattctcaaacaagtagattgctccactaatgcccagaatttatttaaattatatgaatattttaaaatactttaaaagtaacttgtattaataccaggtgaggaaactctcaactgacaatggaattaagttgaaggaagtgaatatttttgttaacaacaggcccagtatgactcaacggtgatgatggtcctggaaaattaccaaaaaaaaaaaaaaaaacctctcaactttcattatggagggatgttacacagagccaaagagttcatctcaactgtgctctttgcccaccaaaaaatatatctggaatagagtgttctacttaacctacttcattttaaacgggaaagtttcaaactatcatggccaagaagagagaatatggacagttgtggacttttaagaaattatgccataagacgtacagtaagaagctacagctatagtgtggtgataacagttttgagatattttcaaacatttataaaataagtgggtttgcttttgatgaggtctgctgcaattagtgaaacaaggaacagtgttaccacatatggtccagaaatctaaaagggtgatactgccatactgtgagagaaagaagagttgaactcttaagagccctctgaactttaaatcccatgattcataaatacatgtttaaactgtgctttagtaatcctcttttacaaaagaatagttaattttgggttaattttatacactaaaaaaattttggtttgagcccacaagtgtctccttggaaaacatatttttcttcacaattgcgtgatctctacttttaggcactgttaagagaatattttagaaagaaattaatgaacatgagacagtaataacccacatcagatccatgtttggctaatggtgtgtggggtccaactatttgtcttcatggcattcgtagttcctaagcaaaggaagtgcatgcacaagtcctttggcattaacttctacctgaagtatattatttccagagcccctctcaaatctatagtgaatttatccatgcagtaatcaaaatgtaacttataaaccacttattttacatcaggaccttgctgtgtattgaagataaacattgcaataaaccatcattccagctttcaatgaattcaaaataagactctgggaatttagttttatttgaatatgtgactctgtagcattactacctcattgtagtcatctgattttttcgtctctttwacttcttcactttgatacctacttaaaactcttccttagcacatatttgttttcacaatgagagatccatctgtttttcccaaatgtattactgcatttctattcttgcttctcttgaacactaattgattmacacacacacacacacacacacacacccctcaaagactctacatttataaaacatttttcttttataatttttttccatttctcagtcacaagtacaagtaaaacctgaatattcaatactatgcttgcaggtcctgctttctttaggaaaagagataccaagagaaggcactgggattgggtactccttttcagaagacagttcactaataatcgatataaataaaggaggatttatcccaaattagttaagcatacactctctcaccacgttttattttattgaaatatactttacgctgattagatatagagaagtctttcttaataaaagaattccactctttgtatgccaactaatatagcataaatatgactattttcttggtacaaagcaaggatctacttgctgatataagatgaattcaaaatctatacacatcattttctctgaaatcaggtaacttcaaactctctttgttgcttctaaatctataagaagtttggaattaaataataagataatattaaagtgaaataatctacttaaattttaaatactttaattttcttcaatctggtctatggcacacacatgtcagaggactgatttaaaggtgaattgtcaaaactttggtctctgtgtccaatagggacaatctgtaacagaaagttatttatagaaacaatcaaaggtacgaagaactgctaaaggaaagctatctttgatccgaatctatctcttccctgtacagattggattttctattggttcaaagcatagagtgctaaccttgaattagtattctaacttcaaatgaccaatggttgtttccaatagtaggaaaatatggatagtctcaagtattgttttggataaaggtacaggttcgggcaatgttttaataacatgatgtatttttaaaaagattatgagtgtaggaaattaaggtttatcacaggatttatgtctactgcttgagcataatcaccagaagtctttctattcttaattaacaaaattgttccatattattttattgatttcttagttaaactcttgttttttgcatctcatagcttttgacttcaaaaattggtattaaattgagctatatcataaggaaaaataattgaagatacataaactgaactttaatgggtatatgaaaatatgatagagaagaatgaagtgacagaaaaaaagaaaaaaggaatacatttaggactyatttgaagttagtgtcaacatcaaacactgaagacatatttttacataaaatagtaaaattttaaaatagtaaagctttaaaacttgtatattaagtcacatacatattgtttctcatataattattgctaatctaaatatattatcctgttagctatagagatatattaaagcttattctgtcagaacgaagtataaacttaggagctgaatggacacagtggaagtatggtattgagaagaggaaatatataatgaataattaaaactttataaaattttatgtttgactaaatatacaacttatgagaaaggaatggtggtagtatagagaagaagtagaaaaatggcaggagatgagatgtgacaagtatgcagggcccaaaaattaaaaaattaagtaaagtacaagaggagaagcaaaaaatataaagtaaaggaaaataataagatataaaagaaaagcatcacttagacaaagacaaggagaagcaggagaacataaatatataaggtaatggagaacaccaaaaagtatgtaatcaacagagtcaaatattacagagttttatctgttcagttcaataaataattaagaagtccataatatgtaccagtgactggaatatgtgaaatgcaaagcatttctgaatttggacattgggctcattggtagcttttatcagagcaatggcaacaaaatagaggtcagaaactaggtagtagtgagttaaagaataaatgtgagacgggaaagtggagacagcaattataaaatggtattttaaggrttttggttttgaaggggaggagaaatgtagtacattagctaaacttgaacaaagggttgagtgaagggactgaaaattggaaaagcttccatatcaatttaagagtgtggttgataaggtaagaaagagggaaggaataaacaatggtttaaaatacaggggaaaatgaaagaattaaagctaacctgaatttgaaagcaacactttaccaytgaagactaaactaaagacttaaatcagtatagatacagataatgttgaggagtgctggaaagaagtataggaaactcactactgctggtctcaattgttttgtgtgaatggagacttattatctgttgatgaagaggcaattgtttcaggtggcttgagaaaagagaggagactatggatcatttaccatgggaaatcaaatagtaaataaattgggggtatataaatggatttcaagcaatgctgaatgtttgccacagctttttagtccaaaataaaatatgactccaatagaagtggtcatatagtttttctacaatacttaaaatgcatagtattttatcttaaaacgaattttgcaaatggatccaatattgagatatagcagagttaatggaaaggagtgagaaggtgccttatagattaagatacactgggccaaaggatggcaaactataggctgcaggtaaaatacaacttgccccctttgtgtaaacaaagttttattgaaacacagccaagttcatttgtttatgtattgtttttcattacttttgtactataatggcagagttgagttgttgcagcagagacattttatctggccctttacggaaaaggttttccaaaccctctgctattttatcctattatagtaagaaaaatgtaatgcagtatctcaatgtttaagatattaagactgaagtttattttcattcatgttcactgtcaatgtagatcagaagggactttactcattgtattaattgtaagaatcaagtgacagaaacatcattttttttcatgtccttctttaatcgcggtatctttgggaaagagaacataaaaattcacacaatggcttttaaaacttctctctaaagtggaagatattacttccacttttattatagtctcctacgcaatcacatggccacagttacttcaaagaggaagggttgcgcagtcctatcaattgtccagaagaaagaaacactgaatatttgtaaacaatccttatgagaaccacagaaaccaaagaatagaaggaaagtgaaagtaagaattgaagttatatgtgatgagaacattgccagttatggaaaatcatgaagtatgggatgactttggagaagaagggattaagagcccaggaggtacaaatatgtcagatgagaatatagtgaagggaaaaataagtgatataccagaaaggatactatgatatgttcattttaatgccattttgtattatgctaaggacaaataaataacacccacttttaaatgtttatataaatgattaattttaacggatacttatttctgcattatccatatatcctttttcttttcagaaaaatcatgtgataatccttatattccaaatggtgactactcacctttaaggattaaacacagaactggagatgaaatcacgtaccagtgtagaaatggtttttatcctgcaacccggggaaatacagcmaaatgcacaagtactggctggatacctgctccgagatgtacctgtaagttccattcatatcttgacccatttcttaattctgaaatttcttttaaacacataaaaaatagggactcaataaaaccaaatatttgtcttattgtatatacaaagtaaggctgttggaagcattctttagttttcgaagttgccgaaactcatattttttgctactcaaaattaaatgtgtatgtgtgtttatgaatgtatgtttccctaattaataaattattccaatatctgaattaaaacactagataaaaataatgtcatctaacacatactatattagttatttattgcattgtaacaaaataccccaaaaacatatttacttaaaacaactaacctttattatcttacagtttctatcggtcagtaatctcaaaatggcttatataagtagttgtgaatcagactgtcttcttgtgttgcaatcaggatcatggcccaggctacagtgatcagaaggcttggcygggaaggaggatctgcttctaacattactgacacacatggctgttgtcaggaggcctcaggtccttaccacataggcctttccatgagttgataaatggcagctttctccagcactgctaatctgagaatagaggaagccacaataccatgtattagtgtgttctcacactactagaaagaactacctgagactggataatttatgaagaaaakaggttaaattgactcacagttccacagcctgtacaggaagcatggctgggaggccttaggaaacttacaatcatggtggaaggtgaaggggaggcaagcacatcttaccatggcagagcaggagagacagagagcaaaggggaaagtgctacacacttttaaacaaccaggtctcatgagaactcactcactatcatgaaaacagcaagggggagatccacctstatgatccaatcacctccctcaacattgggaattacaattcaacatgagatgtgtgtggggacacagagccaaaccatatcaattatctactcacacactgttaacttcagccatatctattctttcgaagtgagacactaagtccagcatatatccaaggggagagaaattaggcaccactatttggagggaggagtgttgaaggactccaagtcttagtcatttcctagtgttggaggtaatttccaaaaatcatcacatgtagcaaaataccactcaagtcaatagagtattttatttctgggatgctcctttacccctttttwatgttttttctatctctacaatcaaatttcttttctttctatctataagtacatagacaagaagtactacacttaaactatatattccatgaaagaaaaatatgayacaaatgattgattaatgacttcaactttmattcctggcataattccaatccctaagagaggaagctattatcagtatgaaacatttcagtgtgcataagaattatgaggaaaatatttaatgattttatggttggcttatgacaatgtagttcagcccaaatgtatctaaaccaactgagacccaactatatttggatttcaattattaatgtttgacaatgaaccatctggagttctcatggacaagatagaggagttgatgagttatatggtttatcagtttttaatttcattaaataaccatatctaattatcagacgcatgactttattctcaggcctgcttcattactcacttgtgtcattgaacagtttaatgatttaggggaagtgcagtacaaattcacaattggaatgatacagaggatgataataaggaatctgcattagggcagttcagcattcaaagagactcttatgtgctaagctgwatctaataagatgaaatttaacaatgttgactctaagatcctggacttgggtcaaataaattacagtatgaatatattagcagcagttataaaaattagtgaatatttttatcaattttaagatctgtttgagccaactttatgatggaaacaccataaatgctgtgaaaccaaaaactacatttgtagaagtgtaacaagtagaatgaagctatttgaagtccttctattctcagcgctgatgagactctctgtgggtactaatatttgcttcaaggaatcaatttgtaaaagggataaaaacagatgtaaatgtgaccaaattagagaatagctaaatagctcgagcctgtggtaatgttatatgtttttaattrtgcctcctttttattccttttggaaagaaatctcggtggacaattttattttatgaccttctgggaaataccataataagatggatactcatacttgctttgaaatcaaccacaagctttgaaatctctactctaccatttaatgtgaaattcaattgaggcctttaaggcacagctcccacaaatccaagactcaagctttcccaatgcagaattattgttaaataatacatgtctcaacaaatcatgatgaaatttgtaaaatccaatggtaaatagaaaatattccaaatctttaaaaagtggtgaggaaaaatgtagaatgttacttaaaagaaataagactaagtaaatgttttaatttcaacactgggagcttcagataaatagggaaaaaaatctatcaattataagatatatggattgtaggccaagaaactatactgaaagaagtatcattcactagtctttattagagaaakacatttaagatatacaattattcagtttataatccacataataaatgtagaaactacatgaaaatttctctaatcaaatacaaaagaaaataaatcacagaatttaagaaagatggagatgtaaaagaatatttatatgtgtgtgtgtgtatgtgtgtattgaaattctttttaacctattgcataaggtttattgaaatagaaacatatttcatggaaaacattaataccattttgttattgaaagtactagataatctacaaataatcccatgaaaagagcaaattttctgaaaaatatataaacctgttaatataataaacaagatagcactcaaatgtatttgtcraaattaatatataataactcagtaaaatgtaattatattgtaccttacttaaatatattttatgacatcaaaattatttttctctccaattaaaattagaaataaacaaaaaagttaatcaaaatcttaactatttggatatgaagaaatatttctagtctgtttctctggttaaatacagactggagaacttggcttaatgaattgtttgaggcatgaattaactatgttatttttctgtgcggtatcatcaaagaaaaatttttgtgtttctctatatttttacgttgtctgcaataaataggaaagagcctaatttatttatttacttatttatatttttcgagatggagtctcactctgtaacccatgctggagtgcaaagacacaatctcaattcactgcaacctcygcctcctgggttcaagcgattctcctgcctctgctttctaagtagctggaattacaggggcgcaccaccaggcccggctaattttttttgtatttttagtagagacggagtatcaccatgttggcccagctggtctcgaactccttacgagtgatctgcctgtctcagccttccaaagtgctgggattacaggcgtgagccactgcgcccagcccatgaattcaatctaaaacaaataaaaaccttaaatccctcaaaatactacttccttacattgaattgttctgagaagaaaatgcagggctcttgtttactgatgagaatagaaaaaaaagaaagaaagaaagaaatacatgagctaagcggtaaaattggcatatttctcaaccgaaaagcttatttaattaaccagggatagggtatgtgtatttaagggaaatatattaaacaggtctgtgcatttttctttctggagagccttcatacaaatttacgcatcatgtgatccacaagacataatttcatcttcattaacaaagaccttcttkttacatatctcagtcatctgagttctatcatttgttttgacctagaaaccctaatggaatgtgtaattatactaagaagagaatataattcagtgataaaaatttatctctaatatgaktgtttattacagtaaaatttctttatactttttttaaaatttttattgcaagtgaaaccttgtgattatccagacattaaacatggaggtctatatcatgagaatatgcgtagaccatactttccagtagctgtaggaaaatattactcctattactgtgatgaacattttgagactccgtcaggaagttactgggatcacattcattgcacacaagatggatggtcgccagcagtaccatgcctcagtaagtaaacctctgaactgctatatatatgtataaaactttcaaagatcgaagaaaggagagcacataagtgattacacctgtcttatgtaacagaaatagggccaagaaaagagttgttcaagcaaagtgaccaaaatagatcttttctattatgaggrtttcttcttgaaaatcacaggagaaataaatatagggactttatgagaatatctatataatttatacatctattaattataaaarctaaagataagtaatattgaatattgatatttctttttgtgcaaacctttgttagtaactttagttcgtcttcagttatacattatttttggatgtttatgcaatcttatttaaatattgtaaaaataattgtaatatactattttgagcaaatttatgtttctcatttactttatttatttatcatygttatggtccttaggaaaatgttattttccttatttggaaaatggatataatcaaaatyatggaagaaagtttgtacagggtaaatctatagacgttgcctgccatcctggctacgctcttccaaaagcgcagaccacagttacatgtatggagaatggctggtctcctactcccagatgcatccgtgtcagtaagtacactactctgaaatcctagcatgttcatgtctttctaagtaacatagatgacattctaagactcatctatattaattgtggcaaaatgtttatgtcaccttgttttaccaatggacctatttagtttttggtttttcaactgtgtataaatgaatatacaaatttcttgataagtacatagtaaaataaattctcctattaatgggcattagtcaagaatacagtaaaagaatttgaacacaatacttgttggttaaatgaagtcgtattgaagcggcatcattgtctgggtaaatatctgaggttcgttatctcacaccaagaagattaaggacgtggacacacacaaggagtgagtttaggagcacaggtttaataggcaaaagaaagagaaaggagaacagcttcctctcttgtgagagagagcggcacctgaaagtgaatccctgcccctggtggagtgcactggattttataaacggtcttgaggaagcagtgtctgatttacatagggcccaaagattggttaaactaggtgtgacatttacataatatgccaggaagctggccgccccaccctaatcttattaatcaaatgggatctttgcctggccagcgccatgttgctttctccttactgtacacgtggctggcaaagagaaaggaagatgcacctgccatatgaacatgcctagtcccaggtagccttttcctattggcacaactgctggcattcaccttgcaagcttccagcttgcttgtctatgtttgcagttcgattttacaggctcctcttgttagaaaagaaaatgatttsggggctgcctttcattaaaaggaaaaaccttatcaaggactgctgtaccctcattatctgcctaaacrattttttctcaactcctatatcaatattaatatgtacattggaatcaatcatttgactcaaaataattatacaattatagtttaaaatagaaagtaaatacgatgatacccaataattcatatattcaagcagtgatatgacatttttacagtaaagctatttgactttctctagtatatgtaagtacaaatgggtattctgrgatcttgtgcatattctactctagaaggtttcctacagtatttattccaacatacatttatatcaacagttacttctttttttacatgttaatgattggtgatgtcacattttaatatttacaaattgaatggctataaaatgttataacattatagtgtaaatttgcatttcttttaccactaactgggtttagaatatatattcacagtttaattggtatttaatgcttctaatctttggaaatgcagtttgattttctttayttayctttttgagagttttggtattattagttggaatcatcttaacaattctgaatataaaatctcttttaattatacgtaatgcaaatgtattctctttgtggctagtatttttctttccttttttctgcattatgaacataagttgctcattctactacataatagtcaatcttttttcatgatgaatgtttcttgtttctatttaaaggaatacttcaaaaacatagagccactatactattctttattctaaaaagttatawgttaccttttcttttcatattttaaaaatattttgtgttgattttattcatgataatggctgtatttcatgtttaaatgaaatatggtaaactcaacatttccctaacaatttttatagtacctttctcaaacagtatattttttattgtatattttgtacattgtgtgtgtatacacacacacartaactattactctgagtattctgcactattagtaaacaattttttaaccagcattgcagtaaccctctattgaattttatttatttattttattttgagatagaatctcactctgtcacccaggctggagtgcaatgtcgcgatctcgcctcgctgcaacctccactccctgaattttaattaatataggtttttaataagtatggatatgacttttcaccctaatcatgacctttcacccaaatctttttgcttcatcagtctcttttttgtctcatcattcagtgtcagatgatcccattacttttatttttttcttcacasattaattgaggctaataatatgccttgattagatatgcaatttctcctgatatcaaacaactcaatcaacgtttatgcctcttggtttgattttggagctgattgtagaatcaactacttattttttctctttctttccttccttccttcctttttctttctttctttttctttttctttcttctttctttctttttctttctttctttccttctcttccttctttctttttctttctttcattcttttttctttcttcctttctttgtctacgtttctccttctttttcttttttctctttctttctttctctttcccttcctttctttttcttctttctttctttctctttcccttcctttctttttctttctttctttctttctttctttctttctttctttcyttctttctytctttctttctttctctttccttctttctttcttccttccctccctcccttccctccctccctctgtcaccctccctccctccctccctccctcccttccttccttccttccttccttccttccttctttccttttgtcccaagtttgtctggctcaagttattcttaagaatgttactattttactcttcatgctagaccctgtactttagtcaggttatttagctactttacggttgtcatataattaacaagtcttagcttcatcttcagattgagatatcaacgttatattttcatgtacagtcaattgtcagtgaatcacattgtttttcaatttaataaaatctaaattcctcataaccatgttgtgagaatatgcagaaaaaattaaacatacttgagtgagtacagtagatatatattggagtgtatcctttatgaatgcaaactggctgtagtttcctttaaaatagtcatttaaataaaaaatttgccagataaatcacagaatatcaattyctcttgacttgtaaaacttgaattactagtgccatctgaatgattcttctgaagatagacagagtagtctctacttacctgtgagagaaaaaagctgcactagtccctcttattcatgtgggatatgttccaggctccccagtaaatgcccgaaatgattaatagtataaaacccaagtagactatgtttttccacctgataacttggaatactactaagtgactaacaggctggtgcatacactagacgaagggaggattcatgctctgggcgggatggagctgaatggcataggatttcatcaaagactactaagtgactaacaggcaggtagtataaactgtggatgcactagacaagaaagtattcaggctctggggagaatggggctgaatggcataggatttcatcacactacccagaacacctttttttattgctaagtattattccattatatcatgtatcacggtctgttaatccattcatgtgttgaagggcatttgcattgtttttggcatttgtgaatcatgctgttaagaaaaatattcatctrcagtttttatataaacacaaatttattcctcatggatacatatctaagactgggtttgttagataaatggtgtgtgtgtgtgtgtgtgtgtgtgtgtgtgtgtgtgttttattattattatactttaagttctgggatatatgtgcagaacgtgcaggtttgttacataagtatrcgtgtgccatggtggtttgctgcacccatcaacccgtcatctaggttgtaagccttgcatgaattagctctttgtcctgatgctctctctcccctttccccgcacaccccaacaagccccggtgtgtgatgttcccctccctatgtccatgtgttctcattgatcaactctcacttatgagtgagaatatgtggtgttttgttttctgttcctgtgttagtttgctgaagatgatggtttccagcttcgtccatgtccctgcaaaggacacgaactcattcaatttatggctgcatagtattccatggtgtatatgtgccacattttctttwtccagtctatcattgatgggcatttgggttggttccaaatctttgctactgcaaatggkgctgtgataaacatatgtgtgcatgtgcctttatagtagaatgatttatattcctttgggtatatacccagtaatgggattgctgggtcaaatggtatctctggttcttgatctttgaggagttgccacactgtcttccactatggttgaactaatttacactcccaccaacagagtaaaactttcctatttctccgcatcctcgccagcacctgtggtttccagatgttttaatgatcggcattctaactggcgtgaattggtttctcattgtggttttgatttgcatttctctaatgaccagtgacaataagcttgttttcatgtatttgytgactgcataaatgtcttcttttgagaagtgtctgttcatatccttcacctactttttgatggggttgtttgtttctttcttataaatttgtttaagttccttgtagattcttgatattagacctctgtcagatggatagattgcaaaaattttctcccattctgtagrttgcctattcactctgatgatagtttsytttgctgtgcagaagctctttagtttaattagatcccatttgtcaattttggcctttgttgccattgcttttggtgttttagtcatgaagtctttgcccatgcctatgtcctgaataacctactgcctaggtttttttctatggkttttatggttttaggtcttacatttaagcctttaatacatcatgagttaatttttatattaggtgtaagggaagggtccagtttcagttttctgcatatggctagccaattttccctgcaccatttattcaatagggaatcttttccctattgcttgtttttgtcaggtttgttgaagatcaaatggttgtagatgtgtggtgttatttctgaggcctctgttctgctccattggcctatatatctgttytggtacaagtaccatgttgttttggttactgtagtcttgtagtatagtttgaaatcaggtagcgtgatgcmtcagctttgtgctttttgattaggattgtcttggctagatgggacctttttttggtttcatatgaaatttaaagyagttttcttagttctgtgaagaaagataatgatagctagatgggaatagcattgtatgtatcaactactttgggcaatatggccattttcatgatattgattcttcctatccatgaggatggaatatttttctatttatttkggccctctcttatttccctgagcagtggtttgtagttctccttgaagagttccttcgcatcccttgtaagttgtatttctacgtattttattttctttgtggcaattgtgaatgggagttcactcatgatttggctttctgtctattactgatgtataggaatgcttgtgatttttgcatattgattttgcatcctgagactttcctgaagttacttatcagcttaaggagtttctgggttgagacartggggttttctaaatataccatcatgtcatctgcaaaaagagacaatttgacttcctctcttcctatttgaatactccttatttctttctcttgcctgattgtctggtccaaaactcccaatactatgtccatcctagacagatcaacgagacagaaaattaacaargatattcccaatttgaactcaactctggaccaactggacctaatagacatctacagaactctccaccagaagtcaagtgttcttcttggcactacatagcacttattctaagatcgaccatataattggaagtaaaacactccccagcaaacgcaaaagaacaaaaaccacaacaaacagtctctcagaccacagtgaaatcaaattagaaatcaggattaagaaactcattcaaaactacacaactacatggaaactgaacaacctgctactgaatgactactgagtaaatattgaaagtaaggcagaagtaaataagttccttgaaaccaatgagaagacagacacaatgtaccagaatatctgggacacagttaaagcagtctttagaggaaaatttatcgcactaaatgcccacatcagaaagtgggaaagatctaaamttgacaccctaacacctcaattaaaagaaatagagcttgatggggatggcattgaatctataaattacctttggcagcatgccatccccatcaagctaccaatgactttctttacagaattggaaaaaactactttaaagtttatatggaaccaagaaagagcccgcattgccaagtcaatcctaagacaaaagaacaaagctggaggcatcatgctacctgacttcaaactatactacaagcccacagtaaccaaaatagcatggtactggtaccaaaacagagatgcagaccaatggaacagaacagagccttcagaaataatgctacatatccacaaccatctgatctttgacaaacctgagaaaaacaagaaatgggaaaaggattccytatttaataaatggtgctgggaaaacaggctagccatatgtagaaagctgaaactggatcccttcgttacaccttatactaaaattaattcaagatggattaaagacttaaatgttagatctaaaaccataaaaaccctagaagaaaacctaggcaataccattcaggacataggcatgggcaaggacttcatgtctaaaataccaaaagcaatggcaacasaagccaaaacygacaaatgggatctaattaaactaaagagcttctgcacagcaaaagaaactaccatcagagtgaacaggcaacctacagaatgggagaaaatttttgcaatctactcatctgacaaagggctaatatccagaatctacaatgaactcaaacaaatttacaagaaaaaaacaaacaaccccatcaaaaagtgggtgaaggatatgaacagayacttctcaaaagaagacatttatgcagccaaaagrcacatgaaaaaatgctcagcatcactggtcattagagaaatgcaaatcaaaaccacaatgagataccatctcacaccagttagaatggcgatcattaaaaagtcaggaaacaacaggtgccggagaggatgtggagaaataggaacacttttacactgttggtggaactgtaaactagttcaaccattgtggaagtcattgtctagatcctcagggatctataactagaaataccatttgacctagccatcccattactgggtatatacvcaaaggattataaatcatgctgctataaagacacatgtacacgtatgtttattgcggcactattcacaatagcaaagacttggaaccaacccaaatgtccaacaatgatagactggattaagaaaayktggcacatatacaccatagaatactatgcagccataaaaaagaagagttcatgtcctttgtagggacatggatgaagctggaaaccatcattctcagcaaactatggcaatgacaaaaaaccaagcatcgcatgctctcactcataggtgggaattgaacaatgagtacacatggacacaggaaggggaacatcacacaccggggcctgttgtskrgtggggsgaggggggagggatagcattaggagatatacctaatgttaaatgaagagttaatgggtgcagcacaccaccatggcacatgtatacatatgtaactaacctgcacgtwgtgcacatgtaccctaaaacttaaagtataataataataaaaaaagaattagagaagcaagagcaaacaaattcaaaagctagcagaagacaagaaataactaagatcagagcagacctggagatagagacatgaaaacccttcaaaaaatcaatgcacccaggagctggtttttwgaaaagattaacaaagtacactactagccatactaataaagaagaaaggacagaagaatcaaatagacacaataaaaatgataaagagggtatcaccactgatcccagagaaatacaaactaccatcagagaatactataaacacctctacacaaataaagtagaaaatctggaagaaatggataaattcctggacacatacacgctcccaacactaaagcagaagaaagaagtcaaaaccctgaataggccaaacacaagttctgaaattgtggtagtaattaatagcctgccaaccaawaatagcccaggaccagatggatttacagccaaattctaccagaggtactaagaggagttggtaccattcctttggaaactatttcaaacaatagaaaaagaaggtctcctccttaactcattttatggagccagcatcatcctgataccaaaacctggcagagacacaacagaaaaagaaaatttcagtctaatatccctgatgaacatcaatgcgaaaatcctcaataaaatactggcaaagcaaatccagcagcatatctaaaagcttattcaccatgagcaagtcgccattatctctgtgatgcaaggctgtttcaacatatacaaatcaataaatgtaatgacaaaaaacacataattaactcaatagatgcagaaaaggccttcaataaaattcaacaccccttcatggtaaaaacactcaataaactaggtattgatggaacatatctcaaaattataagagctattttttaaaaacccatagcaaatatcatactaaatatgtgttcatttttataagaaatagacaaactgttttcctgagcgatcatayattgtaccttcacatactcagtgtatgtgagwtccagttgtttcgcaaccttgccagcctttgagataatgtgtttttttttccattaaattatccattctaatatgtgtgtgatggtattgcattccctagtgactaatgctgcttagcatcttctttgtacttatttaccatctatgtacctcctttggtgaacactgtctaaattttgcccactttccattgagttgtttcttccattacggaattttgagactacatgatatattgtggctacaagcccttcactgagtaaatattttgcaaatatttttcttgcatctgtagctttacttttctctctaatagtctcttttcatgagcaaaagtatgtaattttgatgttatcacatttttcatttatagattacgctctttgtgtcatctaaaatttccttgcctaaaccaaggccatatacagttctagaagttaacattttacacttagttatatgagttaatttttgtatgaggtatgaggaatatgtagagggttattattttgcatttggatgcgttactgttccagtatcacttgtttaaaagactatgttttctttattgaattgcctttgctccttttttaaattgaaaacatcctcaaaaaatttttaaaaacagttaaggaggaaaaagtaaaattcaactaggcttgtaggacaatcaatggtaatcattaggctagctttccattgacccacttccttatagctggtcactgattactagtccaggataacataatctttgtcactagaatctttgttctttttctgttctttagttaaaatttaagacaatatgagatgacaaactttccatttgagtttctcctttaggttctgcatactaacaaaactactgatgccagccattctgaaaggcttgacaagaaactcaacttagggaagaatgtactttccatatcctgatgatttcagcccccttacccgaatcaattgatgacctcaattttccagccactcccccttcaaagattcttgcccagaaagcttcagtgaaatgggtttgagtcttgagaattcttctcatgtccttgtttggtgaccttgcaattggtaaactctctgttgcaaactccactgtcttggtatattctgttgctgcacagcaggcatacaaaccttacaatcttataaaaattcatggcaagcacccagacatgatggctcacacctgtaatcccagcactttaggaggcaaaggagggcagattacttgaggtcaggagctygagaccaggctggccaacatggtgaaaccctgtctctactagaaatacaaaagttgcccaggcatggtggcacatgcctgtaatcccagttactygggaggctgaggctggagaatcrcttgaacctgggaggcagaggttgcagtgagccaagatcgtgccactgcactccatcctgggagacagattgagattccgtctcaaaaaaaaaaaaaaagaaaagaaaaaaaaattcatggcaagccactctccttgcagtcatttacctacagtccagtgcccccatgccactggggctgacccagagagaagctcaagaagctgcttagttatgatgaactaagggccttagctggggccttctgtgttggcagggcagtgctgactttcagcacacaaccttgtctgcagcagagaaaccatttctggtctcagaagaagtctcaggtgagttttctcagagcagctggcaccccatttccttctgtgtgtgtgtgcctgttttcgtcttagaggtcttgtggcctctttgaggtcttgttgacactccctaagtctaggtaggaacttatttgaggagatctcccttcagatggaaaaagactagagggcattgcttgggagaaatggtcttggattttggaatctgaaactttatatggaaaggtcttttgtttgtctttgtcttgttatatgtatttatgtttgtggaggggatccctgaagaaattactagtggaagaaattactaactcagggaactcttcttgtttggtcagtcacattcagttagtcctgaaggagttgctagtggaatctcagcaagcctaactcagggtaatcatctgctcttcaatctttcccaggctttaccctctgaacttctgatcgaaggtcatccctctccagcttgagtggatcaaagatgacaagggccaatggaaccaagtttgagtcttgccaggtcaatacttgggtcctgagtatggtgactagtatctgttttgttatgtgtgtattattccagccagaatgggaaatgctaattcagctcctccaggcagcccaatggggctggtggctttgagattattaaactctttctctgctgcaaaccccactgtctcagtgtattgttctgttgctgtgcagcaggcatacaaatctgacaatctygtaactatttgtggcaagccaggtcgaggtcactctctttgagggcatttactcactgcctagtgccccctttccactgggrcagacccagagacaaaccctagcagcttacttagctctcatgaactaagggctgtcccttagttctcccaaagtaacccacaatgcaaccctgatgggctgcatcttccaaaattgaaaggcctttgtctatcattccatgaaacaaaaaaagattatcttactttttaacatggcttaaccttaatacccactggatttcggagaacagtggccactgcatggttctcatgcttacagtacgatcctgtagctagatttgttttgtaagaaggaagargaatgagatgaaataccctatgtataatgttttatgttgctttggaaaagtacaacaatgtagaaaaaggtaaaatcatgataaagtaagaaattaaaractgtttggactgatttacaagaaaaagatgatgctatgatggttcagttaaaggaacctatgactcacccccctccactttatgggggagctgcagcagcactactggcgcctctccagagtccccaccaccaaaaagtcacaaatccggggcaacaggtatgatctctacttcttataacccaacaggggactccatttaggcagggtgtcacttcttatacccaacagggaactccatttagccggggagtcactctggttctgagaggcagtttccccataacaactgcttacaggaggtgttgctgccacaggccagcctataggatttatcttggtttattctctgttctccacttccaacctacttaattagaaaaataatatgcctatttattgagaagatctaaagtttatggaaggaacaggattgaaaaaaaaaaaaaaacatccaaagcatatgaagaatctattctcctctgtatttgccacacagaaccctacctgagcaggcacccccaatttgctcaatattttgttgacttcagagaaacaaagaatggttttagaaaaagctaaggaaaaggctgatcttattcacactgactctcccagtaatccagtaagggcagctgctcagattgcagttcccacctctgacctgggatggaatataaacactggagayagatctaaccttgaacactatcaaaactgcattttgatcagcctctgcaagggagtgcccaagcaaaggagyctcartaaggtccaggatggtcaagcagaagcctaatgagggttgctttggaattcttagaacaagtctttgaagctttcagagaataaatggatattgacccagaagccccagaaaatttgatgatagctaacatgatgtttatccaacaaagtgccccagatattcagagaaagttacaaaacgtagctgaggcattggacatgtttttgtctcaattagtgaagattgtttttaatgtatttactgatcacaagtttaaagagtggaaaataaaacacaaggaataatgaaaatggcaagctgacttgttatctgtggctctgaccctagtagtccctggaccacaacaagggccgtcatcagacactccatctatggtagaaccacctgggcccccaaargccaataaaaacggacatcccattgcaggtcccaaccagtgtgcttactgcaacaggggggacactgartggaaaatttctcatgccytacaaagcctgatgttaaacagtcagccttctgcccaccaaatgcctgggatagctggggagcttgagagagatactaaagaaaaagaccagaaatggtagcacccaggggcttctcctgacccagacaacaccctccatatttcccacatggggcttgagatcctgatgatggtgagaaatcagcttctggactttctagtagacatggtgccatcyatttggtgttaaatatctggtggtctaaactttcctcagaaataatgaaggtgactgaaatctcagaaaaaatgctgatgagatcattcctccaaattttggattgtcagctagagtaagatcatttaaagcacagttttttgctgggcgcggtggctcactcctgtaatgccagcaccttgggaggctgagatgggcagatcacaaggtcaggagatcgagaccatcctggctaacacagtgaaaccccgtctctgctaaaaatacaaaaaattagtcgggcatggtggtgggcacctgtagtcccagctactcgggaggctgaggcagaagaacggcgtgaatcggggaggcagagcttgcaagtgagccaagatcatgccactgcactccagcctgggygacagagcaagactctgtcaaaaaaaaaaaaaaaaaaaaaaaagacagagtttttctatacatccttgaatgtcctatccctttgttggggaaagtcttccttttttgttgttgttttgttttgttttgttttgagacagagtcttgccctatcgcccaggctggactgtggtggcacgattgtggctcactgcaacctctggctcactgaaacctccacctcacgagctaaagcaattttcctgtctcagcctcccgagtagctrggattacaggcgtgtgccaccacagccagctaatttttatatttttagtagagacagggtttcaccatgtttgcctggctcgtcttaaactcctgacatgaggtaatctgccctccttggcctcccaaagtgctgggagctgggattacaggtgtgagccactgctcccgtcctgttagggcagtactcttaaccaaactaaatgctaagattactttttctctgagatgattggacatccaggtgccttcagaccaagcatgtgctctgcaggccatattattacaactggagatccttgaaagtgcctgcacccctgaagagatactccaaaaggttagtccggaaacatgggcagatgggaggccagggaaaacaaaaactgcatctccagtacaagtcaagttttgtgcaggagtggcgctgccaaatctaaagcagcgccctttgagagaaaaggcacagcaatgcatttagcctctgctaatggccttcctgcaatacaggaagaattccttgtttctcatgtaacatacctgtcttgccaggacaaaaacatggaactgaggattattggtttgtacaggatttgagggctactaggcaaattttcaaagccatttatctggtgatamctgatgcttatacattattcatgactttaaccagtgagttgtactggtgttcagtcttgaatctgaaggatgccttcatctgtattcccctgagtccagagtcccatgaagtgtttgcctttgaataggaagactctgacactaaagctaaatgatagtattgctggatgatgctccatcaaggcttcaaaaactcactaaccgtccgggggaaatacatgctaaggagttttgggacctccaattgaaaaatgagactttgcttatatatgttgayggcatattagaagccagcacaactatggcaaattgaccagaatattatactggctttacatttttttttttgtctggatggggatccaaagtatccaagaaaaaaatcacaaatattgaaaaactcaattatatattttaggtttgaattttctcaggagcagagtaatctgctttcggactggagagaagctcttgtcagggtggccagactcaggacatggcagcagctgtgaggggtttttaggtatggctgaatgttgccatatttcattttcttattttgggcttatagcaaaatgtctctatgaagccctaagaccagacacttgacttctagaatggacaaggaatgtcaaaaggcctttctaaccattaagtaaaaattactaatggatctggctactgagaccccctgaactaagaaagccatttgatttgttcawacatgagagagaagggatgggtttaggagtagtaacccaagacttggggaatatcatgaggcctgtagcctacttttcaaaacagctggacattgttatgatgggttggacttcttatctctgagccactggcaccacttgtgatcttctccaggaggcagaagagttcactttgggttaacctagcactgtacacaccccayactgtgtatgctatttgttggaacagaagtggagctactgacttacctctagaagactgaatagrtatcaggtcatcctcctggataatcctagtgttactttgagagctgtttctgctttaaatcctgctaaataaacctatacatgattgcatataaattactgagcaagtgtgttctattcaaccagacatgaccaaaattccctttaaaaacctggacttaaaaatattcactgaggaaagcagctttatgcaccacsgacaacagaaggctgagtatgctattgtaaccctgtgacagatcctagatgcagagacactccctctgggttcatcggcacagaaggcagaacttagagtcctaatcagggcatcccaactaggtaaagactcctgagtcaccgattactctgattccaggtatgtttttattgttrtccatgctcatggggccgtttggaaagaaagcgggctcttaacctttgatgattaaaaaagaaaaacaattaagcatgctaaagaaatcttagcctgactaaaggcagtcttggtacccaagaaagtagctataatacactaccatggacatcagtggatggacaatttggtagcaagaaaaaaaaaatcactaggcagagcaggccactaaagrggtgaacagagaaaaaaatgcccaaagccttcctaatgccattaatccctgaaataaacttcagcctaaaatccctacctaatggaagaagatgtaaagagagaattcgattgagactttgactccaatcaaagaactcaaaatgagtggatatgtgacacggaagaaaaggttctggtgcccaagtatcttgtgacagatatcatcaaacacatacatgataccacacagtatggcaggcatgccacccttcaattgatccaggactatgtctttgggacacacttaargaagactatccaaaaaataatttaaaaatacctacttggtgcccagaacaatcttaagactggtcctccacccccagtaccaaggattcaagcaagaggtgcagggctattagaggactggcaaattgattttaccgtgatgccaagggtagcaggaaattttaaatacttgcttgtatttttagatacattttcaagataaacaaaatcattccgctgcaagaccaagagaatgtctgagstwatgagagccttggtagagaagattaccctcaggtttaggtggcctgtctccatccagtgtgaccatagtgcaatttctgtagcctaggacaccatatattccaggccctcagcataatctggaatcttcatacagcctgcagactgaagtctactgaaaaaactcaaaagataaatcatactatataaaacaaaacaaattttagctaagatttgccaagaaactaacaacctggaataacattctgtccattgccctgctcagagtaagggtggtccctaaaagtgggcttaaattaagccctttaaaaattttacatgggagatcattcttccgttaccttctcagactaaggaatgccaataacatacacataaataaattagatattatcaaayatacacaatctttaggttgtactttaactactattcacgagtttgtggttccagcagattgtggtatccaactgacattctctttcatcccatccaacccagagactgggttctgctcaagaccaggaaaagtcgacatcctggggaccacttaaaacacagtgaaagaggccatgcaaagcatgactggtgacccattcctctgttcakcttgaaggacttagaccctggattcaccacagccatataaaacccgccccgccagattcttgtcctatcaagaaatgtagagaggccacttcaacttcagagactgtctcaaccctatctgaatggataagtaaatctttgatgggcctcaaatatcttttgaggaaaaatatcagataagtaactttaatgaaattagacaaaacatatgtcttcttgacwactacaatagttactttgagcataacaggaatgtttgttattataattattttatataaaaaggtgagataccttcctgtctattccctgccttactgaatgcttaagccatatatttacttggtcattataattgcctagataattacaattgctacccttatagacattacttcataattgccttggtcaatacaattgttagacttatagattttctagacattmtatgccatgctaacatagtctcatgccactcattatgtggacattctaaaatttagaaatggtcactcttgttttaaaacttctaattatacctctcctgttactacagtgcctagacaggsatarcaacactgtagttmaactgyttcaaggtattgccactggaagaaacttaccagaatgatggatctgtcagtaactcccccaaactattcaaaataagcattttctgttagtcatacttgtcactgactttctggatgttccaaatatgactacctatctgcaccagcttctttccatggctactttccaggtccaagtaatagtacaccaagaaatcaccaccccatgtgtcaatctctctctgcctatcataaatggaaagtcattccattacataggccctccatggcccatggcatactgggcagacaaacgcagctaggagaagggaaataaaactaaaagtttctccttactatgccaaaaatatttacagtggggaatatcacacaaattctggggagcctgtaaaaaaagatccctagttcaattccatttgtctatattccccatgaaaaaatccatcaataaatgcacccttgagggctttacctgtgtgcccccttggtacatgtttatttgtggcataggatcagaccctcctctgttaggrcaagcccactggtgtctcaataacctgtatattaagggctctcacttactgagatwcttctcagtccatcctaatgacaaaatattctgcccattttcccacmgactccaaaagggactgccaggcatatatcaatatatctggtggcagagccttctaggcatcaygagtcctagctatggagtatacactcactgggacatgatcagaaacttattggcaaccacagaaataattgcaaaagaggctgctaagaacattgaggctgagaaaactcttcaaatttacttgcccagatagttcttgacaacggaactacacttgattttctcttggctttacagagaggagtctgtacagtgatcaataccacctgttgtacttatatcaatgcttctggtaaaataaaaaccaaactaaagaaaatatttcagcagtctcgctggagaccatatgtctctaccacagaccctatgtctgaatagttttttgagctttccgcctgcatactccatgttttccagtccatttttcaaggactcttgaagttcaagctcacaattctgtttatagggattataatttacatsattcaattaaatattacaataaaaccatagactgaagtactaacatgttcatccagcaccctaagctgggtataacagcttgcaggttgttacaagacggtttcattcctctaatcctgactctctctctgtgccccgtgtcagcaaaaagaagctagaatggccattgcccrattcataccatattagcttttacacctcagaattgagaagggatcaagcccggaaggaactgaaactgtccctaggaaagttatataaaattgattaagggggaaaaattcaactatgatttcaggaaaatcagcagtaatcactaaatcagctttccatttgtccaacttctctgtagctggtcattgattactaccctaggataaagaagcccttgtcacaagacattttggtccttttcctttctatagataaaatctaagacattgtgagatgataatctttctgcatgagtttctcctttaggttctgcatatgaaaaaaaaacctagcaacatactggtcaacaaggcaaaacctcattttcacaaaaaattaaaaaattagccgggcattatggcacaggtctgtagtaccagctgctcaggagatctgaggtgggaggaccacttgagcctgggaggcagaagttgcagtgagctgwgrtcacgctactgaaatccagwtgggcaacagagcaagatcatcttgctcaaaaacaaaacacacacacacacacaaacatacacacacagacacacaaagacacamacatcagctggtctaaagagcccagcaaaaagctgactcakgaaataatgcaggttccacatcctggtgayttcatcccccttaccctgaccaattgacaacccaaattttctagcccstcaccctccatgatccccttaaggtctcttgcacatagccccttctcagaacagatctggggcttgagaatcctcccaattccttgtttggtgcccttgtgttgattaaagcctttctttgctgcaaaccctactgtctcmgcgtattggtctattgctaaacagtgggcatgtgaacctgatagtcttataacaaaatagaatagaagctatttataggatcgatccatgcatgtgagtctatttctggacaccgttttctcttctattcttccacgtgtttgtcctttaaccagtatcatgagatcctttactcactgtagctttttttaagtcttaaaatttggtaatgtgagtttttcaacttytcttatcttttgaagaattgtttagctgttttagcccctttacctttccatatgactttagaatcagcatgttcgtatgtgcaaaacattgtgcttggttattcactagaactgggacacattcacagatgaatctggggagaactgatatgtaatagtattaaatttttcaatccatgaatattatatatcctttgatttagtaagatcatacagtcttaccctagttttttttattttaagcmtacagatcctgtattttactagatttataactaaatattttgtatttcatccatcaacgaaaaattcaatttgtttaatagacagaatttattaatgctacctaatccttcttgagagagccatgatagtttgtggcttcagtaattttttaattcattcaagttcttgaatttattgacatggcattattcagaatattttttatttttcttttaatatatgtaaaaaccataatgatgtcatttctgtcattgctgttataagcaatttgtgttattttttctgatttagtctgtctaaaggtttctcaattatagagatctaaaataacaagcttttggtttccttgtttatatacatatttacttctttattatttcatctctgatctttattgtagtatttcttctgcttactttgagattaattttttctacttttactaatatctaatggtagaggctaaggttattgaagtggaacaccgtcattttctatcccaggtatttagtgacaccaatttatttcatactgctctagtgccattccacaacttttgatatatagtatatcaatcagtgtttggctggagtagggtgagtattccataaaagatttactgtgatttttggagggaggtgtgaagagggtattattaccaaaatgtggatttttttttaactccattctgtattttggctaagagaagcagctttggaacttctcaagtctgtacatctgtgagaccccaaggattacttgttttaatttttttttaagtttaggtttgttttgggtcaacttagttctttcaaggcttatttttaagcttttaaaaagcttaaaaaaccccagagatagtttgttcagaatattaagctgcttytgatgtctctactacgtgacctagatgttcaaacgagtctttctactctgattgattccatttaaatgtctccctgtgttgtgtgtgtgctctgggaatcctttacctttttgttctctggtagtgttcttcatctgataggtatcctttgtccattcttggggagttttgctctactctccagagkgtcaatattcagccaaataatctagggagttgctgtggaaatttgtagagccctttcactccatagtttcttcttttctcactctgtttcctgcagattctagtgaactcatcttctttgggaacactgagttttgtttcttctactcagcaagtgtggcactttctgctgaattctccttctccatgctgctgtttggaaaatttctcccagcataaagtcactttgatgatggaactcatctcattgtcactttttctctggaattaggtgcttcctgctttccaatgtctgaaaatgttattttcatctattttgttccatttccttatttgtggcaagaactctgttttacttgattattcttgcctggycttttacctttttaaattgtctgtactgattgttttctatttggtttcttctcatatttggatttgtttcaaaatttatactcatgctggattttgtctggtttctttgttataatttattataaataataatttattttcagtttttattcttttcttttatagctatataatgataaatttccctctgaggattgttcgagtgtcatctcaccaagtttaatttaatatgtttttattatcattcaattcaaaatatttaatgtttcctcttctgattttctccttatccatgagttatttaaaaatgaagctgagttctgggaagcaacctagtaaacgacagtaatttctttttttgggttattattattattattattattatactttaagttttagggtacatgtgcacaatgtgcaggttagttacatatgtatacatgtgccatgctggtgtgctgcacccattaactcgtcatttagcattacgtatatctcctaatgctatccctcccccctccccccaccccacagcagtccccacagtgtgatgttccccttcctgtgtccacgtgttctcattgttcagttcccatctatgagtgagaacatgtggtgtttggttttttgtccttgcgatagtttactgagaatgatgatttccaatttcatccatgtccctacaaaggacatgaactcctcattttttatggctgcatagtattccatggtgtatatgtgccacattttcttaatccagtctatcattgttgaacatttrggttggttccaagtctttgctattgtgaataatsccgcaataaacatacatgtgcatgtaaccgacagtaatttctatcatcagttaacagaaacagtaacttccactctttcaagttaagttctacataatttgaggaatcatcattttggcctttcaagataaataaatctgttactgttcctcrtcttctttgaactccacatgtccatttactttgaagcacacaataagaatgacatttcaaattcttggagccaaaggctatgaaaattattttggcagattttctaagatcatcacaggatctcagatactccaattggctaaatgagatttggaattgccagaagatctamaataggcaagattaaaaagtcctaagaaataatactcattgtctattgagttctgacatgctgtagaattccaaatccattagacaaacagatttccaataatttcttagaaataattgtaagtgtcttaaatagagccttgttttaaaaagtgatgaagagtcttgatgtaatgtctttggcaactctgagcttattttccttgacttaagtatttgaatgcttatggttatccaggttttcagttacaaatgactcattattttttatatttacatattacttaaattcttataaaatgttattgatcatatgcttgtctttttcttattctcttcccttttagaaacatgttccaaatcaagtatagatattgagaatgggtttatttctgaatctcagtatacatatgccttaaaagaaaaagcraaatatcaatgcaaactaggatatgtaacagcagatggtgaaacatcaggatcaattasatgtgggaaagatggatggtcagctcaacccacgtgcattagtaagtaatttattatgtttgtattgattatccagatgatacacaaaagtttactaactttagtctttttgtgggggctgatataatttcatttgaraagataagaaaaaaaaacctgcaggaacaaagcagacatcaattttttttccttttcacattaattactcagatattagtctgtctttccattcaggcttttcctactctaaagcattctgtgttacagraacaagttagggagctttatgtgtattctggtttaaactgattttgctttagctgagacctttatgactgttaatatatatctgttttatawgattagacttttacatcaaattctttactcctagatacaaaagcaatgtttttattgaagatatggatgcctagtgcataacatcaaaataatttaaactctataatttgtagatttgacactgtaggatatgtctaatactgaatatcttccctcttagaaatttttcataaatatttaggtagtagagagacaaaatattcctagatggtaccaatttctgctctgttgtatgatttccctaccacactatctagatatttatgaagatttccctaccacactatctagatatttatgaaaattttctgggaacaattggttcaatttgtcttattttttgcaaaaccactcagtaatakgtgtgtgtgtgtgtgtgtgtgtgtatacgtatatatgtatatatatatrtatatatatatakakatakatatatagagagakagagagrgagaragagagagagagrgagagagagagagagagatggagtcttgctctgtcgtcggccaggctggagtgcagtggcatgatcttggctcactgcaacctccattttccgttttcaagcaattctcctacctcagcctcctgaatagctgggattacaggcaccctccatcatgcctgcctaattttcgtatttttaatagagacagggttttgccatgttagccaggctggtctcgaactcttaatctcaaatgatcctcctgcctctcagtaatatatttgaagtaatatttaatatactcatgttaagtgaagtgaataaggtattcatgtatactgttttcrttttttaatgtctgtgcttaatatgaggtctagtttacaaaaaatgttagtcctcataaaaaagctaattttatactaaatttttattaattattcttttaagattttcttattattaaagagaaaatgtcttgtataacataggaatttatattttcagtctttttctcctttttacatatgtctcaactacgaattagtttggactcttaatttacaaaattctgttatgattttctttaaaaaataatgtatacctgtaatggcctgttttattactagcattgtcataaatgctttagtataaatgaattaagaaaaatgtttttaaaatatattttggggcttaagcaatgaaaaaaaatgttgtgtagaaagatatactttcacttttgacaactattttacgacaayraattctcaccagtcatagattatttttgtacggtacctatttattagtakatctaatcaataaagctttttcttcttagaatgggaaatactcagattgtttattagatgacattagaaatgacattctaaattttttatgcactagaatcttgtgatatcccagtatttatgaatgccagaactaaaaatgacttcacatggtttaagctgaatgacacattggactatgaaygccatgatggttatgaaagcaatactggaagcaccactggttccatagtgtgtggttacaatggttggtctgatttacccatatgttatggtaagtactggtttttcagaaattcattttcaaaatgaaaataaatctgttttccaattttaaaaatttgaattatatagaggaattgttaaggaatgttgattaaaatcaagatatctcctgatttgacataaactgggaaaagaagggagttttgaaaatatctctaaagtagtgcattaaattaatacttcctatgggccacctaccttccagatttgtgattataatataattgcttttgttaccctaaataaaagctttcaaattatttagaacctagcacttattaccaaaattatagttggttacaacttcctcagctaatttgtttttttaatttctactttacatcttctatcttgtgtgttaatttctgtactttctgagtgtagttctttattttctaaatttgaaaagttctgaagaccattacatgaatctcatttacgtttctcaatcagccatctatttttcagggttagaagaaggattggctctgtgggaaaacaagtatatgcagagtgttccaaggcaaagaaaaatatgtgcaaagctgtaaaaacaaaacaatatatttcaaggtggtaaagcagagtctatcctgctgaggctagatgggaggcaaggaaacaattatccagatcagctcaaggcatcatatcatttggattcattttatgactaatgaaaacccataaaagagttttaagaaaaggaatggtataatttgatttctagttttgttggattgttttcctggatgctgtactttttgtaggcaagaggcgacaccatgagtccaggtagggtgagaaagtgtggggactgagagagagtgatgataggggaggtgcagagcagaaggctgatttggaaaacatttaggtgatgaaaagtacaggtgatgttactaaatgttgggtgtgaaaaagagtgagattaagggactcacatgtttgttttcaattgttttctcacaagtatgtaggtaaatggcaataaccattttgtaaaatggtactgactggatagaatgcattttgagagggctttgcaacttttgacttggacacattatgattgagtcgccaatggaaaatcaaaactggatatgtgaagtgtggagttggatatgcatctagagaggagatatgcatttcggaatatcatcatataaatgatgacgctaaattggataagaatacagaatgaaaagagcaaagagctcaagatgaagccctgaaacattaccacatttatatataagacagaagagcaatagatagtaaagaaaatggggaaaaaaggaggacccagagaaacaggagaaaaaatctagaatgttgccatagacataaaaataaggaaattattaatgaaaaggtagtgtaacagattgcttaataagtcatcctgtctgaattctaattccactgcttgctgggcatgtatctttggccaacacagcaagtctatttgaagctttgttgactctttcttgttggtaaaatgtcacatatttacaaacagttctaatatttcaaaggattgtgttagttagcagactaaaatatttataaatatttattgccatagtgccttatataataaagtcaaagaagttgtaatttaattaccttaatatcattatcaaagtgataaatatttctaatttagttattatattctgttcagaaattgtgatggattaggtaaggtacaggccaatgacaagtgtaacaaaaatggwttttaatagagtagaagagacagaccctacatagaatctgccaataaaaataatgagctagacattcaatacagactgtagacataactctttcaagattctggctttgaatctaataggaagatcagaatattgcttgaggaaagttgtgcactgaagggataattaaaagaaaaaagatggaagacaccagagcagatacagcaaaaggggagctgcaaaggctgaacacatgacttacatagttgccctgagaaaatgcgagrggaaaggactcacagctactgtggaggtattgtgctttggtggcaacaggactgcttacaaccttgtgacaggtggcaacaggactgcttacaactttgtgacaggagatgggaaggaaaatgagcagtaacgttggaaaatggtagaagctgatggattctgttttgaagtatgagacatggtcatctgagattgaayagtgtgtgggcgaaggaggaggaagagtactaggtagaatagaaaagttttgaaatagtcacagctgagaaagagaatgagtacattgtagatgaaaggcagtgtcaaaggtccagttaaatttgactcattcctgctgttgtaaacacctatcataggacaggagaaaatggtgaaaacacaagcacaggtctacttatccagagattttwttctaatataagacagtggaaaactaaaaagagataagccaaatatccaagtaataaaaatatttaaaatatattttatgtatcactgtgtacagagaaatagaaaatccaataattgagatagaaaataggagggaaggaactggagatctgttttacataggaagtcatcgatgcaaagaatggttgaaagccatttgttatagtgagaagggtatgtgcaacagctgaggcagcgaagaacttgacctttttaataaaattcaaagatcataaaatctgaatcctggatttagtggaggagagagacatttgataacattggaagagtaggcatggatcataaagaggttgagttttgctctaattgagagggggaggcttaatttaagagactcataaatttcttttctgtgatgataggtaaatttaggttttatgaagccagaagcttttacaattttgaggggtcttcttcaaaaaagaacacaaaattgtgaatatattgcttcagtagtctttccaatcaccagacatgaaatgaaaacctaaaggagagaaagttggagtggyggacatagcagtagaagctgatgtagaaaatgtctttctattgcaaattgtacaaagacttaggatcatttgaacacataactaggaatttgctagtatagtacaggcctccaaacattaaacgaagaaataccagcttagtattcttttcaaatattcttctctcagccatgtaacaraaaactgcatgtggattgacagacatctgagtatatttcaagtgtcctaggaggtctcttctttgtggaaaggtttccacagaattgttattatggagcacttaagctaaataaggagtatgtatctcagagttaaaaattcatattaacatttcacatatctagtactaggacttagggttttgagttttagatgaagaaaaatatttctaattcatggagtgtccattcacattcttctctaaatcacgttttgtaagttattacctctatataaatacagcatttgaataatacccaataatcaagatcttaactttcctttttaagataatgcttttcacaatattacaacagacagaatttatataaaattagcacaaaatacgtgaacaaacacacatacaaaaaaaagaattgctatgtagaagattggtatagacttttaggagagaaatcccagtgattctcattcaagtgtgattttctcaaataatctgcaaaactcattaaaacaaacacaaaagcaaatttttgtagttattattttgtgacattacttttaagaatagttttaaatctaattttgtaattgtattttaataattgaggttatgatgtaattaattttctttttagtatgattctaatttatgaattctagcttgtacttttctaagttagcaagaaaggaggattctgaataagaaaaataatattttggataatatttagtaatgttgctgatttttaaaaattataaacatgtaagagataattttacacatttcttatctgaatcagaataattatcaaatttattaaacattgatataaatagtacatataacaaaaattgttatatgttaacataaatattcaggatacctagaatttgcctttccatgtgaacttgaaaatttatcttggtttgttttctttatttgtaatatattaattatgtgttttttatattttttytaacttaaaatatattagaaatgctattttgggttctttttccttgattacattaaacaaaaataccaattttaattaatttcttagtgcatatatcttcactaataaatctttgatgagaatttacctttttgtgatgtatatgtcagtcatcaagaattataaacatgatgagaccagaaatcatttgaggttgtttagtttcagttaaataaagttatcattgactctgcaatgacagatattataycatcattattctcgggatcctccccagttctattataaatttaacttcttaagatatttccatggtgttttatgatrtgttcttttatttttaaaattttaatttctatgttttatatgtttagatggtccaaatgcagttttgttgcatggatatattgcatagtggtgaagtctgtacttttagtgtattcatcacccaaatactgaacattgcacccattaggtaatttcttattcctcaccctcctgctatcctgccacatttctgagtctccaatgtctgttactcagcactctctgtccatatgtacgcattatttagctctcacttataagtgacaatatgtgggattttactttctgaatctgaattattttacctaaaataatggcctttagttttatacatgttgcttctgaaggcatgattttattctttttttttctttttattttttgttttggctgagtagtattctatgrcatatatctataccacatattctttatccaatcatctgttggtggacaattagtttgattccatattattgctactgtgagtagtgaggctataaacatatgagtctgggtatcattttgatatgataattgatttcctttgggtagatacacagtagtgggattgctgggtgaaatggtagttctgtttttagttmtttgggaaatgtccattctgttttccatagaggttgtactaatttacattcccaccaacagcgtataagcattcttctttctcctcactgtcaccaacatttattattttttgactatttgacagtggccactgtgtctaatgtaagatgataactcatttttttaattcgcatttctctgatgattactgatattgagtttttatttcatatttcttggtcattttcatgtcttcttttgcaaaatatctcttcatatcctttgtccactttttcatgggattattatttttttttcttgttgtgttgtttcagttctttgcagattctggatattagccctttttcagattcatagtttgcaaatattttcttccattctgaggttgtctgtttactctgtttattatttcctttgctgtgaagaaaatttttagtttaattcacaatcacccagaagcaggtcatttaattttcatgtatatggatagttttgaaaattctttatgatattgatttatagttatatttcaccaagttctgataagatacttgatattatttctaacctttaaaattttgggaacttgctttgtagctgtagcctagcatatggtctattttggagaatgttccatgcacaggtgagaaaaacatatattctgaggttgttgggtggaatgtcgttaaaatgtctgttaggtccatttgttctacagtccaatttaagtatgaggtttctttgtttatttttttgtccctgcaatctgtctagtatagtcattgggggtgtggaggttgcttgccctcattatattgctgtttatctttctacttagctctagtagcatttcatttatgaatctgagtgctgaggttttgagtgcatatatatttagaattgttatatcttcttgcttcctttatcattgtgtaatgaacttcttgtctttttttttcttgttgatttgaaatctttttttatatataaatataactataccaaatgctttttgtttctgttgttcaaaatatctgtctccatacctttaccatgagtttgtataggtttctctaagttaggtgggtttcttttgagcagcatgtggttggtttctgttttccawatttggtccacaaatctatatcttttaagtggaacatttaatctatttatgttaaaagttaatattgtcatgtgaggttttgttcttgtcattatgttagttgttacctagctggtttgtagtcccaactgtgtaattttttaataagacctgtgagttttgtacttttgcatgtctttatgatagtgagtattgaccatctatttccatgttcaggactccctggatcatttcttgtggggtgaattcctaaagtggatttctagtggtgatgaacttccttagtattagcttgtttgggaaagactttatatattcttcatttatgaagtttagtttakcaaaatacaaaatatatctctaatatatgttttttcaataaatatgaactaatctttctttaagaaccctgaaaataggacaccaatatcttctggcttgtacagtttctgctgagaagtccactgttagtcttacgagatttccgttatagttgattagatgmttttctcttgctgattttataatttttcccgttcacattgactttagatagcctgatgactatatgtttgtagaagttcatctcgcaatgcatcttcctggtgttatctgagcctcttgtataaggatttctatgtctctagcaagagggcaagaggagataaattttcctcaaaaaggtttttttagctttttcttctccctcaagaatatctataactcttaagttttctcattttttagaacgtcatttttctcaaaacctttgctcattaaaaaatgttatttgctctttatttttgtctgacagggttaattggaaagacctgtcttcaagctctgagagcaagtttttctgcttgatgtaatctgtaattaaatctttcaactatattttgtaattcttcaatgaatttttaatttccataagttctatttgttttttaaaaaatatttttagtacatttttcattcatatcctgagttttttttctaatttctttgtgttgcttttcaactttctyttggactccatttagctactttaaaataaatattttaaattctttggtatttcaaagattttattttggttaggacttattgctgaagagttagtgtgatcctttgcgagtgttgtaatacgctgttttaaatcatacttccagaaatgtttcagtggtttcttctcatccagatgaactatcccttcttatttttaagtccagtttccaacagacaggatttttttttyccctttgagaatatgactacgatgtatgttgtatagggctatttggtttaggttctgggttctttcagtggtaaagactctgtttgagtacmttggttagagataacttttgtatgatggctttcttaattgctggttgtagtagttatgtactgggtgtatgacgaggcttactgcctcctgaagggctggtatggaggactacgcagaaaactaaccttgttctgcatcatgccctagtgtcagcattttgcactgggctgtgcagttcaacattcaggacagtaggtggcrcggacaggtaagagccagctgcagcagaggcagatgagcctatgcttgtcactgtttatgggagactctctgttgccccaaggaatggactgatctgtgaaaggtacagtggtctgaggagctggggacaaagcgggatagatctgtaccactaagctcacccttggatgctccaaggatgagcacaagcaccagccctgacaggggtgtcaggggaagaccctggggagatacccgtagcttgtctttcttgcaagcctggcttcattgggcacatgaccagtggagttgtagccaccccctaatacccctacaatgtccgtcctctggtgtgtctacaccagtctcctttgcgagtgaccacagctatgaacacagaattggatccacgggacatgttcccctctctacatccgtgcccaagcgctgggaccattgggctcctgggatggatctatactcctcccttgcagagccaaacaccgcgtctgcgtgtctgctggaagtggcgtagtcattttcagcccacaagcaggttgctcttgcacacaggaaagtgaatgctacagtcttctttgccacaaggggtgttcctttgttgcactttccattaggaatagcctccctggtggttaaactattgggaatgctgtaactcctttgggtccagccagctatgggtgactgccacatccaagcaggtgacagggaatatttgtgcggctctggtgttatggggacagagggctgaggttcctgggtaggaaacagtccccacrtgagtgcactgcaggcatgaaacctaccactgcagctcaggcccaaggggaaggcagatgaccctattcaactagtagtttggtgtaatgccctcaagaagttcccaaatctccactcacaccagtgtgtgtgttcacgaagacagaagagctctctgatggcttggatccacacggtgagctgcagggagcccagaagactcctacctacactttctatgaggtcccacagggtcctagtcaacctttgtcaggytcttgcttctgtctttttccatgctttggcttctctccatggtttctctatgacgctcctgcaccctctcttaaatatttttcaagttatgatcatttacctgtaactttggttcttctttctgaggagaacttgtgtccaaactccttagtcagtcatcttgttttcaaaaagccccaattctggtctatatgcacttttcttttttaatatgagagagtaatttcatgttttgagtaaaaaaagtaatattaaatttcattaatgtcagtgattaaaactagattcattgtaaataagttgaatttacaaattaatttttagaacagatatatttcaataccataacatttataataaagttccatttcaatttagacagcatataaaacataatatgtagcattctttacagggaaaaggatttatctgatgcccctctgtatgacccaatatcaacctcactttattgtggcatatgtaaaattaactttggcaatgattaattatatattctcatgaaattattttacctttttcaagaaagagaatgcgaacttcctaaaatagatgtacacttagttcctgatcgcaagaaagaccagtataaagttggagaggtgttgaaattctcctgcaaaccaggatttacaatagttggacctaattccgttcagtgctaccactttggattgtctcctgacctcccaatatgtaaaggtgaatgcttatcttacaattgctgaaataagaattagaactttgaataccaacttttttcttattaattttgtttgggctcccattgcctgtaatctaatgaattaagtcaaatatttgcctgtgaaggacatgtattgagtactgaatacctgagattcagtcacttaagttaatctccactgtttcttgaacgatgtgctggaagtattcccagacacacaggtgttgtcggtcttagtctactttaggtttatgtttctataaaggaataactgagtctggatgatttgtaaaaatgttttatttggctcactatactcatgactataaaattcaagatcgggcatctgcattcagtgagagccacagaatgctggtagaaagggaagaggagccactgtgtccagagaacacatgatgagagaggaagcaagagagagagcagggcagtgacaggctctttttaagaaccagctcttccaggagctaatagagtgagaactcaccctgagagggggcattcatctgttcatgagagatccatacccatgatccaaacatctcccattagaccccacctgaaacactggggatgaagtttcaacatggggttggaggtgacaaacatttaaaccatactagtggctgacaatggagggatttctttgttaattttcattttgcttgaaatgtcaacatccattctggacattttatatagtgtgggctgyaacttaagtttcaccgggtgtgtctaaacaatatttaagcagcttatattcaattcagttgcttgtattgattagtcaaactttatgttgatcaaatgcttgcctcagttatgatatttttccaaaatgttatgataaaatgtttccatgaaatgtaaaaattaacatgattttcataaccacatttgctaattggttttcttgcatctttaagatatctagaagtctgagcatattttaacattttaatataccttcaatatgacaatttagtataagtaatacaatatgaacaccattcttgattgtttaggatgctataataagttacataatgaagaatacatgaataaaagaagaaaatctttccattttactgaatttttatattgtaaaacagacaatttaaccattatttacatagtatttctactatagagcaagtacaatcatgtggtccacctcctgaactcctcaatgggaatgttaaggaaaaaacgaaagaagaatatggacacagtgaagtggtggaatattattgcaatcctagatttctaatgaagggacctaataaaattcartgtgttgatggagagtggacaactttaccagtgtgtattggtaatgtataaaatattaatatttaaacttgtcaaaacttttgtattttgtatctaaaacacatacatcatgttttcacaataaactttttttgtaaaatttacatagtggaggagagtacctgtggagatatacctgaacttgaacatggctgggcccagctttcttcccctccttattactatggagattcagtggaattcaattgctcagaatcatttacaatgattggacacagatcaattacgtgtattcatggagtmtggacccaacttccccagtgtgtgggtgagaawacccttcttaaatcaacatttaacaaagtttaatatttttattgtaacaacaatarttgcaactatatttttgaaatttacagatatgcctcaacatttccagtcttcaatatgagaccaatcttttgcatattgcttataattcaatatgtgtctagaaagaaaaaataaagctagtaatataattttatgaatctttctgcgtctgataacagtattgtttatatttaaaagtgtgaagcaacattttacttacaaaaattgtcatgtgaggccagggtggttgctcacgcctataacctcaacacttcaggaggccaaggcaagaagattgcttgaggccaggaggtagacactagtgtgggcaatatagcaaaagcccatctctataaaaaaaattttgtaattagttaaggtgtggtggtgcatgcctgtaatccagctacttgggaggctgaggaggaatgattgcttaaggccaggaattcgagattgcagtgagctctattgtgcattccagcctgggcaacagagtaagactctttctttaaaaaacaaaaatattaaaaaattatcatatgattaaatatgagtactaattactgagaaattataacagttttatataaaatataaatattattgttattgtatggtaytcctttttaggcactgagaagcaaagaaacaaagttgacaaaatacctacttactactctcccataggattcttttctctcttaaagcttccaaaagtgataatttttcagtttgttccatatcagccaaaataagtkaatgtgctgcagggttggtgggccacaggccctctacatcagtggtatagctgagtgrcatgaggtagtcagggactgagtcaggacgtaaatctcattgacggacttcacactgtaaatctcatgtcttgatcagcaagaaggcaaggtgattcacttacagtgtgacttgagatgtacaatctttaaaatcattttgcctctttgatgactaaccgggaggatcttggggaccctcattcacttttctctaaactgagatttttcctaaagttttcctgggtcctgaattctaagagtcctaatgtccaatcatacttatttatccaatgaaatatccaatgatattttgtatttcccaaagaataaaatgtcttctgataggtatctctaacatttcagcgacagaatayagggcttatattttgacrtaatagcattttgatgcaatgtgatcaggaataacttggttggtgaaatttataatgattaagtcataattttaccatgctaatactatttactttataactatttttatgtaatagttggtttgattcctatcatttgaattttcataaaaatatatttattttatagcaatagataaacttaagaagtgcaaatcatcaaatttaattatacttgaggaacatttaaaaaacaagaaggaattcgatcataattctaacataaggtacakatgtagaggaaaagaaggatggatacacacagtctgcataaatggaagatgggatccagaagtgaactgctcaagtaagctcttattttgttttcagaaatgtattctatttctcatttggaaaagtaataggtatgtgtgtcttttaaaaactttagctatttattattacaaatgctactgaataaggcaggtaaactagaaactaatgaaaacactgttcctaatattaactgtgccctgtgaattagttacctttagtataaacacacacacacacacacgcacacacacacacacacacacacacataaaccaggcactacatgtcatcattactgttggaggaccagtgcttctcattccttttcttgtcaacaaatgttcctgtgcctatacctctgtctatgccaataactactatgtatctgtttgtatatgtctgtatgcatgtatgtatgtatctatatctatttctgttgattcatttatttaatctatctctctgtctattcatctacctgttcatctacctaatcatctatttatctattaatttattgttcatctatcttgaaaagttagtcatattgacacatacagtttcacttgaatagtgtaggttttattccagtcttctcatattttatatctgtattttgctatccaattgtgggtttccttgcctcactarcttcaatatttytaccaatgtctgccagtctaggatatacagaaagcattgacaaccaatacaaaaactaatctgctatcaacatttcaatatgtttagagtccttaaagaagcaaataatatatatatgcagtgaagtgtacatgttctacagttttttcttgaagttttatagttttagccattctatrtagatttattaaaatgatcgtatagttatcgtcctttctgttaatgggatgcatcacctttactaatttgcctatgttaaacgacctttacatttcttggattaaacccatttgatcatagtgaatgatctttttaatgtgctgtaggatttgttttcctagtatagtgttgaggggttttgtacctwtgttcatcaggggattttgcctgtagttttctttttgygttgtgtccttgtctggttttkgttccagagtaatgttgggccactagaatgagttagaaaaatgatctcctcatcaaatttttggagtcgttttagaagaattggtattagtcctttctaaaatgttgttataattcagcaatgaagccatcaggtcttggattttctttgatgggaaacattttattactgacttaatctgttgcctcatgattactctgttcagattttctatttcctctgaattaatcgtcktaggctgtgtgtctagaaatttatccatttcttctaggttatccaatttgttggcatataattgctaataacggtctctcattatactttgtatttttktgatatcagttgtaatatcacccttttcatctccgatcttgtgtttctttaagccgtatctctcttttttagttattctggttaaagctttgtcaatttttgattatctaaaaaaaaactattttcattgatattttgtactgctttgggggctctattttacttacttttactctgatctttatgatttccatccttctactaattttggaattgactagtttgttcatgtttttctgcttctttgaggtgtactactagactgtttatttgagttctttccactttcttgatataggcaattattcctaaaaacatccatcttagaactacttttgctgcatcccataagttttgctacgttttgtttccattctcctttactgaaaatatttttaaatttatttaaaatggtttgaccctatgattgtttcagagcatattgtctaattttcacctaatttaaaattttccatagttcctcctattattgatttctcatttcatacctttgttgtcagaaaagtgacttgatatgatttcagtcttcttgaatttgataagacttgttttgtggcctaacatataacatattctggggaatattctgtgcgcatttgagaagaatatgtgtttttttgttatgtggaatgttctttatatgtctgtccaatctatttggtataaattattgtttaagtttaatgtttccttattgatattctgtctggatgatctgtctcaacgttgaaagtaaaatattgatatcccctactattactgtgttgcagtccacatctccattcagattcctaaatgtttcctttatatatttagttgctttgatgttgggtgcatatataggtttataatagttgtattatcttgacaaattgaccccactatcattatataataactttctttgtacctttatacaatttttcccttgtctattttgtctgaaatgagtataactacccctgttctcttttagtttttatttttataggtttttttccatgccttcactgcaatctgtgaatttacgttacagtgaagtaagtcaattgtaagcagtttataattggatattaatttttgatttatttagtcattctatgccttttgattatagaatatattccatttccatttaaagtaattttagataggtaaggatttatagtggtaatttgttaattgtgttctggttgtttttaaaattctttgtttctttcttgcttgctttattcatggtttgatgactttctgtasccatatgcttaggattttttcttttaatcttttgtgtatctattagatgttttgcttttggctatccttaggcttgcatagcataccttataaaaggctatttgaagttgtagttatccttaggcttgcataacatatcttataacaggtattttaagctgataggaactgaattttgattacatataaaatatctaaattttactctgctcctcccatgttttctatttgatcacatgctttgcatctttcaataattcgtatctcttaacaaagtttgtagcttcagctgttcttaccacttttgccttttaacctttatgctagctgtatttacccatcactattacagtattagagtgtttgaatttcatattgtgcttacttttactagtaagttttatactttaacatcttcatgttactaattagcatcctcttctttcaccttcaagaactccctttaacrtttcttgtaaggcaggaaagtgtccttatgctctctcagctttttttcaatctcagaaagcctttatcactcctttgtttttaagacagaatagtggaatctagaattattccttggcagttrttttctttcagaattttgagtatatcattccacttccttatggcctgcaaggtttctgttgagtaatccactgatagtcttgtggaaattccattttatgtaaccattcacttttcattggcttttttcaatacttsgtctataacttttgataatttgattgtgttatgtcttaaagtgactatctttcattaaacttatttgatttcctttsagatttctgggtgtgggtttctatttctttcccagttgttgaaagttttctgtcattatttttttgaatatattttctgtatcgttgtgtttctttctgtttttaacatggtgataatgcatacgttattccacatggtagtattccatctggatyttaagctatcttcacttttatttatttatgtgtttattttggttctcagatttggtgattttcagtaatttgacttcaagttcactaattccttcttctccttcatctagtctgctgatgaatacctctttaaaacttttccgttcagttatagtattctcaaatttgtgatttttgtttggtattttwaaaatactttctacctctttgttgaagtagttaatttgtttttgcattgctctcttggtctcagtgagtatctttatgaccattattttgaattcyttcttgagtaaaacacctatatccacttccctcaggtcaatttctggagactcatcttgttcttttgtttggagttatgatatcttgtttctttattttctttaactcacagtgtttctatgcaatagataagacaatggcctttctcagtcttatcagactggcttcatataggagaaagacctcactaatttttccagccagagattttcatgtgcctctcaagtctttgtgcggactgctgtctcttattttttgtggccccctggaggttagaatgtgccacatcttttcaggacctgggaccaacaagttaggagccaggaggtctagatgtagctgaaaatattgaagacttggctgtgtatttacttacttctattttcatagtgaaagtgaatgtgcgtgtttatctcccactctctctctgtattacaccaagtaaagaatctgtggctaatacctgtactaatattcaggctgcatgctctgatcctgaagaggtatctgcttgaaatgagtccattgtattaccagctttttgtattctgtgatgtagggcctttcaggaatgcagatctctatcatctcccagtgtgagtttgttaaggagacgatctcttgagttggagctatagaagtgatgacctttgaatgcatggctaaacttggtccaggaagaatggataaatctgaatttatcattggggcgagactcatgaagtgccaaactttggctttggctgcgggaagattattttttgtttgcgtcattagataccctgtgcaagctcgatagaggccagttcattaagtagccagtggaagtatgtgccctaagccctttcgacagagaaatggaaattgaactttctctttccttttctgcactgctccaatttggcatagcgcctggagtttttacatagcattttaagaccatctatttgctttaygatctatggagactggtatttttctaatatctgctgtgacagttaagagttttaagaggagtccttttggaggtaactgtaaaggttgtagcacttgatggatgacacaaacctttttgaggataaacaggggagctgcattttaaaaaccttttctctgcactgctcttgggcaatgaagctcctggaagtgcttacacacccatataaaacgccatttcttttttcagtggtctagatagactctggatatattttgtgccctctactcccagaactaagagytttagaatacagtccctgaatgaaagttgtaaaagttagggcactcaagtttgtgtggacaaacttgttctaagagtgattaatgtacctggatgtatcactggggtgagccacgggaaccggctagagaagtgcctgatgcaagttcattagaatccagactgcaagttttttagaattcagacctctaagtagccacaggaagaatatatcataaaacttctcgggagaaacaggggactgttttttcagccccttctctgaactgctattaaggaatgaagtttctggaagctcttcagcacttgtatcataccaccatttttcctgtgatctagagagactctcatgtgtttaatctcctctgcttccaaaattagtgaattaaaggccaaaacacaggatgctttatgtgagatccaaaaacttctccacaaggagaaactgggtttttgagattccttttctaattgtgtggtgcagtgaacaaggctggggtccatgctccattgtgttgcaacttttcttacttgttcaatgtgaatgttgtctttrttgcctgttaagtaggagtccctttactggtctttcattttctttcaggaggagttcatttatgaatagatgtttttttaggacattcttgggtggaagaagagtcaggagcttccacttctgccattttgctgacatcactccctgcctagctctttattttacccccaggaaactagagtattgcaggtatcgttaagtgctcctacacaagcaagagagaaacctgtactttaggatgctcccccaaaagctaggatgatagatgcttagttcactcttatctttcctctctgagggagaagcagtcaaaatatatyggtctctgtttactttaggggrttgcaggaggctttgaactggtttcttgatttctcataaagggaattgtttccagtatcgtcattgaatcagtgtgcctgtggggggaagggagagtggtggcttcctatactggcatcgtgctgatgtcactgccctctttcatcctcaatattgatcattttttaaatcttgatcattgtttttactttgtcctcaattttattaatattttcaaaaaccaattgtaatgcctttaaattttctccatttgctctgtattttttagttttattatgttttactgattttagctttgctaattttctcccttctctgtgtttctttgtccrttttctcttcttcactgattttactgttttcttccttctgatgacttcagttttaatttcacttttctcaatcttagggtgaaaaatgaaaacatggtcataaactatcatactttgaaaatataaaactttaaagctctattcttttaagcactgctttagctgtgtcccagaatgttacacacgtgtgtgtgtgtatgttctatgtgtcgggagacagagagagagagttcatttttatttgatttgaaatattttctcatttgtcttgtggtttgtctgttgatgattaattatatggaagtttattgtttaatttcaaaatatttgtttttttctagataagtgatttttgctggtttctaatttaattctcttgtgaaagaatactgggaaaatttcartattttgaaacactcagttttttaattgctcagcacatagtctaccttgctaacggttctatttacaaataaaaatatgcatacacactaaatgtagaattaggctatactgggtyacaatgttcttcaaatttatttgccatgtcacaaaatgttaaataatctctttcttaattgtttactatcagmaaatactttaaattaaataataatgattgtggtacacattaaaatcaatgggatacagctgaaacagagatgtatttagcattataacatgcatcagaaaaaacaaataaaaaaataaaagcaacaggtactacaatctagaaggtagacaggaatgtacacccaacaaaaatagaaggaaagaatcattcaagcataaatagttgaccattaatcttaagaaaaataaattgatgagaatgttaaaaacatgtcaaaatattgaaaaacagaaataagcaaaatacttttgataaatatgaaatactttatcataagcgaaaaaagaaaactcgacattatcaataacctttaatgaagttttrttcatccaaacrtctccmtgaattgataacaaaatgtcagacacttaaaatcattgccatgatttcctatagtacgattacataaagctttaggtgaagtagagcatacactatgataggagaaaggaaaatcaagggattatagaatgctcccagatgcttctaaactyccccgtcagtcaaacaggacatgcttcattttcatattatgaaaaaatgagatatttctgatgtatcgcagtttaacaggagcttagctgtgagtttacaaaggtgtctttatatgtgattatacaactaaagccaggctgtgcaatgcattaaactgggtgcataacatccatttaaatatccctaaacagtacaggtaagctagtaaataaaagctctaggggagtttcaagttttaaatagcacactataaatcactagtgattatatttaatgcttatattggtcaagtgtcagtaccaaattgattattaactacatataattctacttctggctaatcagattccaytggcagaaaatttgtgagtgttttaatccaatcctgatacatttgattatagatatcaatttttatttaatgcatgtaattaagagtgtgtaattccattaaaacattctaaaggctcaaaataattaaaatcmatattacataaattatgcaaatttattaaacaaagaatatatgaaaaaactacaagaaagtctatgagaatacaagccaaaagttctattgtttaatgtaactgttacacagctgaaaagtataatatttgcatacaaaaacatcataattaatatgtgataatttatgaaacagttattgatctttctatttattctattttaatcatataaattatttttcatcaaaaaktctaattttaatatttttattttttattttttattataamattaattatatttttaatattttttagtggcacaaatacaattatgcccacctccacctcagattcccaattctcacaatatgacaaccacactgaattatygggatggagaaaaagtatctgttctttgccaagaaaattatctaattcaggaaggagaagaaattacatgcaaagatggaagatggcagtcaataccactctgtgttggtcagtagtgtataatttgttttacataattctttcaaatgaggttaatattctcttgtgcttygtgtaaacaagagagaagytctttctctgtgtctattactttatcctgacaaaataaattaggacctaggcacattaatcaatcaccactctttcagttttttgaacaaaatacagccaaaatctttggaatattatgtaaatgtcagataacatttccattcatgcatattttaatccttgtgatgaacaagacatgaatgaagatgattattgaacaagaggatggtaacatagatatggtggaggaatatatctttgcgagtttctaatatgtttttgtttttaaataattttatttgttcaaattatactcactttaaaatccgaaatagtatttagttttatatttcaatttaagtattttatttgtttttaaccctttgattttcattcttcatttagaaaaaattccatgttcacaaccacctcagatagaacacggaaccattaattcatccaggtcttcacaagaaakttatgcacatgggactaaattgagttatacttgtgagggtggtttcaggatatctgaagaaaatgaaacaacatgctacatgggaaaatggagttctccacctcagtgtgaaggttaggccaatatgaatactcaatttctgtttatagtagaattcataaaaataatctcttgttatcaaagtgaggrgaataattgagattactgcatatataaaataatttatatattataccattaaaatactttttgcatgattgaatctattctatttatgttaattttatttgttcatgatagagtcactttgtattctggcattaaaaaataatatctartgaaattaaacctatctgtattattctcatgctgccataaagaactgcccaatactggataatttatacatacaaaaaaaggtttaattggctcactgttctgcatggctgaggaggtcttaggaaacttacaatcatggtggagggagaagcaaacgcatgaagacaggaaggagaagttctgaccaaagggaaaaggcccttataaaaccattagatctcatgaaaacacactcactatcctgagaacagaagcatggggataactgcccccattattcaactacttcctactgagtccctcccacaaaacatggagattatgggaagtacaattcaaattgttatttggttggagatacagtcaaatcctatcattccaccatggcctatcccaagtctatgtcctcacaattcaaaacacaatcatgccttcccaacagtcctccaaatcttaacttattccagcattaactcaaaagttcatatccaaagtctcatctgagacaaggcaagtcctctctgcttatgagcctgtaaaatcaaaagcaagttggttatttcctagacacaatgggggtacagggattgggtaaatgcttccattccaaaagggaggaaatggctgaaacaaagtggctatatgcttgatggaagtctgaaatttaayagggcagtcattaaaccttaaatttccaagattatctcctttgactccatgtctcacattcaggtcatgctgatgcaagagatgggctcccacagccttgtgcagatgtggctttgtccccctcctggttgctttcatgggctggcattgagtgtctgtggcttttccaggaacatagtgcaagctattgatggatctaccattctggggcttcaatgattgtggtcctgttctcacagctccacaaggcagtgcctcagtggggactctatgtgagggctctgaccccacatttcctttcctcaatggcctagcagaggttctccatgtgggctcccccctgcagcaaacttctgcctggacatccaggtattttcatatatcctctgcaacctagttgtaggttcccaaacctcaattcttgacttgtgtgcacccacaggcccaagactacatgtaatccaccaaggcttggggtttcamcctttgaggcaatggaccaagctgtttgttggccccttttagccacagctggagctgaagcagctgggatacagtcctgaggctgcatagagcagcagggacctgatccaggtccatcaaaccatttttccctcctgggcttctgggcctgtgatgggtgggggtgtcatgaaggcctctgacatgccccggagatatattccccattgtcttggtgattaactttggctccttattatttttgcaaatttctgcagcaggcttgaatttctccccagaaaaatgaagttttattttctattgcatttacaagctgcacattttccaaacttttatgctctgcttcctcttgagctctttgccacttagaagtttattctgccagataccctaaatcatctctctcaagttcaaagttccacagatctctaaggcagggcaatatgccaccagtctctttgcatagcaggartgacctttactccagtttcmaacaagttcctcacctcatcttcatctgtgaccamcccatcctggacttcattgtccatatcactgtgagtattttggtcaaagccattcaacaagcctytaggaagtgccaaactttcccacatcttgtcttctgagccgtccaactccctaggaagttccaaacattttaacattctcctgtcttcttctgacccctccaaatggttctaacccctgcctgttatccakttccaaagctgcttccacatttttggttatctttacagcagcaccctactctctgcagtaccaatttactgtattagtctgttatcatgctgctataaagaactacccaagactgcataatttataaaggaaagaggtgtaattgactcacaattccacatggctgggaggcctcaggaaacttacaaccctggtggaagggtaagcaaacatgtccttcttcacatgatgacaggaaggagaagtgcaaagcaaagacagaaaagctccttataaaaccatcagatctcaggagaactcacgcagtatcatgagaacagcagcagaggaawaatcgccctcatgattcaattttctcccaccaggtcccatccacaacacgtgaggattatggcaattgcaattcacgatgagatttgggtggggacacagctaaacctgttctgcaagttgtcatgtttgctttgccactatgttttaaaacttcttttacattcttcccacaatgccccttcttatttcctacaatatattatgttttacctggaatcgttaactctcaatgtgtatcttattatcactagtaagtttacagaggcattgtttaccaggcatagatgatctctttctgaaatgtattgctatttttagtttcaagtccttcttcagttggtgacagtccgatagacagacagacaccagaaggctagttttaggaaacatttgtgttacttctctgtgatgtcatagtagctcctgtattgtttattttcaaataaaactacttaatattaaaacaggcatataaaattaaatttatgagttagtgaaacctgaattcattcttttttttttaggccttccttgtaaatctccacctgakatttctcatggtgttgtagctcacatgtcagacagttatcagtatggagaagaagttaygtacaaatrttttgaaggttttggaattgatgggcctgcaattgcaaaatgcttaggagaaaaatggtctcaccctccatcatgcataagtatggtgcattgaattttattatatgtatgataaatattcttcattcaaagtgtaagtggtaccaataagaaagtaaacagggactctagaaattcataaggttttcttgaatattctggactgctgtgggaaattatagctgtagtaattaaaacatttgacattataagccaaattagttcattttcacatcatcttgtgtgaactttaagcatcctctgatgtatattctyagacttctcatctctgttcttagggcacagctgcctctactcatcaatctccacattattcaatcttctgtcagtttatcaacaatctgcctataagtacattttctgaaatattttaaaaaatcattataagtatttcacatttgatagaagcaaaaaatttggaaatgcacacacaatataggtggtgtattattccgttttcacactgctgtaaagaccttcctgagactgggtaatttataaaagaaaaaattttaattgatcacagttcctcatgactgaggaggtgtcatgaaacttaccattaccgctgaaggggaagcaggcaccttcttcacaaggtggcaggagagagaggagtgagtgaaggaggaacttctaaacagttattaaatcatcatatcttgtgagaactcactcaccatcgtgagaacagcatgtgggaaactgccaccatgatccaatcacttcccaccaggtctctctctcaacacctggagattattattcaagatgagatttgggtgaggacacaaagcctaaccatatcaggtggcaagtatggacaaaaataatgtgaacaaaaaaatgtgtaatctcaattgctacggctaccaatatttcttcagkcttctaatatcatttctatcttgtatttttaatagatttagaagaatttaatgtaattaagacaaaatggctaatatattttctcaagttataagaaaaatgttgtacagtattcattgattctayrtatcgctattttagaatccattacatgtattgtatgtaacctatttttaaagatttgcggaacaaatacatatttttcctatttcagaaacagattgtctcagtttacctagctttgaaaatgccatacccatgggagagaagaaggatktgtataaggcgggtgagcaagtgacttacaywtgtgcaacatattacaaaatggatggagccagtaatgtaacatgcattaatagcagatggacaggaaggccaacatgcagaggtactttggtgaattttcaaaatttatttatataatgtgtgggcccagcccagtggctggcgcctgtaatcccagcactttgggasgycraggtgggmrgatcamttgaggtcaggagtthgagaccagyctggccaacayggtgaaavcccrtctctactaaaaatacaaaaaaatagtggggcatggtgacatgcatctgaagtcccagctacttgggagactgaggcaggagaatcgcttgaaccagggagatgaagattgaagtgggccaagatcgtgccactgcactccacccagggtgacagagtgagattccgtctcaaaaaaataaataaacctgaaataaataaatatataagtacaatttatttatatagagtgttttgggaataaaatatagaattgtctctaacatcattaaaatggacataaattaagtttttacggcaggacaaagtagtcgtatgcctaaaaataaaaagatggaactgagtatttgatgattaatcttagctcaatagttctcaaagtgtggtcgctaaaccggtagcatcatcatctycttggagattgtttgaaatgaaaataaaattccgtaagctcattctagacatccagaatcaaaagtctcaaagtaaaaccctgaaactgttttaccaacacctccagggaattctatttacacttccgagtgagaagcattgctatagtctattcactacacatggatatgaaactctctgatgaattttgcattgttcagcataatatccttaatcattggcaattaaattatctgaggttatttttattattataggctttttaaaaaaatttttccacatctccaatttrgatcctttgattaaccattcttcctccttttaacttgggtaattttcaaaatgtgtttttaawtctttgcttattcrctaagaaaatgcctatttgwgtttatttttaagaggctaaaatgtataagcaggatgattgcaaacaaaaatctggtatcacataatctatttatgctgactttttgcattttataaattaatgttaaataaatagaactrgtaatatttgtttactcaaactcaaagagagatatccaggaaaactttcgtttacactggcttccagaagggaaaaataaaggtctatcagtgttctagcgaaggatgaagaagaaatttaaaacatcaamgcttgtacctkacaaaaaatagtttcatgtcttttcytcaatattacatttaaatttattaaaatcaacaaaatatttgatgagattgtctacttattttaaattcgtcttgaaayatawttgtaactgttatyagttgatttgctactcaaaatgaacactaggtggaaccacttcttttttttctaytcagacacytcctgtgtgaatccgcccacagtacaaaatgctyatatastgtcgagacagatgagtaaatatccatcyggtgagagagtacgttatsaatgtaggagcccttatgaaatgtttggggatgaagaagtgatgtgtttaaatggaaactggacrgaaccacctcaatgcaaaggtagagtattatatttcttttaacattttgggggagtatagcagggttaaaatatgttgatttaaacaaaatgaagtcatttttattaatagatttttcaaatgcaaataaaatgaytgatggtgcttaaaattcaattcttcytgtgaacagaacacaagtaatagggtrtattattttysagaaagattcgaccaaattgagagttggaacctgaaaaacaatactttttaagcatyacaacacttagttccttctcaggaatacgtgtaataaaagatacattatgtgcattwgacagccataagtgatgtgcattctaagatatggaataggcagttgaagagagatcatagactgtgatataaatgtgggcatcttcagtatatggattatatttaaaggtgtgtgactgactgtatttataaaaagaagtccgagcacatagtcctgggtcattctaatawaaagagatgaaataagggaaaccaaaaaaggaaattgtatyttactcacctttatgttttaaaattaatgtttttctgtattttttttttcactattttacttagactctacctatgtttattattgaagtgagtttttgtagacagcatatagttgggtcwtgtttacatatccattcatcctttcatggcctgttaactggtgcacttggaccatttacacttaaaataattattgatatataggacttaaatctctgtcgtttatttgtttctgcctgtttcctctgggtttcagtcctatttccctattcctccattccctgtarggaaattattaaggagattaatttcgattcatatgtattgttttccattctatctctttgtatagcttttctcctccttttaaaaagttgttgctctagctaatactatatatgtaataatatattactgtctactggcactgacatttaaatctacaactggaatatggaaaccttactttcatgtagatccatttacactctccacgttgtaagtataaatgccactagtattttctctgcatacattgagctccatattaaactcacttgcttcaaatatcgaacataattgaaaaaacttatgaggaaaaagatatcctgttatattgactcctctgtttatccattctatttttctattttttcaggatcctaaagtctcaagctctttcttttatctgttttattttaatttgaagaattcctttagttaatctttaggcataggtctactggagacaaattcccttggtwtccctttctctgagaatgtctgtattkaycccyttacttgtaaaagatcgtgtcactggatatcaaatttggagttgacagttctttgaacacttgaaaaccgtgccacatggwtatagatgaaaaactcascatcatttgaattgttgatcccctcgaggaaaagcatagtttttgtctagttgctttcaaggtatttttttctttttttaaagtagttttattttaatgtatattggtataaattccaatgtttttatcctctttggagttcactcagcttcttaaatataagtttataccttatggtcaaaatgggaagttttcaggcatcattttatttattcatttttccagcccaatatcctttctcttctttttctgcatcggcattattwgttgttgtatttttctgaatgtctcagttcagttttttgttttcagtttattttcagagtgggtaatttatattgctgtatgttcaagttcatggatttatttgtctgtcagctccccatgtattattaagtatattcagtgtttttaaaaaatttttgtcatacttttccattttataattcctatgggatttttcgaatatgaaataagaaacttcctttgtcatagttttctatgtttagcatgtattcattcggaaagacatttcttaatcctggtctaccataagcagcaatatttgttaatgttttatgtgttcyttcagtacggagaaaagaacttaaatatattactttcagtttaaagggttaaaatttcttccaggactcatttctttcaccagaaatcacaaaactgttgatattatatacagtgctgtgtttgcgtttgccttatttgaacttgtattttgatttgctctcacaacaaatcaagtgatgaaatgatgttttttagattctacrggaaaatgtgggccccctccacctattgacaatggggrcattacttcattcccgttgtcagtatatgctccagcttcatcagttgagtaccaatgccagaacttgtatcaacttgagggtaacaagcgaataacatgtagaaatggacaatggtcagaaccaccaaaatgcttacgtaagtactttaatattcacgtggctggaaaaatctstgtgatgagtctgatatttcactgtttgtaacaaaatactcacagattattgaacaaccattctgctgaatgcttgcctaccaaatatttctgtcagaaagtaaagtttagaaatttttctctttagggctgggtgyggtggctcacrcctgtaatcccagmactttgggaggmygaggygggcagatcacgaggtcaggagattgaggaccatcctggctaacacggtgaaaccccgtctctactaaaaatacaraataataataataaccrgcatggtgacgggcacctgtagtcccagctagtcgggagtctgaggcaggaaaatggcgggaacccgggaggcggagsttgcagtgagccgagttcgcgccactgcactccagcctgggtgacaragcgagactccgtctcaataaaaacaacaaaaaaagtaatttttmtctttatatttatattttattttaaagmatttagttgacaaataaaaatatattttsatgtttgacaatatgytgttttgatatatttatgctacaawgattaccacaaattaattagcacattcttcatcacctatgcttagcattgggtgtargtgggtgtgtgagtatgtgtgtgtgtgtttgtggtgaggacacttaaaatctgctttcttaccaattttcaaataaacaatacaatattattagctctaaatatcactagatctctatgtttgattccaagttcttattcatattatagctgaaagtttgtactctttgaccaatatcttaatcaaaagcagcaatgataagttctaaaaygcagggatcctaaaatgacaactgatgtaatgaatcattgataatacacccctaattctcatacattaaacatmraacctcattttcacatcgattaccattctaagtttattcaaatcaatatgatgtttytacatagtyggtttggayagtgttttgagaaataattcctgaaccatcatataacattctacttgaaaacctgaaagtctatgaagatttgcatactacttaatgttttatgtttactgttttttattttcagatccgtgtgtaatatcccgagaaattatggaaaattataacatagcattaaggtkgasagccaaacagaagckttattygagaacaggtgaatcagytgaatttgtgtgtaaacgkggatatcgtctttcatcacgttctcacacattgsgwacaacatgttgggatgggaaactggagtatccaacttgtgcaaaaagatagaatcaatcataaartgcacacytttattcagaactttagtattaaatcagttctyaatttmatttttwatgtattgttttactcctttttattcatacgtaaaattttggattaatttgtgaaaatgtaattataagctgagaccggtggctctcttcttaaaagcaccatattaaawcctggaaaactaacggttgtgtccagttcataaaatgtttgtggcaagaaattagacgcaatttttcagactttatttctgttcatcactcttaaatctcccaaagctttctccacagcttctgaggctcactgttttacagaaaatggaaagcatatcattgtctctgatttcaaaattatatcactttacaaagatgtaaaaaccaagtcaagtcttaactcatgttggtaatgagatataagtaattactatttatcaatacataaatgcaccaaaagtgatatcaatacataaatgcaccaaaactgatgaaatgtagatacttctacaagatgtcaatctagcacacgtgataatgcaaactaatcataaagaggagttaaaacgtaatagggtatataaatattacaacataaacatacaaaaaataaaaacacagtatcagttataacatgctcacttgcatgcactcayttgcaaacatagaaacatgatacttttgccctgatttaatgtttatagaaaaaacattgccaggaaattcaaaactatagataaatgtgtgtgtgtgtgtgtgtgtgtgtgtatacatgtatatgtatgtgagtgtgtgcgtgtgtgtgtgtgtgtatttagagatactaggggtaaaagttagggtttaattcttttgtatatatcggtatcctctgatttttctacctttaacatatatcactttggaaacaaaagcacaatttattttaaaataatgatgtctaacaagcaaggcggtgcatgttgagaatgataaagatttcatcagtaatgatcttaacatcaaatagcctcttaagtatttttggagtagaagagttttggaaatttcaatagtaaggttctgaaatgtaatttttatattcattctttttaatcagcactagttaggtaaaatcatttttgattaggaacattttaaactcataaaggaggtgaagccattatgtgaaaaataaagatatcaataatacaacacaaatattatttaatgataccttattacttcttactgtataaaatcaggtggcttatatactcaggctgtctccttgttagtgatcctgatttagataaattgcttgagttgaggaaagccagatttcaaaaatctaaaggacatttgttataattagcaacttatgttgatagtaatgttaacatttgggaatatacgtttattcctaaattgttttagtacatttgagccactataagaaattaccataaactggctagtttataaaaaatagaaatttatttcatacagttttagaggctgagattttccagcttaagataccaactgatttgatgtcttgtaagggcttgctccctgttttggtgccttcccactatggtgccttcctactatgtccttacaatgtggaaggggcaagggagttccatgactcttctttgtaaaaagactaatccaatgtattagggtggaatcctcatgacctaatcacctaaaaagtccttwcttcctgatactatcaccatagtgatgaggacgtaacacacatattttgaaagggtactactatgcacaccatagcacagcatagggataaacaaatatgttccatgtaaatggaaaccaaaagmaagcaggggggctatactaacattaactaaaattgaattttaagtcaaatctgtaaaaagaaacaaggaaggtcattatacaaaggagtcaattcacaaatagattataactattgcaaatatgtatgcactcaacatgggagcaatgaaacttataaagcaagcattaatacatctaaaggaagaaatagacaaaaatgcagtaatagtaggggacttcaataacccacattcaacaatggatagacagtctatacagaaatcaataaaaacattggacttgarctctatattagaccaaatggacctatcagacctatatagaacattccatttgacaacagtagaataaacattcttctcaagcacacaaggtataatctccaatatagatcatatgtggggccacaaaacaagtcttaaaaaattttaaaaagattgaaattacataaatttttttaacattgtcatatgaaactagaaaacaatagcagaagaaatgttaggaaattcacaaatacatggaaattaaacaacatgatcctgaacaaccaatggggcaatgaagaaattcaaagggaaatttaaaaatatcttgagaaaaacaaaaatggaaaagcaacattctaaaaaacatatggtatgcaacaaaagcagtataaagggatgtttagagatatgaatgactccatgaagatcctaataaagcaagtaactttgtatctcaggaaactagaaaatgaagaaaaaaattaacccaaagctactggaaagaaaaaaatagtaaggtacagaacagaaataaataaaacagactggaaaaataatagaggatccacaaaactagaagttggcttttgaaaatataaacaagattgacaaacctttagctgaactaaaaaagagagaaggaacaaataaaattagaaatgaaacaggaaacattgtaactgatagcacagaaatacaaaaaaccagaagagaccgctatgaacagttatatgccaacatataactgttggataacctaatggaaacaaatatattcatagacatctacaacctaccacgattactgaaacataatgaaatacaaaattaatacagaacagtaatgagtaagaaaaatgaacaagtaataaaaagtctctcatcaaaaaaacaaaacaaaacaaaaaaaactcatggcttcatgatggatggaatcctaccaaacatttaaagaatcaacactaatccttctcaaattctgtcaaaaatttaagagtgaactctcagttttattatatgaggkcaaaaatcatamtgacaccaaagccacacatggacactacaaaaaacaattataggtcaatattcttcatgaatatagaggcaaaaatgctcaacaaaatacttccaaagtgaagacaacacattaaaggaatcattcgccataatgaaaagtaatgtatatctgggatgtaaagatagtatatatacaccaatcaattactgttccacaccgaattaaaagaatgaaaagcaaaaattgtatattcatctcaatagatacagaaaaagcatttaacaaaatcaacatcctttcatgataaaaagtctcaacaaattagccataaaagaaattaccccaagacaataaaggctacatatcacaggctcacatttaacattatactcaagagtgaaaagttgaaacatttttgtctatgatcagaaaaaaaaaaaaaaacaaggaggctcgctctcaccacttatgttcaacatagtgctggaaatcctggctagagctgttaggcatggaaattggaaaagaaaacagttgtctctgtttgcagatgccatgatctcattatatacatggaaaacccaaggacttcaccaaactttgctaaaagtaataaccaattcagtaaagttgcagggtacaagatctacagacagagccagttacatttctatacactaacagcaagctattgaaataagaaattgaaaacaaacatctaatttacaatagcatcaaaaataataaaatacttgagactaaatcaaagcaaggagatgagagttctgtactctgaaaactatgaaatattgatgaaagaaattgaagaaaacacaaataaatgaaaagatgtcctgtcttcaaggatcaaaagaatcaatattataaaattgtcttcaatacctaaaactccagattccatgcaatattgtcaatattctaaacacatctttcgcagaaatggaaaaaaaattctaaaattaatatagaacaagagacaccaaatagctaaagcagtcttacaagacaaaaaaggaagagacagcacactatcatgctctctggtttcaaattacactacaaatctataataatcagaacagtttagtcctgatacaaaaaagatacatagacagaattaaaagctccgaaataaaatcatgcatatataaaggcacttccaaatattcatggaaaattgaattaaaataagaaaattttaaaactacactttatttcttaacataagctccatcaagttcaacacacttttgaaaacagtgatacaagccatttagtccatccctaaagactcgatggttctgggactatatccatgttaagcagtctttttcacataattaacygaaacaatgggtaccctttgtaagattttttaaaattaggcaaaagaaagaagtcaggagaaggcaaaccaggactttaatgtaggaatgctcaaagatttcccataaaaattctcacaaaattgtttttgtctgttgagaggaatgagcaggagcattgttctggtggaggaggactctctgatgaagttttcctgggcatttttctgctaaagctttgaaaactttctcaaaacattctcttaagaagcaaatgtttctctttggccttccagaactcaactagtaaaatgccttggccatctcataaactgttgccatgatgttttctcctgactggcctgcttttgctttcattggaccacttccacctttggtatgccattgctttgattatgttttgtattcaggatcatactgataaactcatgtttcagctcttgttacaaatctttgaagaaatgtttcaggttcttattcccacttgtttaatacactttccgttaaaaactattcccttgctggccgggcgccgtggctcacgcctgtaatcccagcactttgggaggccgaagcgtgaggatcacgaggtcaggagatcgagactatcctggctaacacggtgaaaccccgtctctactaaaaataaaaaaaaatctgcgggcgaggtggtgggcgcctgtagtcccagctactggggaggctgaggcaggagaatggcctgaacccggcaggcggagcttccagtgaactgagattgccccacagcactccagcctgggcaacggagccagactcagtctcaaaaacaaaacactcttctcttgtctactacacctcatctgggtgcaatggtcttgggtctcactgaatggaaattttgctataacattgattttcccatcagaatttgtaagatgaactaattatggtgttgactattgattctgctcttagtcatcagtcatctttaatccagatgtgagcaaaattatttttttctcacaaattagtgtggctagtctgccgctgtgggcttcatccttaacattgtcttgcctctgcctaaaatgagttatctgtttctaaatggctgatttcttttggggtgttgtccccataaatttttcaataatttcactgaagctccatgacaagtgttggttaggatgtggaaaaaaggaaacacttgtacattatgggtgggaatgtagattgttacagccattgtagaaaactatatggaggttcctcaaaatattaaacatagaactatcgyatgactcagcaattccacttctgggtgtawaaacaaagaaaacaaaatcagtatgtctaagaaatatctgcactctcatgttttttgcaggattgttcacaatagctatgatatggaaacaacttatgtttctgtcaaagatgattgaataaagaaaatgtggtgcatatatacagtggaatacattaaattctgcctttaaaaagaaggcaaatctgtcttttttaacaacattgataaacatggcagatattaagtaagtgaagtaaaccagacacagaaagacaaatgctgcatgatgtcatttatatttggaatctaaaaaacacctgagctcatagatatggagagtagaagtatagttaccaggggttgcacagtgggagaaatagagagatgtcagtcagaggatacaagttttaagacaaat

SEQ ID NO: 8823 - DNA, 23037 bp, Homo sapiens
gcaggagtgcagtggcgcaatctcggctcactgcaacctctgcctcctgggttcatgccattctccagcctcggcttcctgagtagccgggactacaggtgtctgcraccatacccagctaattttttttgtactttttttttttttttttttttttgagacggagtctcgctctgtcgcccaggctggagtgcagtggcgggatctcggctcactgraagctctgcctcccgggttcacgccattctcctgcctcagcctcccaagtagctgggactacaggcgcccgccactacgcccggctaattttttgtatttttagtagagacggggtttcaccgttttagccgggatggtctcgatctcctgacctcgtgatccgcccgcctcggcctcccaaagtgctgggattacaggcgtgagccaccgcgcccggcattttttttgtatttttagtagagacggggtttcactgtgttagccaggatggtctctgtctcctgacctcgtgatcttcctgccttggcctcccaaagtgctgggattacaggcgtaagccactgcgcccagcctttttttttttttgagacagagtttcgctcttgttgcccaggctggagtgcaatggcatgatcttggctcaccacagcctctgcctcccgggttcaagcaattctcctgcctcagcctcctgagtagctgggattacaggcatgcgccaccatgccctactaattttgtatttttagtagagacggggtttatccatgttggtcaggctggtcttgaactcctgacctgaggtgatccacccacctaataaaagtttcaaaacaaggcaatatgacaattagaaacatttatgtgcctaacggagccccaaaaataatgaaacaaaaattatcagaattgaaagtagtcagctctacaattatagttcatatttcaaccccccactttcaataatgaatagaacaggcaggcgtggtggctcacgcctgtaatcccaggactttgggaggctgaggtgggcggatcacctgaggtcaggagttcgagaccagcctggtcaagatggtgaaaccttgtctctactaaaaatacaaaaactatctgtgcatggagacaggcccctgtaatcccagctacttgggaggctgaggcatgagacttgcttgaaccaggaggtggaggttgcagtgagcctagatcacaccactgcactccatccaacctgagcaacaagagcaaactccgtctcaaaaaaaaaaaaaaaaaaaagctgcgtgcagtggctcatgcctgtaatcccagcactttgtgagaccaaggcaggagaatcacttgagcccaggagttcgagaccaagctgggtaatgtggcaaaatcccatctctatttaaaaaaattaaaagtaaatttaaaaaataaaaagaaacatctagaagaataaataggtgaatgtatcaaacagagtaagaagggtaagttgagtgccagagccctccctacagaacacagcctgcatggacctggtacaagtttgagaatctatgggatgatagagggaacaacagagatgggtagggaaacagggcctcatcaagaaacggtgttacaaaatttagtttgccttttagggggagagaggatattttgaccttacctcactctatataccaagtaaattccagagaatcaatgagtcaccaaacactgttgcaaaattattgcaatgatcactgcttgcacttaaccttttagtaatatttcctgttttgaccaaccccttgaaacgcatcgttcccaaccagcatcagacttcctagttgtctcctacttcaatggccttcccttcttagcccagggtagcagtgggtataggtagggaggctaggtgactgggtttaggaatatttcatttgggaggctgaggtgggaggatcacttgagcctaggagttcaagaccagactggggaatatagtgagaccccatctctagaaaaatgtttttaaaaattagctgggtgtgatggtgcatgcctatatagttccagctactcaggaggctggagtgggaagatggcttgagctggaaggttgaggctgcagtgagccatgatcacaccactgcattccagcctgagtgacagaaagccagaccctctcaaaaaaaaaaaagaaagagagagaaaggaagggaggaaggaaggaaggaaaggaaggagggagggaaggaaggaaggaaggaaaggaagcaggcaggccgggtgcggtggctcacacctgtaatcccagcactttgggaggccaaggtgggtggatcacctgaggttgggagtttgagaccagcctgactaacatggagaaaccccatctctactaaaaatacaaaattagctaggcgtgatggcacatgcctgtagtcccagctactcgggagactgaggcatgagcatcgcttgaacccgggaggcagaggttgctgataagattgcgccattgcactccaacctgggcaacaagagcgaaactcggtctcaaaaataaaaaaggtcgggcgtggtagctcatgcctgtaatcccagcactttggcagatcacgaggtcaagagatcgagaccatcctggccaacatggtgaaatcccatctctactaaaactacaaaaattagctgggtgtggtggcacatgccttagtcccagctacttgggagcctgaggcaggagaatcgcttgaacccaggaggcggatgttgcagtgagccaagatcatgccactgcactccagcctggcaacagagcgagactccatctcaaaaaaaaaaaaaaaagagatcacgtccaggggcggtggctcacatctgtagtcccagcactttgggaggccaaggcaggaggctcacttgagcctggagtttgagaccagcctgggccacatagtgaaatcctgtctctacaaaaaatataaaagttagctgggtatgatggtgtgcacctgtgttcccagctactcaggagcctgaggtagaaggatcacttgagccagggcatggtggcgtgtggcgtcccagctacttggaaggctgaggcaggagaattgcttgaatccaggaggctgaggttgcagtgagccaagatcacgccactgcacttcagcctgggtgacagaatgagactctgtcaaaaattagcgatgttggcatgtgcctgcagttccagctactcgggaggccgaggcaggagaattgcttgaacctgggagatggaggttgcagtgagcagagatcctgccactgcactccagcctgggtgacagaatgagactctgtctcaaaaaagaaagaaaaaaatagagatcataagactgagagaatgaaccctttgtagcaataagataccaaagtataaacaagacattaaggccatgccaggcaagagttaagccgttcaccaaagaataaactatgttctaactgctgcaaggtttttctttttctccagcagctaaacaagcactggccttgagataagcaatatagaaacaattgcagttcatccatcaccagacactgaccccacaagccataactatagctttgattgcacaagagatggattttggtgactttttcctaataagagaccactgaccagggactggcttcagttggtttatggaacctgtgcactgagtgcttttgtatccttcattttgacatatggtgctaattgtatttcttttcttttttttttttttttttgagatggagtctccctctgtagcccaggctggagtgcagtggtgcgatcttggctcactgcaacctccgcttcccggtttcaagtgattctccttcctcaccctcctgagtagctgggactacaggcatacgccaccacgcccagctaatttttgtatttttagtagagacggggttttactgtgttggccaggatggtcttgatcttctgacctcgtgagccacccacctcggcttcccaaagtgctgggattataggcgtgagccaccgcacccggcctgtaatgtatttcaatgttaagtctccaccccaaagtgaacatgggtcatatacaacacacatgtttattcagtatacttgcattaggacccccttcatgagtatctatagctcttcctgtaacctgttgaatatggtattttttgtttttgttttttcttttttgagacagagtctcgctctgtcacccaggctggagtgcagtggcgcgatctcggctcactgcaacctccgcctcccaggttcaagcgattcttctgcctcagcttcccgagtagctgggattataggcacatgccatcatgcctggcagattttttgtatttttagtagagacggggtttcaccatgttagccaggatggtctcaatctcctgaccttgtgatccgcccacctcggcctcccaaagtttgggattacaggtgtgagccaccgtgcccggccgaatatgtatgtttagccaagccattcgacataaagctcctgcctctttttaagggtctgtctctggttttgaccagaagcccacctcccagcctgcaggttgtaaccctttataagaaataaagtcagcctggcacggtggctcatgactgtaatcccagcactttgggaggctgaggtaggaggatcacttgagctcaggagtttaagatcagcctgggcaacataatgagacccccgtctccacaaaaaataaaaaaaaattagctgggtgtggtgtgagagcctgtggtcatggcatctggcatgatttttataaagatagttttattttaagtataagagtagtttttgggtaaggtgtggtggctcacccctgtaatcctagcactttgggaggctgaggtgggtggattgcttgaggccaggagtttgatatcagcctggccaacatggtaaaaaatgcaatgatcctagcccttgcctcttcctgtacttaagatactgtctgacaggattaatgattatgcttctgtgacctataaacagatgtactcttgcacccaaaccttgatgagatttatgctctaatgtaacttctgagcacatttgatgtaatttctgagcacatggagagccgccaccaccagtgtataaactgtcggaaacactgctttggagcagtctagcagaaactccctgaaaggctctcccgggttgcaattcttggtaagacttctgaatagaactaactttaaatatttaaaagcttgtttttttttttctttagttgacataacaaagcataccttagaagtctttttttttttttttttttttttttgagacggagtttcgctcttgttgcccaggctggaaatggcgcgatctcggctcaccgcaacctccgcctcccgggttcaagtgattctcctgcctcagcctctggagtagctaggattacaggcatgcgccaccacgcccgtctacttttgtatttttagtagagacggggtttctccatgtcggtcaggctggtctcaaattcccgacctcaggtgatccgcccacctcggccttccaaagtgctgggattacaggcatgagccactgcacccagccagaattctttttcctcttacagaaaaggaaaggtttcaccatgttggccaggctggtcttggactcctcgcctcaagtgatccacctgcctcggcctcccaaagtgttgggattacaggagtgagccaccgctcccggcctgtacttagttcttttaaagagaaaactggcagggcgcaaaactggccaacatggagaaaccttgtctcttctaaagaaacaaaaattaccgggcataatcccagctactcgggaggctgaggcaggagaatcgcttgaagccgggaggcggaggttgcagtgagccgagatcgcgccattgcactccagcctgggcgacagagcgagaccctgtctcagaaaataaaaaataaataaagagaaaaaaatactgactttcagcaccaacttgtggtcccaggtaagtttccacgctggtactttagccctgggctcgaacctgcggacacgctgtggctgcaactccccgcccgccagacctcagtacgcagcgcggctggtgagaaacataatgcactctgacttccacgcgtggaatggggagatggactgcacggcgggcggacctgctcgggctgatggacggcaggtggactgatgtgcgcagggactggcggcagcgcggtcagagccagtcagccaaagccaggccagcacaatagactgtcccggttcccgccaggagggcagcccagcaccaactgtacggtactgcgcctgcgccgcgaccgccaacgcgcccagtctacgcttgccggcgcaacagggccgactgcagctggaagatggcggcgtccgtggtctgtcgggccgctaccgccggggcacaagtgctattgcgcgcccgccgctcggtgaggtggtggcgagagcgcggggcttcgggacagggcttcgggaagcggacaggtgtgggctgttagcagtggcaggtcgaggtggggaggacgcggggtcagggccgtgggaaggtcacggcggagggcggggaaaggtatctcgccgcttgcctaggggcggggttcgggggtcctcctgaggacctgggaggtggggagcgatcccctgaccgagtcctcactcgcggctgttcccttccacagccggccctgctgcggacgccagccttgcggagtacggcaaccttcgctcaggcgctccagttcgtgccggagacgcaggttagcctgctggacaacggcctgcgtgtggcctccgagcagtcctctcagcccacttgcacggtgagttggggacgcttttggggagagggcctccaggttgggcctgccgtcttttccctggttggggtgtgaccttgggctcgagtcttcccgtttgtggtttgggttcggacccaggaccactcaccccgagaatggccccattccctaccctagccacgccttggcttcacgggacaatcttcactataagccaacattatttagcatataatgcccgttaagtaggcggccaaattcttttccagccttttgttaaggagcccatataagggaagtgatcatgtctcctcttataatgcggaaaatgggattcagacaccttaggtgacttgcaggggtccaggtctgtcagcctcactgcccaaggtcataatctccaggctagaccagaaatacattttaggaagcaaatgcattttaacagtacaatgaaatgtgtgattttccaaaaaatacaaattctctaaattgacacaagaaatcttgagtcacagatagatatatgaataggtgagaagattcccaagaaataattatctcctcctcctttcagcccccagccccagggccagatgtttttattgacacatccttttagttttccagaaacaatgtcctgcgatttaaattgttactaagcataggaaaaggtggcctgcaacttccttgttatatgtcacttgttatagtaaagaatgctatattacatgaactctaaaatgtgctagattgtaaggagctgtctgtgctccagygccagagaaagaatctcaagaatcttgccaattttaatcaaaggatactatagattgtaaaatgcctcttgcattccaagatgttagatgtgaaatacatgttcatctaagattgtgtgatatatggtatatgcattgacatctcttaggaaagcaaatatcacatgttctcacttatcagtgggagctaaaaaatacgtacatacagatgtagagagtggaatgatggacagtgaagacttggaaggatgaaggggtggatgatgagaaactacttaatgggtccaggcctggaggctcacacctgtaatctcagcactttgggagaccaaggcaggcggatcagctgaggccaggagttcaagaccagcctggcaaacatagtgaagccccatctctactaaaaatacaaaaattagccatgcatggcacacgcctgtaatcccagctcctggggagactgaggcaagagaatcgcttgaacccgggaggcagagattgcagtgagccgagatggagccactgcactccagcctgggtgagagagcgagagtccatctcaaaaaaaaaaaaagaaattacttaatgggtacaaggtttgttattctggtgatggataattcagaatccctgatttgactacttgtgcattctgtgcctgtaatgacatcacacttgtgggcggggcacagtggcttacaccagtaattccagggctttgagaggccaaagcaggaggatcgattgagcccaggaataagaggttgcagtgagccatgattatgtcactgtactctggcctgggtgacagagcaaggccctctgtcttaaaaaaaaaaaaaaagaaaaaaatggagtttcaggtgtggatagaaatttctaaaaattgtgcttgtaccccataaatttatacaataaaaaaaagtcttggctgggcgcagtggctcatgcctataatcccagcactttgggagaccgaggcaggcggatcacgaggtcaagagattgagaccatcctggccaacatggtgaaaccccgcctctactaaaaatacaaaaattaggctagacgcggtggctcacgcctgtaatcccagcactttgggaggccgaggcgggcgaatcacaaggtcaggagatygagaccatcctggctaacacggtgaaaccccgtctctactaaaaatacaaaaaattagccgggcgtggtggcgggcgcctgtagttccagctactcgggaggctgaggcaggagaatgccatgaacctgggaggcagagcttgcagtgagccaagatcgcaccactgcactccagcctgggtgacagagcgagactccgtctcaaaaaaaaaacacacacacacaaaaaaacaaaaattagctgggcgtggtggtgcacgcctgtagttccagctactcgggaggctgaggcgggagaatcacttgaacccaggaagcagaggttgagtgagccgacatcacaccactgcactcgtctcgtgacagagtgagactccatgtcaaaaaaaaaaaaaagtacttaggaaagtagatgtgaaaaacttaaatcagctgtgaacaaatagtaaattaaaagactagaccgtgtgaccaagtggggtgagtggtacgtrtttcttttacattttttttttttttttgagatggagtctctctgtcacccaggctggagtgcagtggcacgatcttggctcactacatcctctgcctcttgggttcaagcaattctgcctcagcctcccaagtagctaggactacaggcacgtgccaccacacctggctaatttttgtatttttagtagagacagggtttcactatattggccaggctggtctcgaactgctgacctcgtaatccacctgccttggcctcccaaagtgctgggattacaggtataagccaccgcgcccagcctgtggtgcrtgtttcacagcaaccaggaggctgtcaagaaaattaatattaccttattgggtgccaaggcaacactgtttggtgttcagagctgattaaaaacaacaacaaaaaagatattataggaacaatatttagtgtgataaaatatacagtctaaaccaatagtcccttccttaatgatgaaaggataaaatcattgccagaacaaaggcagcgtgtaatttttagaaaggaaaaaataagttgttrtttgcaaatgatatgttgtatgcttagacaaaaacaaataattaactgaaaattgagagtgaatttaaggatttgtatgctggtgagaccaggtaaatgtgcacagttagaagtgtccctgtgggtccttgatagccaatcaggagagcaatgatgtggtgtgacgagtcattcggctgcccctgttttccaagcatgactgtgtccccaagcacaggggtcctgctggggcagctctccctgactccaggattcataagtccctgcctggggcttgtactgagtcactcaggtggggtgtgagtagggggctggggagtggtttgtttgtaaccttttctggtggcttcttgaccaggtgggagtgtggattgatgttggcagccgttttgagactgagaagaataatggggcaggctactttttggagcatctggctttcaaggtgaggctcttaaagtctgtctcctctgggcttagggctgcctgttgtccctcctgaggatgaaggtcagaaaaattagcctgattatgggcctcagttgcggggctgatgtctggctggctttcctaaaaggagccacatgagcttaacctctcctgagtgggcacgtatctgatgagcccctgcctgaggccctcagagccaagaggacccaaggaaccataggagccccacttttcaccagagaagccaggcctgtggaacacacgtagatatgcacatgcattttaacaaacccacagacatgggcatgcatgcttgcttatgaaatgttcttctctggtggaatatctaggcatcccttggttgtaaagacccatgttttttaaaggaatgaaaaacatggagaaggattatggggtgggcagggccatggagccatagtaggcaacctagccagctgcaatgtcacaggtatgtgtgcagaattaacgtgtgtgtgcacaccaagagatagcaccactgttctccacacacaggactaggattgggtcccacagaggccactagcatgtattcacaaacatacagtcatgggaatggcatgggaggagtgggttctatcacttgaacacaggtgtgggcttacctgaccatggctgtcaataaggaggggggaggtgtactggtaatgatccccacagcttgttggtaagctgttacaggagctttaggcaacacttgctctggccatgcccttcagtcctggccctggctatctctgttctgttggcgcatgatgccatggttttggtcacctcaaggcctgcttagtgcttggtaaacagactctgggatctgtgtccccagagtctatgctgagggaggtacctgtggaccagtggtcctgctgggtgtttagcctctgaggacagggttcttgggttcctgtgtagctcctgattgttctggttgatatctggttccagggaacaaagaatcggcctggcagtgccctggagaaggaggtggagagcatgggggcccatcttaatgcctacagcacccgggagcacacagcttactacatcaaggcgctgtccaaggatctgccgaaaggtaacacctggaggaagaggcggggacagagggcagggaagcagaggacagctacctaggagcccctggctgaccacagaatcatattacccttagcgtatggctttgcagcygggcaactaggggtgggcagcaggagatgccaggcctggggattttgtgctgtcgttggtctgcagtggtccacctggcacctaaacatgtcctccttgcatctagctgtggagctcctgggtgacattgtgcagaactgtagtctggaagactcacagattgagaaggaacgtgatgtgatcctgcgggagatgcaggagaatgatgcatctatgcgagatgtggtctttaactacctgcatgccacagcattccagggcacacctctagcccaggctgtggaggggcccagtgagaatgtcaggtgagagttggctggccttgtggggggatgcttgctccattctggcctggccagaccctttccaggtcacatttttagttggctagctgtcggggttattttcctgagttatgcaactggagacagtttctgtatccatgtggtccagtgagtcttttttaatggctttgtgggcttcacttgaattttgggctttgttttaaggtatgttttggtgcatgtcctgacagtccaagggcgaagtgtctgggtgtcccctccatgtggtctcttgtctcctttgtggatggctccgggagctttgatgctgcccttttgagagtcccacagtgttggctcacgccttctcagagaagactatgagcctgtcctgaagtcaggcatgaggcaagggcagacaagggttgccctctgggccctggaggggtgggtggcagagacaggggaagggggttgggsagtgtgctagggcccactcttcggagaaaccatgcctctcctagtctgcctcctcagtcccattcatgcatgtaccccaactcactccagtgtggtagaggtgttgacacactgaccatatgtcttgtaggaagctgtctcgtgcagacttgaccgagtacctcagcacacattacaaggcccctcgaatggtgctggcagcagctggaggtgagtgatggaatcactgaagtcctgggtagtggggtcccagccttggttatcaaagccgaggkcctggttcccaccataggggacctttcaccccaggggactctgctcccaccctaaccttgaggggaatgaccttcctcctgtgctctctraggtgggataggattctaccctgccgccaccactgggactggttacacaggatgctgtccctctggtacaggtctgtcttagccccacctggttctaggatactgagttcatgggctggtaggggatrtaagctcctggccttgttccttgtggccttgcccttgggagagccagccattagttgtgtgttgatgcatgcctgataacaaaccaagaagtgccttgaaaggaaggcacagaagggtggggaagatttcactggggactcagagttggagtttgggggaggggctttttaaagcacctgtagtttgaacagaagcctgaaaggtggtgagtgttatttaggtggggtgtggggagctgagcgcaggggaagagcagtgtcatggtctaaggtttgctctgctgctgtgtggggtcacagtgcaggtaggctggctagagaggggctgtggcagggactgggcaggagatggcaggagcaagggggagcagtagatggactccaggtggttttatagatggaacctggttggggtctggacatgggtaaggaactgaggtcaaggtgcttcccatcttggctggtcgtggtggctcacgcctgtaatcctagcactttggaaggccgaggtgggtgaatcacctgaggtaaggagttcgagaccagcccagccaacgtgacaaaaccccgtctctggtaaaaatacaaaaattagccaggcttggtggcagttgcctataatcccagctacttggaaggctgaggcaggagaatcccttgaacccgggggacggaggttgcagcgagctgagattgtaccactgcactccggcctgcacaacagagtgaaactccatctcaaaaaaaaaaaaaaaaacaaacatgcttcccagcttatgaccttggcggctgagtgtgcagaaaagaccaataggaagagcatgaccaggggctttggagctggggaacctgggggcaagagcaatctgacgtgtgtgtcagactagcagggcttgagctcatggaaggaaggaatgaaaggccaacgcaggccgggcgcggtggctcacgcctgtaatcccagcactttgggaggccgaggcgggcggatcacaagatcaggagctcgagaccatcctggctaacacagtgaaaccccgtctctactgaaaatacaaaaaaattagccaggcgtggtggcgggcgcctatagtcccagctactcgggaggctgaggcaggagaatggcgtggacccgggaggtggagcttgcagttagctgagattgcaccactgtgctccagcctgggcaacagagcgagactccgtctcaaaaaaaaaaaaaaaggccaatgcaactggtggcaccacagagccctcctcttgtggaggtgaggaggcaagatccaaggagtcctagggtatacgtttgtaacattatttgcaaatgtccccagctctcaggggacccaagagctaatcacagccctgtaatagctcctctttctgccccctcacttgccaccccctgcagggccagcagccagaaatacttgagggagagctagagggaaaaggcaggccaggtggctttgtgcccaggagtaccagtcttgtccttgatgtaggtggaatgcatcttctcaagtgagaacccacacttggatcacatggcagcccattttgaaactctgaacgcttttgctctcctgggactgaggccatgggagctatttggccctgaggtgcctgtcctgtccacaaggcagggtctgtctgaggaggaccttctttcctcaccctgttctaatgtcacatactcctggtttctcccactaagacaggacatgggggtcctctgcctgtctgtgaatcgccccaccctgtgccttgggccctggctggtcagtaatgccactgtctgtctcagcaggagtggagcaccagcaactgttagacctcgcccagaagcacctcggtggcatcccatggacatatgcagaggacgctgtgcccactcttactccatgccrcttcactggcagtgaggtatgctgccttttgggcaggagtagtgctcagctgggggcctgtgggaggacccccatgtgcatggttatcctggtgactccagagatacctcagcagttgggaaggggttctgtggctgctgcatcacaggcacacatgttcacacacatacaccctctacccacacctgccaccttttctgttcccctggcagtctggctgttcctcagccttgtcatgtactgtttcagatccgccaccgtgatgatgctctaccttttgcccacgtggccattgcagtagagggtcctggctgggccagcccggacaatgtggccttgcaagtggccaatgccatcatcggccactatgactgcacttatggtggtggcgtggtgagtgccagcgcgagcatgggacctcgccttcagggaagagagggtgctggggctgtgtgctcctgtgcgtgggggtcacagtgtgcgttgaagacaagagggtgggtgctgaccacctatccccctggcagcacctgtccagcccactggcttcaggtgctgtggccaacaagctatgccagagtttccagaccttcagcatctgctatgcagagacgggcttgctgggtgcacactttgtctgtgaccgaatgaaaatcgatgacatgatgttcgtcctgcaagggcagtggtaagtggcagcctggtattcctaggtgggatggcggctttaaccagcacagtgggaggctgagagatgacacactggctcagaatgaataccacccacccccccactttaggatgcgcctgtgtaccagtgccacggagagtgaggtggcccggggcaaaaacatcctcagaaatgccctggtatctcatctagatggtgagtcctacagctcagcggggaggggtagagtacatcttgccagcgacagcaccaaggtggccactgctcctaactaaccaaggttagaaaggaaaactttgaagaccacgccatgccccatcaccccacccttggagatgcaggcaggtgtgagacaggtccacagcccatcactgccataataggtgaccatagaagagagggctgtgatctgagtcagcatgaggtcagggaggtccttgtcaacctgaggctggagattgtttgtgtacctgtgggtccaggattgggctgggtggacctctgagccttctctcacccttaaaggcactactcctgtgtgtgaggacatcggacgcagcctcctgacctatggccgccgcatccccctggctgaatgggaaagccggattgcggtaacatggacccctgggagaggttctggagtcttggcctggcagacacctgggaggtgtagggttggggcctggcatarcgcagcctgctcctataggcatccctggtgtcctaggcagctgtcacctgcaggggtagcatagtgggagggcagggcataggtgctgatggctgtggagatgggcggggcccatggaggtctatagcagggatcccttctgcctttcctcttttgggctggggacagctgcatgctgcctgtgggagatctctgctagttggatgatgctgactggctgaggtggtggccaggtgcccgttagccagtatgccctctgcctcaccctgcaggaggtggatgccagtgtggtacgtgagatctgctccaagtacatctatgaccagtgcccagcagtggctggatatggtaagtggcctagggggtctgctctttgtttatttcctcaggccgttctcttggcctccccttccacctctgctcccgcactgctgctcagcttacagagcagccagttaaggccccaagcagctctccccagtcccctggctgccagggagttcttgctcagaaaacctgtcccagcagttccttgactgcctgccaaggtgccttcatcaataccctgcacccgtcaggtaacgggcacctccatgtggggtggggcttcaagggccagaacatgaagggacaggctcagcacccctgggggaatgttctctcctctctttccactcaaagcctgtcttgtgctgctctgggcagcatctccgagctgggtgcggcacagggccaggtgtccctgtgcaggccaggtaccccaccctgacgctccaccctatccccacaggccccattgagcagctcccagactacaaccggatccgtagcggcatgttctggctgcgcttytaggcgggaagyctatgtaagcaagagggcagggccggggtttgtggtccccccycmaccacaaacacagcacttcggctcctctaacctgtgccacaggtgaccaccaataaaatcctctgctgagaagtgtgtcatccctcttttggcattggcatggagtccatggggcagtagatggggagcaaggacttccctctagttctgtggctcctggatcctcctgccttcccacaggctgatgtgtcctcagccaggggcaagcgtgggggttgcagctgaggccggaagtctttgatgcctacagggagctgagcccagatgtttccactcagccacttaggggagttcctcagccagctggtcccaagattgggctgtgggagtccataggaagtgtaaacccagcctttgcccctgtaggagtcccagcctggaatccctgcaggctcaggtgggaaacccctcactgtggaccttgtgccaagtcaccccctggtggtccctggtggaccagaaggggccaaggggtgtctccaaggatgcctcttgtgtgtgtttactctgcattctgggaggaggatagcctggggcatagtgttctcatttggtttctaactgctgcctggacaagcagggcaggaatcctttgcctccgctgactcaggctccaagaatagccctgagctcagtggggcccgagccccctccctctactacatttgtcccaggcaagtccagagctgctggcctgacaatcccctccccattttcctgaggcagccaggacctggtacagctcttagctacctagtccctctgttatctcttttggctctggtccccatggtgggtgcgcaggtaggctgctcctcctgcaccccccagtgcttccacagtcaggttctctgggatcccagggggaagttgaaagcgaggggcccaattttcctttgaggaagtcgctgcctggcagtcacaagcagggtgctgggacaaggtcttttagaagatggctgttcagaagtccccccagcatcgtagcttggaagtagcccaaggaacccttgtatcactatcaccctgccccactgcctttccctcaccattggttgccatacgttgccaattcggagacatttgttaagcaccttctacggcccgggactggggcattgcgcagatcattctactttgtgaacggctggagagaagatgctgggcagcgcagaaccctgacaggcccaaccctgggtgctcatggaggtgcaacacccaggcaggggaacaagtgccaagtctgttgtcaagtttgagctcctggaggatggggcttcatttctaagcccagcctggcccttagaggctacaggtgtgctggacacgagagcttgagttgctgggagtggtctggttctaagggaccttgcgtaccaagccagggactctggtctttaccctggagccatgctggggaggtgtgttggaggttactgtgaagagaagtgacttggtcagagttgagattcagcatggggactctcaggccatatttctgtatcagtcttggtgagctgtgctgtggcagaacagaggtcatggccacacgaactggagccagctgtaggggacacaaagaggactacattcccagcagggctgggagacgcggaggcacgagtgggttggaggagggtaatcttccatagtccagtgaggagtttggtggtgtccagggtacagtgggatgtgtggggctgggacctgataaagaggccctggttggaaacagatggggtgaggtagtgactgaggccagggaaggaaatgttcagggaaagcttgggagggagaaggatgtgctctgggggctccaccgccctgatggggttgcaggtaggcactggcctcgggctgtgccctaggctgtgttcctcccaggaggccagagctggggcttcagagggccacactcctgctcgtgagtctcatagaagctccagacgtggagtcattccaaccttactcctaccttctcaacagcctctcccagcaccctttgagagaccctctcacagcagcctgtcctttcttttggaggcacctcaattctgatgaggtttgcctgagcacccaccctcccagctgggcctcctgtctcccctaagactggcccacgtgtgcacatatgtctgtaccgtactgtccatgccactggcctgctcttgcccgccctggctgcacgggaggaggtgacagtcttagggggaaggggctgcctgtgtgataacatacctggttctctgcagccccccacctggagcacaccttgcagggatggggggtcctgggacatggctgaggagaccctgaccttggaataaggtcatagcactatgccccaggatagtttggggggtcagtaataagggatagagccccagccttccttgggcaataggaaagcaggcagcatggatggtcttcactgcctccagctctggccacaccagagtcctcgggctgtggaggagtccagccagtgctgtccccatatctccctgtggatcccaggggaggctgtggggccgggcatattagaaggggcccagcagccttggtgagtatagatgtgctttctgggctgcccagagttattcaggattagcaggaaaaaaagggggagcaggacccagatgggggcctgcccttcttagcagtgcctctctgccttagtgtcacccatctaatggagagatatgcatatacagagccccacctccttcggacagtggccctggcgtggtgtgtgttggaggactgtccacagcctcagaagcgaagctgggggagggtgtgaagtcagcctgggtaaggggacaggagtaaggtagggggcagttatgaagctggaagctacaggtaccatgagggcagtgaggaaaggaggaaggggcccaaggggacctcggcctggtaggggagatgggtggcagggacctacaagaaaagtagatggaaggagaggatgcctgtgggtgaggacatgtaggtagggggacctggcctggggcatggagggctcgattcctgagagatgagctgtcactgtgggtggtcccgccctccacagatgggcggccccctccctgcaggcacagctggattgcatctgcctgtgacatggtaggggatgtgggacactgggatgtatgcataagcatgacacaggttctctcctccttccggcttatcccctacaaagagggggtgagttacttggatccaggccaaggggaccttggtttccctaagaccggcccagagtcactcatttgccagggcttcttgcctgtcaaggagatccgggtggggcccaggaggcccaccagacagatggctgaatcacaggagtggccggcgggacccatggcctgagggcttgtctgggcacccccactggattgggggtgagtcatccccaactgcagccccaccccccacggcgctgctgccttgtggctctgcaggaacctgtccactcctcagcctggtcactgtgattgacctaaagcagccaagacctgtgaccttagatggagttaggggtactccctcagcatctgcccatgcagaaccttctgggaaattcccagaagccacggggggtcggggggtttatagttaagtgcgtcatatcgtttgtctgggggaggggtggggggggcggcgacctctcagggatatgggtgagggcgggtgcctgggttcccgcctgccgctccgccccccgagatcagggacttttctctgctctgcccgagagactgcagcggcggcggcgggagcgggcggacgcgcaggcaagaccaggactcgggctggaggggcgctgggctcggacctgccaaggccacgggggwgcaagggacagaggcgggggtcctagctgacggcttttactgcctaggatgacgctgcggcttctggtggccgcgctctgcgccgggatcctggcagaggcsccccgagtgcgagcccagcacagggagagaggtgggcaccgcaagggaggacccggcccggggcactgcaccgtgccaccctccgctccactcggccttcatccccaacaccccccgcccacaacccagccaactccacgacgccccgcggattcctcctaattctgggactccccgaaccctccgcgatcggtgctgggttccctaaaccgcctcctatcctgttcctacccaaattctggctccctggatgcgtgcggggtcccctgccttatgccaatccacgccggcccctagaggctgacctcagtcccaagtccacacccgtgctggcgactctccctcccccgcacacccccaaccctccgcgggagtctgctctgggacccaccgagctcaactccctccaaggccctcaggctcaggccgattcggccctggtttgcataagatgaggcctactctccccaccatcccaagtcccagtgaggccaccgtgcgggtaggcgggtggttggcctcccagaagaggccctgatctctcctgcccgccccagtgacctgcacgcgcctttacgccgctgacattgtgttcttactggatggctcctcatccattggccgcagcaatttccgcgaggtccgcagctttctcgaagggctggtgctgcctttctctggagcagccagtgcacagggtgtgcgctttgccacagtgcagtacagcgatgacccacggtgagtaggggccctgggggctggggaccacgagatccccaccaagactccttccccagagagggaggagaccctggaaaccccaggccaggtctttgcagaaacaagttttggggaacctagagaccccctagccaggacctcctttggagacagaggtaaggattccctaggtagaaccttcgtgccctgaggcacctccaggctactgcaagacaggaaggtgcaagacagtgaggctgtgttttctgatctggagatggggagcccaggagggggcccccacgcctgttggattctccacgttctagccctctaacccttgcagccgttcaccagaggtgctccatctggccagcatccactttcctacatctggacccctcctcctgcaattatttaattaagcagcatcttgttccccacagactgtgagcccctaagggctccttcaggtctgcccaggcccacctgcagatggtgcacaaaggagcccctggggagtttgttaacctgggggttccagaggcaagtgggtgtggagaatgacagaacgaagggacccctcaagagagcctgatacccgtaaccctcaccctagaggcctcctcaaggccagggccagaagagatcctgagtcctagcctgttgccacccctaccctccaacaggacagagttcggcctggatgcacttggctctgggggtgatgtgatccgcgccatccgtgagcttagctacaaggggggcaacactcgcacaggggctgcaattctccatgtggctgaccatgtcttcctgccccagctggcccgacctggtgtccccaaggtgatccctacccctaccatgcctcccaagatgaccccaaatgaagtgtccaggggaaccgtgatttgacccctgcacctgtcccaggtctgcatcctgatcacagacgggaagtcccaggacctggtggacacagctgcccaaaggctgaaggggcagggggtcaagctatttgctgtgggtaaggaccgagcaggagtgacaggtcagctggggggtgggggcagtcagagagcatgtgggtgactgagtcctgatgggtcgtcacttcagggatcaagaatgctgaccctgaggagctgaagcgagttgcctcacagcccaccagtgacttcttcttcttcgtcaatgacttcagcatcttgaggacactactgcccctcgtttcccggagagtgtgcacgactgctggtggcgtgcctgtgacccgacctcgtgagttcctgcccacacggtgtaccctgacctagaccccggaccccaatccccacttggcagtgctgattccatcctatgtgctcctgaccccgacccc

SEQ ID NO: 8824 - DNA, 32572 bp, Homo sapiens
aaactcagatcatactcctggcccatttaagagatggttatcaaattccaattaaatagagaagtgggtatatttcaaagtgtatcgtacagttcttgtgtaatcaccctcctgttcctccctgaaaatctggcaggtgtatggggtggtggccacgaggctgcagggacatttgcccaggatgaaacagttcccagtgaaagggtcatgttggtcagggttcagcccctctcaaaacccttctgcctggggtaaagcagaaaagtccgccagcaatccgacagcacgccttcttagccacgggactgtggctgagcagtgggcttaggccccttccctctaagtgttaccaataatcctgcactgggatggattcttaacagaggtggggattaacagagctggagctctggaccagcaatctcagttcctctgatagtgagcgaagaattgcagactaacaccaaaatgcaagctcaaggcaaagtgtattgaagcacagtaatatactctcagagggagagcggaatgatttctgcgaagtgaaataagcccctctttacagggtttaaggtgcttttatggggtttgtggggaggagtcaaggtttgggttgtgtctgagtaacaggatgatgtcatttgattggcagtttatggttatataactaaaattaaactggcatggttttacccatcatttataaagaaaagcccactctggggaaaggagggtacaaccacatgtaaattttattataatgatggtataatgaacttggggtgacctgagggcatgtttttgtgttactgggcatgtgcccctttaggagacttccacctgtgccttactttctctttctttgggatgtgctggccacagactttaccaaaaactccatccattaggatggcattaggacggttctggggctaaacttaggtgggccaggggctgtttcactgtcagcctttctactctcttttcttacccactcctagctgctaatgtctatttaactacctaatatttccccctttagagaaaaaaagccaaatttttgggtagatcggtgacaattaatctggctacttcctgctgacaagaggcagtggtaataattgggttctcttttttgctctcttgtagctggtaggttgggcagagaaaagtggtggccatccaaggggcccacgtagatatcagacatggttgagacctcgcggtaaccttgtgtagaatcatttggagttttatggattctaggtgggaagaaacaaaacaaccttgtaaatcaaatgagcatcgtttgaaagctataagttgtataaagctgttttaggaccaagaaagggggctaaccaggaaaaccaggaccagttgttaaatttccaccagtcaaagcctcctgaaactctgttttccattaacttgttggccctgtctgtaatttttttaagttggtttgcactttacctgattggttgatgaaaacagcaatgtttatcaagtgttgcacaagctcccccttgattggctgtgagcaaattaaaagctcatcaatttcataagactatgcttgctaatgaagcaatttgttctgaaagggtattgacctggttagttagattaataatttgttgagtaatttttaagaagagtttctgggcagtaaaaatggagttaaggaggtcctccagttcccgtgccaataccagccagaacgccaattatagtcagtgctgttaaaactcctctttcagttttaccagattgagcgtgtatagggaggggaatgctatcgataagagtgagtttggggatgatgtaaactagggccaaatccccgtttaattagcagacaagcagagatatgccttgtttctatacaaaaatgtgatttgtcatgttaagacaaatatcaacagtgatactaaagtagggtttttccatgctgtgtaagtctgctttaataccctcagaagtggaagtcaaggctagttcatgtaatgggggaacacaggcagtacttgacagaatgaaagaggaatcaaaagcccaattagaggaaggagtgatgggatcccaaccaatattgtgaaattatggggagctgcagttttttgcaatgattttgcccgaagttgtgagactgaaaccagaagttgttatgtttaaaatgatattctggtgtgggtctggggaaaagggtagatccagaatagctggcttctttccacatagtggttctgttggggggcttgggaaatgaataaaacacaaagaagaattagaatatcaggtatgtttgcattttttgttgtcagtgactaagctgacacataattgggtggaaaatagggtacaagtgtgattgcaagccttggaaatattaggaaaaaatccaagtaatggcctcatcctcaatgaagatagaagacaaaggagtgcttagtcagatagtattacagatagacgacaggtcctcggaggttgtaacaggtttgttggtatagacttttaaggagtatgcaattgactgtgggctcgaccctaggattgacagcttattctggtcggttaacagaagtgggggctggaaatgtttctgattgattccactcagaagcaggaatggaaatggctgatagacctctgctagggaaggtgtaaacacagattcaacagtttctgtgatgttgtgcagtccgttgatgttgtgtttaaacaaggttttaaaacttctttgatggtagctaaatatgggtgttggaaaaaaacattaggagaaatgattgcaagggttaatctagtttaaaaagcaaaaatattggttactgcatttaaaacagctattttagcataaaaaattatttcacccattcaggaggaggcaattgaactgcaaatatatgagaataactataacaatccaacttaaagctaatatttaaaaaaaggcactagggaaagtcagtgggcattacttattttttggcagtcttttaaagagaggcttgaggtccactaaagtctcacaagtgtatttgtctgtggagacatcatcagtttgggcagccctctgtggttttacataggagtgtggatgcagctggcaatccagaatacacagcactgagatcaaggtagtctcgacatcccaatatccttgaccattaccaggagagagtgtcccctgctctttagatggaggctccgcctcccctggggcagtctgtgtgtctctcaagttgtacctatgtgtggaccatggctgtgcccagcatggagaccccttcctacagtgggtactacagccttgctgaaaacatttgtcccctagattctgaataaaagtggttagaaagaaagaaaagaaatgaagctctgttcaaaagaaaaaggaaaaaaaattgcaaaacgatcttcagaagctgtgctgctgcctatggcagtgtggcagggagggggcctcgggtggggtgagtgcccaaaagggtgggcraggacgatttggggagttctccaaaggttatgacccactatgggcctacccttcgttcccggctgtaaacctctaaacttagcatttatccaagctatcccatgatctgaatcccaatcggctctcttaatcagtaattttaaaaattgcatccagccaaaatgcccagtctaaagggagttgagggtgattcctggctctgtggccagagcataagaaaccattttgcctctcaaagcttccctgggctgttaacaagctctgggcttcaatggccactacaacctaatgaagttgtttaatcacgttaaacagctaattaaacctaaatccagagaagatttctctaagcccttctctaaaagttattggtggcatgttgggggatataccccctctctaatgcagcaaatacaacactcattgcaacttctcttagccaagcagcgaaacatagcacaaacatcttgacccaaagcgaaaggaagcattttagcaaaatatgtttcagttccccaagctaaaatcaagcacatattaaaagccatgctgaacgtaaatcatccaggtcacagcactaagatattaccaggaattctgcgctgggatggatcctttaactgaggagattaacagagctggagttctggaccagtaatctcagttcttctgagagtgagcaaacaattgcaggctaactccaaaatgcaagctcaaagcaaagtgtattgaagcacagttagacactctcagagggacagtgggctaatttctgtgaagtgaagtcagcccctctatatagagtttaaggtgcttctgtgcggtttgtggagagaagttgaggttggggctgtgtctgagtaaaggacgatgtcatctgattggcagtttatggttatataactaaaattaggcaatgcatgtttttacccataattttcacagaaaagcccactctggggcttttgtataataaaaccacattttattataatgatggtataatgaacttggggtgacctgagggcacagtttcatgttactgggcatgtgcccctttagggaatttccacctgtgccctagtttctctttcttcaggatgtgctggccacaaactataccaccaacttcatcagttaggggggtcttagaatggctctggggctgaacttaggtgggccaggagctgttgcagtgacaggctttctgctctcttttctcctcccagctgctaatgtctacttaactgcctgttgggagctgaaaaggccaaagggattgtgaccaactcagcatttcactggaggctatatgatcaaacagcaaactgtttatcatgaatgcgggatgtgggtaaactcacactgcacccgccgccagaaggtttcctgagggccatcactccctggtgctgggctccttgaagttatctgttgggatatctagcacctattatttgaaggatgcagtcttgcaagcctgctgtgaaccaaacggctgactgacaattacctgacaatcaccccccacctttttctcgtcatctcttttacctaataaactcagagagcttgaaaagctcagagcccttgttcactagaagcaaggaaccccctgaccccttcttcctaatatactcttttgtctttgtcttttactcccacatccaccccccactttgttcagtcaacctgggactgtggccaattacaacagcctaacaaaagtgccacaggagtggaacatggggcagtgggctctgctgaagaggatgctagggggcttctcaggggaggaaatgctagatttgcattctgatagaggagcgtgacttttccaggtgaaggtagcaggtgctcctggcagaagaacccacataaggaagtgtccagaagccacacaggtatggcgttcgacaagagcaggtctggaacggtggctcatgctgaggcaggaggatcatttgaggccagagtttgaaaccaacctggtaaaaatagtaagatttcaccccttcaaaatcattttttaaaagtagccaggccgagtggctcatgcttgtagtcccagctactcaggaggttcatttgaaccctggaatttgaggctacagtgagctattattgtgccaccgcactccagcctgggtgacagagccagaccccatctcaaaaacaaaacaaaacaaaacaacaaaataaccccaacagcaatacaatcaatatgcaataagcgtccacccggcatgtgtgatggactgtggtaatgctgatggcatggagggagtgaggtgggcatctggggagtgtggtgttattgggggtggggagtaatctggagggtctcatagtctttcagtggtaggtctttcttcctgaagacacagcaaacccccaaccctaagtatgggaggcaggtgggttggccaagaaggacgtctggggctgctcttggatcagcaggagggtgggaccaagggtgctgctggaccaaggatgggactgggccaagggtggggctgggaagcatcctgttttgcatgtttgatcaggagctgctgccaagttgtgactttcactttcccttttgggttccagggtatatctcagagmctggagaacgtgtctggttattatgcagatgcacggctggaggtgggatccacayagctcagaacagctggatcttgctcacactctttcaagagaagcttccttggtaagttaggggtggtctgaccttccccatctccccatcctcacagcagctctataagagaagggtcattcaccttttgtagatgagctcagagaggttaggtaactgactgaggtcacatctcggtccatggcagagcctgaatttgcacccaggttttagctggacttctccctccctctctctgggcccccaaacagtagagacagaggcagaatcagctcagctgggttcacaaagcttcctagggctcagctctagttccagcctgcgtgagacatggcccggtgaccccagaaggaaggcagatgttgggactgtccattcctttagaatatttggaggaaccagagaaggtggaggacaggaggtgatccagagcctggcctgtccttcttgtggcctggccaccctgaggctggccccagggtgctgctgctgaggcccgatggggacagaggatttcctttgagatacaaggaacctggctgggcgcggtggctcatgcctgtaatcccagcactttgagaggccgagacgggtagatcacttgaggttaggagttcgagacctgcctggccaatatggagaaaccctgcctctactaaaaatacaaaaaattagctgggcgtggtggcacaagccagtaatcccagctacttgggaggctgaggcatgagaatcacttgaacccaggtgatgaaggttgcagtgagtcgagatcgcaccagtcactccagcctgagtgcactcctgacagagtgagactctgtctcaaaaaaaaaaaagagagagagagcgaaaagagataacaaggaacccagaggttgtttcacccaccctgactctgagcacctacttgagccaggccctgtgggtaaactgaggccatgggagatgagtgactcgctgagggtcccatrtcaggaagttgagcaggtagatcacaggactccatgtccctgacactcacctggttccttttcaggcctctgggtgatagagaagaaagaagctgtgctgttccctagtgggaaagatggcccagacaggggcagtgagaacggcatgttgcagaatggtgtctgccacatgatcccagcttgacaatcatgagattaaaagtcaaactgtggaagcgtgagcataactgtgggagcgtgagcttagccctctgtgtttgtagaagcagaaacaaacctggaagattttggattattaacattatactttcttgcttcaatstcagagtcaggaggtcaggtgttgaccttccccctgccctccaagaggtgtgtgacactggggaagtcacttcccctctctgagcctcagggtttttcacctgccwkagggggttaggatgccctaccctgctgacycccagcaggctgctgaccccatctggggtgaggtgggaggcggggcagtgcgagtcaggggaaagttgacattgcagcccagatgcctgcaggggctgcaggaaagtggggagagctggaggcctgcatgggcttctcagatccaggtgatgcccagcaggtgagagggtgggcctggctcctcagagctcagatgacggaacatttgctataaactcaggtgcaattacatttgacatgctggcaaccaaataaaaggcaaaccttgcatatgccacacacacactcacaaattcacacacacacacacacacacacacgcacactcacacctgctattcagatttcacttcatggagccctgtgtttctcacctctgtgtcgtggcctcgaagggtctttgattctgtgcagcttcttttcctcctcatttctttaagggaggcatcgcattcattagtcttttttttctgayggagtcttgctctgtcgcccaggctggagtgcaagtagcaccatcggctcactgcaccctccgcctcctgggttcaagtgattctccagctcaccctcctgagtagctgggactacagaggcgtgccaccacgcccggctaatttttagtatttttagtagagacggggtttcaccatgttagccaggatgttctcgatctcctgaccttgtgatccacccacctccgccacccaaagtgctgggattacaggcatgagccaccgtgccagrcgcattccttagtcttaatgggcatagtgttagggacccgcctactccctatggcaggagatttagtgatttctccctttttggtgatagaaacaacgctgcatggcaccctctaaagcccctgtccctgcacacttgccctctgctccctggaggctgagacctaggagtgggtgctgtgccatgacgtgggggcactttgtaaagtgtgctgagtatcgctgacgatcctccaggacaccagaacctttcacactccatcaacagtgaaggggcttgtgccacctttacctccctaacagtggacattattagtcactttaggtttggcttatctaatgtttcaaaaacgtatgtctctgtgatcacttacatatatggttcaaaagtgagcttgagtgccttttcatatggttaacgttaatttctatttcttcagatcctatcttttacccatttttaaattttatttatttatttatttatttatgagatggagtctggctttgttgcccaggctgaagtgcagtggcgcaatctcagctcactgcaacctccacctccggggttcaagcaattctcctgtctcagcctcccaagtagctaggactacaggcgcgtgcctccacacctggcaaattttgatatttttagtagagtcagagtttcaccatattggtcaggctggtctcgaactcctgacctcaggtgatccacccgccttggcctgccaaagtgctgggattacaggtatgagccaccgcacctggctatatttttagaaacttgatttcagtcttttcatgttgatttgagcatttcttgtggattgtggacagttacctttgctttaagtattgcaaaccgtgcttcctattctttcattttattctggctcttgaatgatgttctttctaatttttaatttgtaagaggtaaaactctattcaattttccctttaagtcttctgggaattgagttttgattcgaaaggtcttcccaactcaacattgtttttaacatttcttctagtatagttttaattttttctttctggggtacacttagatccctttgggattgatttacttatttttggagaagaatttgtttcttcttcttttaaatgtaggacctatttcatgggtacctactacagacaaagaagaacaagacttttttgtgtgtattctaaggcacaacaagtgcaggaaggaaatgacctctttcccgtaaaagtccctggcagtagttggttgctgcataagagtgtcatggacccggagggagctgggcccagatgcaggcctgggccattgccgtgggggaggggaggcttggaaaccatggctatgattcagaggttagctggctcgcgtgtttttagaaatttcttttttctttcycctcgtacaaaagtaataagactggggaggacacgggagaaaataaatggaaactcagaaacctgatagagccaccaaaagtacatgaaatcagagtcatggtcttatttgttcttccccaaaaagagatgagcatctagatagcaaggaaaaacattcaatccctcaactgaaagtgaaactgaagctgggccatgttgtccagaggctggttgcttttagtccaagtgctgcctcccacacctcggatttcagccaggctgtgccacggagggcagaggccacccaggtcagtcataggggatgcagctgggaacaccgcagggtccctgccggatgctcagagtttaacggggagacagaggcccaaagagccacacagaggtagagctgcccccggaaagcagagtgctcagggagcctggggagggctgggggacgctgcagggtccaggcagctttggctgagcctctgaggatgggtgacttgcacatggtggggaaggtgggggaggcattccaaggggagggagcagcctgagcaaaggcctgaggctgggaatgggagtggggggagtagatgggctctgggaggcagggaagcagggcgtcagtgtgtacctggacccaaggtgactgtgtgggcagggagcagtgaggaaagtaggagcccgtgtgcccagttaaggggttgaacttgaccctggcaggtcattaaagattcctcaggagacctaggtattgtggctcagggctgtaattcccgtgctaatgcacgraggctaatgcaggaggatccctcgaacccaggagttcaggacaagcctgggcagcatagcacraccccatctctgcaaaaatgaaaataaaaagattgactgacatagtgatgcacttgtagttcccactactcagaaggatgaggcaggaggatcgattgatcctagaacgtcaacactacagtgagttatggtggtgccactgcgttccagcctgggtaacagagcaaaaaaaaaaaatattgaaaataaaaataaagattcctcaggaggagcacggtgtcttcacccctctctccctctctctctgcctaaggaggaggccccacagccacttgcagggagctgctttgctgagagtctctgtcctctgcatctggagagcttggctcagagctgaggcaggagggagggctccctgtctgggcctcctccaggaactaaagtccctttccgggaattgaccaaactgcaggcttgcccagrgaggacatgctgtgtcctagttcagctcgaggggcagtatccagcttcaaccctcagcggatgccccagacaagattccgagccaggccaacaacgcctaaggaggacgagaccctgggtgtagctcatcagaggtgtcaggtgtggtctgaggccccagctctctctgccctcctgctcctctgctctgtgctggctcctggtccttatggctcatgatgttgagacagctgccctggcctagggggtcacacactgaacaaagcaggaagaaggggaaggggagccctccttctatcacccttatcccttacagcaagaagcacccagaaacccctcagcacactcccctagtgcctctattggcctcactgtcaccatggttgcatgggggccccagacaatagacacctggatgcaagatccctaagacagaggcaggaaataggaagagggaggtgagaggctttcgatgaggatgcttctacacatgaccttgagratgaaaacgcatcagggggtcccgggaaccactgcgttgttaacataaagtctgggagcaaagaccagcggctggaatggatgtgcctgggagccagctgaaacagatgcagccgaagccacagtaaagaagaaagagataggggcctgcttggagccaacccctacctttgaggggcctgacagggccacctcacagctgcctgggcttgttgttgcctcctcactacagaaaccatggaagtctctagagtcartgtttccaggctggggctgccagatcactcctgtaggtggttgaaccagttgagttcattcttctcagtgagggggacacaggtggaggtccatcggcacctccataaggggtgcgagaaggaacctgttagaatatctgggttctggctgggtgattggcaggagggcctatgaaatggagcccactctggattgggtgttgcagaaagtggggggcaagtctaccagtgggtatctcagcaaatctcatctagagagagggagaccaggaagaggttagagttgacttggtgtagaaaaaacaggcattctatttagccaggagagggagtgtttggtattttgtgggtggagcagagactcagtttctgtctatacttagacagtattatgaagtctaattgctctgtctcatttgctcacaatctcagagtcaccctgtgtgtggttactattctgtgacattatttctgtccataggagaataacacagcccttctgggagtccacgccagcttccaaatgtctgtggcagctcttccttcattctcaacacttacgaacaggaacataaataaatagaaggaaaaatatccatttatattaagatgctcttcttgttaaaaccaattaacaattaaacattctctgttacgataagtctttgcatttcaagtaccctgttttagccttttctgtatacttttctcaaatgttctcacttgaatgttagtatcaacccaaggcctttcacagattcatcttggaccaagtaaacatgatcataataatcacaatcaattattactrttgaatataagcggtataaaccaaaagtaagattctaagcctccccctcatttmaaggacttcctcctcagccrgggctcttaaaatttaacctgaaagactggttcaggccrtgaagggaaatgggggtcagacatgcttcattatgcctctctggcattaatatcaacacaggctttcagtctaataagaaacattttacagcctgtttctctgtgaagcctgctagctgaaagcttcatctgcaggataaaactttggtctccacaacctcttatcrcaactcaaacattccttcctattgatctccggtctttrgacaaactcaaccaattgtcaaccagaaaacgtttcaatttacctgtagcctggaaacgcccactttgagttgtcccgcctttctagaccaaaccgatgtatttctcaagtgtacttrattgatgtctcatgctccctaagtgtataaaatcaagctacaccccaaccaccttgggcacatgtcatcaggacttcctgaggctgtgtcacaggcatrcgtcctcaaccttggcaaaataaactttctaaattaactgacaccwgtctcagattttccgggttcacagcggttgggactgaccagtgggcatccctttgaacactgctctgaacatctttggaagcgtccttgctttctggggtaacacatatcacagtctggggaatttggttccccacaagacgtcttggttcctttgggtggaaaagaagcccgtatgttgagtggcaaggtgccactggaaattatactgattcaagataggagttcactctgattatgctgttaatattaacagtttaacataaaatgacaacatccgtacttttcttagcagcttggttaccccagccaccgaggtttctctgaagctgacatttctcccatcaggaggcaggtgtatttctctttggcacttgctcacacttctccatcaactttaaggtggtggcaccacaatccaaaccattattgaggttagcagttactaactactataaagtaacttctgttttgttaaaatttaaaaaaatcaattaataagtgtatacggttcagacaaatcatttaataaagagggctccactcactcccttcccaattaaaagcagctaattttgatgttcagattttcctttttttwttttctgagacagaatttcactcttgttgcccaggctggagtgcaatgtagctatcttggctcaccacaaactccacctcctgggttcaagcgattctcctgcctcagcctcctgagtagctgagataacaggcatgcaccaccatgcccggctaattttttcatttttttagtagagacagagttgctccatgttggtcaggctgctctcgaactcccaacctsaggtgatccacccacctcagcttcctaaagtgctgggattacagatgtgaaccagtgtgcctagccagcttttctttagggagtaaatcattttctttacataatattcttatgctagcagatgaaatagagtgagagtgcatgctctggagattgggcacttgagtttggcttctggctgtcactagctaggggctccaggtgaattacttaacttctccaagctttagttttcccctcagaactattaagatgataacagtgcctacgtaggatggttgttgtgagaactaaacgtgagtttatttaactttatttcttatgcccttaactgtagccagtatttcttgactcttcactttacaaaatggccatattaatcctccccctccttccttcagtgtttcacctcccacctttaccatggaacattaattatactgactggtaacaagtagatttagttctcatatgtaaatgttctgttttgttctaaaagttaaaagttaaccaagtgtttacattttggtgacgytttaaatcttgcttactgttgagctgagttgtacaatatggttgcacatgttttgctgcacggctttagtttttcctgatgtttctaattgcctttgttttttccccctcttgtactgtttgccttcatgatttcctcagtttttctcaaactgtgaattatatgcaatgttctatcgagtcccctttccctacagagccctttccttcttattctatcctggactggttgctttctaggcctgctgcatgcccagctgtgatccttgcatttccttctccctgggttgatttttctctttcacgtctttttctctcttggttttccttatcccctctccatgagtgtgcgtgcacacacacacacacactcacattcttcctcctctcagcctccacagctcattctcaagtaactttcttttctgttatttacttgtttttcttttaacagagacagggtcttgctctgtgacctcttgggctcaagagattctccccagtcagcttccagagtagttgggactagaggcatgcatcaccacacctggttcatttttgtattctttgtaatgatggggtgtcactatgtggcccatactggtctagaactcctggactcaaagaattctcctgcttaccctcccaaagtatggggttataggcatgagccaccatgctcagactcaagtagctttctatgtaattattatgtatggtaactttcttattctatatctagctctgtttttgtttttgtttttttctttttctgtcatccttttagttgattttctggaaagcttccttgcctatctttttgaatcttgtcctagagttgtttattttctcaatcaccttttaattctcaagaagtcttttttgttccatcatctttgttccttttcagtacataatgttctcatttatgaataaaacatttttatgtccctgaggacatgggtttgagtttttaaaaattattttctattttcgcaatcatccatttcttctggactcattttttacttgttatcttgaccttttccccattttttgtctttctgctttatctgatcctagatctattcatattaaagaaaggggcaggtccactggcagtcttccctgtagagtgatgaaatgagaactccttggcatcaggatacaaagatattatttctggggcctttagatgcagttatgaagtctctaattttttccattggtgtagactcacggctactgtgaatcctgtatgggtcgtggggctggtgaacttctcccctctctgaggctctgcttagcaggcaattcttggctgaatgtgctcttggtgttgctgtggattgcagatccctttacccctctctattcagttgtcacttcttcagccagttctgtcttccaaatatctgttgaagtctctgatctcctgttttcctcattcaaattttcatatgtatatattttttgagacagagtcccagtctgtcaccagggtggagtgcagtgacccaatctcggctcactgcaacttctgcctcctgggttcaagcgattctcctgcctcagcctcccgggtaactgggattacaggcacacgccaccacgcccagctaatttgtgtgtgtgtgtgtgtgtgcatttttagtagagacagggtttcactatgttggccagcatggtcttgatctcctgacctcgtgatccacctgcctcggtctcccaaattgctgggattaaggcgtgagccaccacaactggtccattcacattttcattggcagcagagggtgcagaggcagtgtgtgtgttcttgagtccgtctggttgggtgggaacccagtctttacaccttagtagatttctgagattgggcaagtcgctgaacatctgtttcagttttcttatctgaaaatggaaatacaaatggtacccacttaataggctcttggaagaggactgtgagttattatttatamcatcttagagcaattagtggtgcaaagtcgagtccacaaatgttcacccctatttctcattgactgttattatacctataagtgccttgactaacactgtagtcagatcttgaagggatagtcaataaatgttcttctaccttcttagaacaatgcctaaacataatcaacatttgctttcttttttctcatttcccaaggcaagatcatcacaagcagaatgtgaagagtgtttctctgtataaagatcagcatttatttaggctggttgtagtggctgatgcctgcaatcgcaggactttggggggctcaggcaggaggattgcttgaaaccaggagttggagaccagctctgggcaacaaagcaagatccacatttctaaaaaaaatttttttttaatgtgcctagcgtggtggtatgtacctgtagggacaactacttgggaagttgaagcagaagcatcacttgcagccaggacatacaggcagaagcaagggggacaaagggtgtccagcacagcaccagtgaattcaccaagacagacacttgggcatagagtgcaagacacagatttggaatgaggagtcatttacartaagcatgtatgcatgagtcaatatttttatatatttaagggagtrgagcccagtcatggaagacatgggatttgaatcagaagtcctggctctacccctattgtgaaaacatggcaaggttgcttaacatttgaggtttcttctgtttcaaaatgggagccacrgttgcacccatctcctggcctgtgtgtgatcatcgaatgaggcacatatgaggagccctgcagatcacagacacccagtacacactggctrttatcaattagttatcacacatgttgccaggcccaggtcattgtcagaacgttccttcccatctctatttcggtgtatagactctgtagtttctgtgattatcagatgtccatcccttcctctgattatcttctcttcatacccctacaggacaaaaggaccctgccttggtgtgagagtgagggcagagggagctggagcaagtagaatttctctaaataccagctggctggggcccaggagattaaaaaacaccgggctaggttggtcttggcatttgctgacacgcaaagggattgcagagatccagcccctccaacctccctctgtccacaggtggctcacattcagtcccacaatttgctttctcctcctcaagggttaagaaaaaaaacgaacccttccagtcaggtcagtgactggagagctccawggaaagtctctcagtgacctggctgctggcaccatggactcaggtaggcttgcttcttcctcttccctggctggttcctactcgcacctagaatggagggtggcgtttccacaactcagtsagccccagaggaacccggatggtcaagcaggccgatgagtcttccctgagccccaaaagaggccacatggagtcccccgacccaagggtctgtgggggcatctatgtcctgacctctcctcaggggagcatggcccaggtgcccacttcctccctgccctggcacctagcaaaygactcaagtggggcaccacagccttggggaagtggaaacagcagggtcggggagtagggggagagcagggtccaggaggtgcggagggctgagagaggaggttgaccagcagycccgacctctgacctcccgctctgctcccagctgaccctggggtgtttccagcacaggccagtcccctccctccagctcttgccctgcaccagcccctctgctctgagtggccctgtgaaaagagtgactcagcgtcccactgaactgagccccattctggccttygccacgtcttctctgtgtcacctggagcttcttacctcccctcacctggaatgcgagtataatatttccccatgtggtcatgaggatcaaatagtacatgggtacctggcccagccagtgcctgccacacagtagggcctccctaagagttggttcccatcccctttacctgccactgttgattccaggtggaagcccctttttgtcccccagggcgcctgccctgcacggcccatcacaagcacctgcttaccagggatgactgcctcaggcagggcctcattcccatgatctcaaataccccttgtcaaagaaaaatctgaggtccaatcgaattttgaagactttatttgaggaagaagcaagtcatgaagtgggaaacatcaaaatgaaagacatttcatgttatgatggaaaagtgtcagaggcaggtatttatagggtgaatatggaagtggaataaggacattatttgatttgttgcagttgtcaaattatgttttttggtttaccttgttggaaaattcctagtcgtgtacccgtctgtcagctggctgctcatgactggccgaagttaagttttgtttgtgcctaacgtaagcacccatctgaaacgactccagttaagttccccatagttggcagtttaaggggggttacagccwttctgaaggcctgtttgcttttgtttgcccaggtgttcattttaagtttgctttaacaccctggtactcccaccccagcaataaatacacagatctagtgctggaggttccctccatccaaccctggtttccttcatcctttcagtgaaggaggaaaaaataaaagcaaaatacccstcacccaagtcagcactgtgttcatttccctaaggcctgttttctcccctcactgagttgccttggcaaccaagtcacatctgctcaggagccgccctggacagcaaactgggctctgctgagtcctgtccaagatgaggagagggcagggaagattagaagccgggacctaccagccaaccccggaatccttcagaagggcttggctgggaggctcaaggaagaaactctstctccgaaacaagatgatctgtggtttaataacgcggccagctgggttcagaggtgatagtggggagccatgtcccctgagaccagcctgcagaggacagaggtaacacagaagggccacagggatcagtgctgagggtcttgctcccctgcccgcctaaagaaccccctccactgcccatctgagagcgcccatgagcagcaggaggaatcctctgtgcatggtagtttattcaatggtgtagggttgaaatattctttttcaataaaatgtttaaaatcccacaggtatactacagtggagaatgcaggaaccacaggcattttcaaaatatatggagtcttcaaagtaatggcaagggaacgctggccttgagtcaaatcctgagcttcctgcttgctgggttgggtggtgtctttcgctgtctgggtctcaatttctccttctgtgaaatgagaatgaggcctcgcaagtgtgtccacggcaggaaacgattttacctcatgtcccagtgcatacataaatccatactgcttcccagtcccttctctgcagttccataattcccaaatccctgcaaaccacacatttttggggcaactcmtctgggcagtaatcctgctgtgtactaagatgctttgtactgataatattatgtatcccatttaaggtgaatattcattggtttctctgttgaaacatttgtacctttgattacaaggttgaaacatttgtagcgttgaccagtgtgggagtggtcagtgatacagcatatgcaccctgtgtcatattgacacagattgaaaatgctgccatcctaaacacatctakatcccaggaatttacataagggtatatatatatacacccttatgtatatatatattatatatatttcaaatatcttacaaaagaawactcactcttgctgtgttcaatacactctgatattttcaatgctcttttctttttaaaatgctgctcttgacaaaatgaactattttcataacccactgatgggtcgaaactcagattttgaagacactggtgtaaagcgtttgacaataggcacatggcagraggaagcgatcactggaatatttcccgtacatggggagaaarcatggtggaaagctcactttctggtgattctcagctgaaatagatyggttcctccacaaagcaccrtggcacttccctggtgaatcactcttctcaggatgccttagtaaaacgccacaggctgggtggctccaacaactgatgtattttctyacagttctggaggcaaaaaktccaaggtgaaggtgccagcagggttgatgtctggggagggctctgctcctggcttacagagkctgcctcagggctgtgtcctcacatggccttcccagtgtggggggtgtatgtgtgtgtgtgtgtgtgtgtgtgtgtgagtgtgagagagagagagagagagagaaagagagacagggagagagggctggaaggcaagagagacagcgagggcggggtggggtgaggagagagagagagatcttctgcctcttttttttcttttaactagacaccagtcctgtaggattagggccctacccttacgactctctttaaattaatgacttccttaaaggctcaatctccaaatatagttactggggtttarggtctcagtatatgaatttggagggcacacaactcagtctatagcactgatgcctccatcaaaaataccccatgtgacagctggttgaggaggattaacmtcgaaccaccttattctcaatgccatttaggctgtagcacactttcttccaatcttatgctttttgtttccaagtagaaaagaaacgctttactgaagaggccaccaaatacttccgggagagagtcagcccagtgcatctgcaaatcctgctgactaacaatgaagcctggaagagattygtgactgcggctgaattgcccaggtaacctccgtggggttacctccatggggcgccccggctatgccatcctgatctcccctgggctagttttctctggcaggcacacctcctccaggcagccccctctgctgaacttgagaatgtccctctcagcagtccaggaggaatatttcctccaagtccttcgctggcagtgagtgacctcaggctgaggggagaggaagcccacaagggcagggtcagttctgccatctactggtgatgggagctttgcaagctacttgactactttctgccttcctttcttcatccattgagctttattgtgagaaaaataagctaatgcatgtaaagtatttagcataatgactgacacatggtaggtgctccgttaatgttaccttttaaaaagattgctggggagagaccaggaccaaaagtgtttttctttttttttcyttttttttyttttttttttttttttgagacagagtcttgcttgtcccccaggctggagtgcagtggcatgatctcggcycayygcaacctccgcctcccggtttcacgccattctcctgccccagcctcccaagtagctgggactacaggctccggccaccgcatccggctawttttttttgtatttttagtacagacggggtttcatcgtgttagccaggatggtcttgatctcctgacctcgtgatcctcccgcctcggcctcccaaggtgctgggattacaggcatgagccgctgcrcccgaccaagtgtttttcttagagttggatgcccagcaggactttctttgaaaaaagccagaaaaatcttgacctgatcaatgtgtgttcctggagatgctgtccggggcccttttcttccacctctgaggaactgcacaaacacagcaggatcctcctgctgacmcagaacacagagaggctggaatggagttggacagagctgggggtggatcttggctctgtccctgcacagctctggggctgttgttttatgtcttggagactgggacctgccatctctccaatgctaatagtagttcaatcagatgggcrtgtggttaaagcctgagaatgaacagcaggtcaraggtggggaaccaagtagcatgatgccatscaaagacccagagagacgtttcaggggcagagccaggggtcaggatggggcaggggtgggcctgggttggaggagcagcaggaaggctcgggcaccaaggctgggagtagggtgagaagagggaggcactgagggcatgaaakgtaacgtggccatggacttgcagaggaccagtgagtgggagagggatatttcttccctccctgatttgatcccatcactgatgggcatagtgggccatgggtgactgtttccctgacagcatgcctgggaactggggcrttctgaactgccatttgggaccctcttctgttctacatagagtagaggaagtgtttcttcgggccagcttggagagttggaacaagtgtctgccaactgggtaatttgaagggttctcaggagactcacaagtccccaaccaaagagaaaaacactttctctatcatcttgtccaaatgcaggtcttttcagcattagtgatttatagagatgattttcaaagtctcatgagtccataagaggttccatgaaattgcacatggcattggyatgcacacaggtgaagctgtcacctgctaaggcattagtttggctggygacatgtgacagtgagaccctgaagcttggaggtgccaggtcaggaggcmgtcaagtggcttgagagttcatgtgcagccaggactaatagccaggcctttcacttttcagtcaaagggggcagtggctggacccagtggccttcagtcagaagatcaaagggcatgtggcattggaagagagaacatgccaggcaaggtgatctcttccagtctgaggttttatttgatagcttaaggactcagagttagtcaaaatgcaatgtctgaaggcacccttcyttctgacaccagttgcagatttgaaggtgtttcttaagcccccactcaggtttgataattcactacaaagacttacgtaactcactgataactgttattgcacgattgtggtttatcacagggaaagaacacagattaaaatcagcctaaggaagagacacacagggcagagtctgggagggtttcaggtgtgaagcttcgttgtcctcaggacgctgtgttctcctgtgtgaatgtgggacaaaacacatggggtgttgccaaccagagaagctcacccagttaaggaaaaattcctgtgaatcacattagatcaggaagcctttattcaggattgttgttacaggggagggagactgagcccagctcccaatatagtaaagacagagggggagtcacagccaacaccagggtgaggagtgggagatggaccagttctgactggagacaccagaatggggggtttctgctaaactggcctaacaagctgctcaactaaaggcaggtaaggagcgggtgaagaccgtgatcagacagcaagaatgctcagacagcaagtggggaggaccctccctaactgccttgggggattcttgctgaactggggcagtacaggcccagcaagcacgggatgggcatggaaggtcagcgcctagaggagaaaaggctcagagcagcctgactggagtttggccaaggagaaagtctttctcaacctatgcctcaatgtacagagctctttctggggctggatcacaagctgtcctgatggctgacatggagtccccagcccctccctgaggtctaacacccttagttcccagttcctttggaaggcagaaaagatacgtaatagccccaaaacccatcacccataacattgctatactgtgctgtagccaaaccaccagggaaacaaagatgttcctaccaggcaggacattccagggccccagagatcccttcccagggcccaaagacaaaagaacgacctctcttctaataaagttaatccttcactgttctatgatcctctgaatgaaggtctttttgctccgaacccacttctctttgttcatctacaaaatttcccctctccacacactattggagggatgatgttgacctctcttgcttgaggagccatctttatcgaatacctaccactaaagagcatctgaagatgactttaagttttttattcccatacagaataagtactgtggcatatctatgatatacaaaacatgtttaaccttggaaaaattattttaaatttttccatttaaaatttaaagctttatttccatttgactcatagtaatagctctgtgatttatgtagaacagatcttattgagctgattttacagataagtaagctgcctttcttaatcatctgtcctttattggtacagggatgaggcagatgctctctacgaagctctgaagaagcttagaacatatgcagctattgaggacgaatatgtgcagcagaaagatgagcagtttagggaatggtttttgaaagagtttccccaagtcaagaggaagatccaggagtccatagaaaagcttcgtgcccttgcaaatggtattgaagaggtccacagaggctgcaccatctccaaygtggtgtccagctccactggcgctgcctctggcatcatgtcccttgctggtcttgttttggcaccatttacagcagggacgagtctggcccttactgcagctggggtagggctgggagcagcgtctgctrtgactgggatcaccaccagcatcgtggagcactcatayacatcatcagcagaagctgaagccagcaggctgactgcaaccagcattgaccgmttgaaggtatttaaggaagttatgcgtgacatcacacccaacttactttcccttcttaataattattacgaagccacacaaaccattgggagtgaaatccgtgccatcaggcaagccagagccagggcccgactccctgtgaccacctggcgaatctcagctggaagtggwggtcaagcagagagaacgattgcaggcaccacccgggcagtgagcagaggagcccggatcctgagtgcgaccacttcaggcatcttccttgcactggatgtggtcaaccttgtatacgagtcaaagcacttgcatgagggggcaaagtctgcatctgctgaggagctgaggcggcaggctcaggagctggaggagaatctaatggagctcactcagatctatcagcgtctgaatccatgccatacccactgaccccagaccagtgcagccagcaggggaggtgagccatacacaggccacgacaaaatgcaggcattttattagggggataaagagggcaaggtaaagtttatggagctgagtgttagtgactttggcatttctgtagctgagcacagcaggggaggggttaatgcagatggcaagtgcaccaaggagaaggcaggaatgctggagcctggaataagggargagaggggactggagagtgtggggaataggaagaagaaatttcctttagactaacgaatatattggggggaggaatagaggggaggtgtgcaggaaccagcaatgagaaggccaggaaaagaaagagctgaaaatgcagaaagccgaagagttagaacttttggatacagcagaagaaacagcggctccactaccgacctgcccccggttcgatgtccttccaagaatgaagtctttccctggtgatggtcccctgccctgtctttccagcatccactctgtcttgtcctcctggaagtgtatctcagtcagccagtggcttcttgatgatggcggtggaggtggtggttgtagtgtgatggatcccctttaggttatttaggggtatatgtcccctgcttgaaccctgaaggccaggtaatgagccatggccattgtccccagctgaggaccaggtgtctctaaaaacccaaacatcctggagagtatgcgagaacctaccaagaaaaacagtctcattactcatatacagcaggcaaagagacagaaaattaactgaaaagcagtttagagactgggggaggccggatctctagagccatcctgctgagtgccctgtgtgtaagtcctaataaactcacctactcaccaagctggacttattcgagtcattccttggtctcctggctcctttctcgctttgggagcaagttcctgtctgaagtttttgtctgaacagtggtaaaggtgatggtgatgatgtcagcagacagcaggaggacttgacaaatgtcagccctgcttggggccaggatacactgagggaacgatgacattccaatgaaactccaaattctgtattggaaaagtcattgatttgtgaagaaaaataaaaggaggctgggcacggtggctcaggcctgtaatcctggcactttgggaggccgaggcgggtggatcacctgaggtcagtagttggagaccagccaggacaacacagtgaaaccccttctctactaaaaatacaaaaattagctgggcatggtggtgggtgcctgtaatcttagctactaaggaggctgaggcaggcggattgcttgaactcaagaggaggaggttgcagtgagccgagatggcgccaatgcactccagtctgggagacagagcgagactccatcccccgcgtcccccccccaaaaaaaaacaaggaagagaaaagcaaaaccagatgccaggaaccaatcaaggaactttgtggtgcattgaggagatgaaccagcctgcagtcaagagaccccgcctctctgagcctcagtttcctcatcagctgggaaagaggggctggacaagatgatatctcaggtccacctggctctctcctcttgtgttctggagatctgggttcaagcaacactgatctatgcctgtgcctttgtggtgctgatggatgggctcccctgggctctcggtgcctgacttcacttcctcatgatccttcttccagggactcagggagctaggcctccatggccccttctgcttgttcttctggtcggtcatttctgggcgaccccagtgcccagtggcctgtgaggcactcagggaaagcttgtagacatctggcttggcccaagtgcaggcatggtccccatctagcagccagggcccacgaatgacatgggtcacacaaggctgactaaaatcagaggggcctgtgtgtaggttgagagaaagtccatgagaaatagaggaacagagagagatagccagacagcaaacaccctcatccagtctgcaaacaccctcatccagtctgcaaacaccctcatccagtcagccctctcatttcacccagactcctgcaaaagcttccagaatggtcttccctgttatacagcccttgccactatccctgcccatcctccacactgggccaakttgccccgtaagaacatagatttcttcaagcccatgcttccatgtcttcaatggcttcctattactcttagcacaaaagcccagagccttcatgctgtctaatgtaggctgctgtggcctgagttcccctgaagggagagccctaggcaaggctcccaggcagaggatttgtttgggaagtgattctaggagcaggactggggtactgggaggagtgacacagagaaggacagaaggctgatgccgggagaaattcttgatagggtcacccatgtgggcgactggagacctcctgaggagtcttcaaggagcgtcttcagaatgttcctctacagggaggagagagggaggcctgtaaccactgctcctgtcccccatggccttgccccagtggacattaattatctgtatttccatgcatagaatatagaactgctgggcgcctcagctggagcccagagcaggggcaagagatacagaatgcacaaaatcaccccagaacctctcctaagtcactcgtaaagtgcacccagggcctacttagtccttttttatgtagcatcctgcagaacacttgcctcagtccctgtaactctccatcagccaaggcttccctgaccttcagttgattcatctatttcttcctgaagaagtcaacagagcaacggccaccgacttgcctaacgccagaacattgtgtttcatttgtttgtcaattgttcatcaattcctggataattcccattcttttcatacatttcacttaagctttgaatgtttctggcactgagtaatttacttcttcagtgatccagccagcatttgccctgacacttagagttgaaatgccatcaggctacctgcatttgatgcaattccactgtactgctagtattgyttaaaaatttttcaattgcaagcaacagaaacagaaactatctgtcttaaacaaaatagaagattcattggatgaaaactagagcaggtcagaggatggaaggaagaacaaaatctacagaatttggaaggacaggagcagaccattaccaacatcaggaatatatggtttgccctttcagggctctgcctgcacctggcttagctccacacactttgattcctagtgtctctgattaaagtttcacatactcagtagacagaatagcttgggttagtgactcttcttgaactaatcagtgaggctatggtatcaggaatggggatgggtaacagagacacaaaccctaatgggaagcctctggccaaacagccacctgaatttgtgctcattgtatacagtcaatcgcttgctactgcacacacactcttcttctcatacaaacaaaaagaactctccttatctgctatgaacccagccatcccaaggaaaaaggcaaatgcacttgcctcttccccagtgagagccacacacagcatctccaccttctgcatgctgaagttatgtcacaggaggagggcctcagcacacgatcaatttttcttttggtccattggcagcttctgtctcagaatttttgtgtgtgtatatttgtagaaaataaagaggtacggtcaaggctacagccactactgaccattgctgccaccatcagaagtcttgaattgttccactcaatgttcctcttacttatgggcaaagtcattctcgtggtgtctaagctccttgatggtctggcctcagtaagttggtgaaatttcctattcacatttacactaatactctaacactttagagtattacaaggagcaatcctaggggatccctcaattcctcctgtcctgctgtgtaataacaacatgagcttccctggaggaacatgatgcatgattatatccaacccagtgacgtcattgctatccctacatcagggagcatgagaagccagctatggtttctgctgaaacaacttttgtcaaccttagatactgaaacttccagacctaaaagtctgtgagttaggagtatgtatcataaacaaaatttttgaaagtggtttattgtgggtaaccatagagctatcaccctcatcttaacctctgactgcccagctccatgaattctggctattacaggaaatggggaaaattctgggtatggattcaaaacatatcacatcctaagggcagctcccagcctctgatatggagctgagtcccctttgggccatttccatgggacctaaggctgtcatttccggggttgagattcactgggtgccaagtggtcagccttgatgagtggggtccgtgttgtgtggttacatagagctccacattaggcaagttggttaatgagcccattctgaaaatgtcaggctgcctggggaacagaggagatttgagccttaaagagtgacttcttcccttgtttattaacagcctctgagccaggcatggtgactcacgcctgtaatcccagcacattgggagaccaaggcgagtggatcagttgaagtcaggagttggagaccagcctggtcaacatggtgaaaccctatttctactagaaatacaaaaactagccaccagacatggtgacgggtgcctgtaatcccagctactttggaggctgaggcacgagaattgcttgaacctgggaggcagaggttgcagtgagccgagattgcaccactgcactccagcctgggcgatacagtgagacccagtctcaaaaaaaaaaaaaaaggagtcttttttgatggtggacatcttccaatgagcattcacatgggacagatttttttttacttctaccgttgttctgaaagctctatgtatgttcctcttccctaaaaatctttgtcaccaagcctccagatttattccttctaaaatgttgaaattccagctaattccttagttgttacccaggaaacaatgcagatcctggtccgaggatgcagctccttccaggcagcctggactgtgaggtgtgctccattgctcttcaggaaccgtccttgagaggcgttccacagcaggccagacctggggggagcaggtgggccaggcggaaagcacagcacaatttgagagatgctgagtactcatgactctgtgtaagcacctgaattcagccctcatggtcttttctgagctgtcagtcatttatctctatttagtcattttgcgaattggagttagcttccttccctctacactcaaagacggcatgtcaacattttaggcctctgggtggaatgaactcccagtttcctgggagggagctgattggcatctattcgcctcttcctagttttgtggggtttcccagcatgtggagtcatagagaaagactggtcccaccttctatgtaatgcccaagagaatagatgactctctgtccacccccaccctggcatccagggcttctggacaagacctaggctggctaattggctgcttccacatgggatcctgaatctggagcaagtgaggcaaagcccagggtgcttagaatccattctcagtgagagcagcaggactgcccgggaggggaatagagacggggacgaccgagtcctgcaccagcagagatgacgtccgcaggtggcagggcagcgctgtggccgtgtcactcctcacaaagcagggctcttgtgctcgcagccttcgataccgtctcactgtcttggcttctatttatcttccaagccaatttccagcctcctacacacgtggggttcttctggtatcattccagtgaatttcatgttgttttctgccctaagaaaacagagttggtacctctgctcgaccaagaagcctgattgatacagactgagagctgcaggctgtgtttatttgcttcattaacaagaacaacttaggaatggcaacttccattgatgagcttcctactttgttctgcggttggaaaacaaacagttgtttccctgttgacgactggccacactggagaggtgaacaggtgagtcacaggaatcactgcttctgctccctttaaatcttgatgatggcagaaatctctgtaactgcctctgtaactcctccatgaagttggtgttgactttgagtaaaatatttaggcaggtatgtaaaaccaatggcctccactggcgtatgtcactgaaatagtccccgtccgtgggtctgggtgaacaatctgaagcttccaagagtattctttccagttatccacccaggaatttgaaaaatgatgaccaggtgagggtgggaccctgatggacttaatcaaaggtaaacgaatatagatattcactaattacttgtgccctataatctccccctctgacccaggcctaagaattgggtgacaagcagggactatccagcctgatgacctgtgacaggtatccactcaccagattgggggttttgtaaagtcagtggactgtcttccagctctattttggaaccttgttcctatcaaatgtcccttgagccatgatcatgcgccctcctggtgcgtgacctggcgcccgcactctcttttcttctggcagttacctgcctcccctacagtcggcctcttggaatttctcccaccctaaagagaccagagtcccagcccctcccctattatagagagttcctggttatccattgactcttctcgttaaaggagcgggaaatcttttgggccctggcaggaaacagtgtgggcaggaagtgcttgagaaatcaaatctagcatttcagcctcctacacacttt

SEQ ID NO: 8825 - DNA, 23610 bp, Homo sapiens
gcgcccacgccctggcaaatgtcaggggcccctccctcgccgaccaggggaagcgccgggcactcagcattcatttcaaacctggatctcccggcaccccctccctcccttagccaaaggcttccgcagattgattaagaacccctggtccccttcttctgggtcatgccccgggaggaggggcccctccacctgagccccaccttgcttcttgcttttttttttttttttttttgagatgcagtctctctttgttgtccaggctggagtgcaatggcgcgatctcgggttactgcaacctccacttcccaggttcaagcgattctcccgcctcagcctcctgagtagctgggattacaggcacccaccatgatgcccagctaatttttgtatttttgtagagacagggtttcaccatgttggacgtgctggtcttgaactcctgacctcaggtgatccgcccacctcagcctccctcccaaagtgctgggattacaggcatgagccactgcccctggctgctcctctgcctttttttttttttttgagacggagtctggctatgtcgcccaggctggagtgcagtggcgcaatctcggctcactgaaagctccgcctcccggtttcacgccattctcctgcctcagcctcccgagtagctgggactacaggcgcccgtcacctcgcccagctaattttttgtatttttagttgagacggggtttcaccatgttagccacgatggtctcgatctcctgacctcgtgatccgcccgcctcagcctcccaaagtgctgggattacaggtgtgagccaccgcacccggcctgcttctctgccttttatccccctctgcatgcacttctggtcactggctccagcccccccacataaatgtgccctgccatcttgaacaccgaggacctccatccaccaggccccctccagttcccttcccaagggtctgggcccctcctccctcccgctgcctcttcaaccctctctaatcttccctgggactccaatgactgtcctggaccccaaaccaccaaggtcacatgccctgatgcagcccacccttggagccctcctgtggccatgtggcagggtccccccttggggccacccagcaagsattgggggagaggtggtcctgggcctggctccaggatgcctctgtggaaccagctccccacccccacttctagaagcccccctcccctcactggtaggtcctttccatctccaaggtgtgtctgtctcccaaatgtgggtgctttttatctccaccccttcaattctttttcttttcttttttttttttttttttttgagacggagtctccagcccatgctgaagaggcactatctcggctcactgcaacctccgcctctctgcctccccggctcagatgattctcccacctcagcctccccagtagctgggattacaggtgcccactaccacgcccagctaatttttgtttttttttttttttgagacagagtcttgcactgttgcccaggctggagtgcagtggcatgatctccgctcactgcaagctccgcctcccgggttcacaccattctcctgcctcagcctcccgagtagctgggactacaggcgcccaccaccacgcccagctaatttttgtatttttagtagagacggggtttcaccatgttggccaagatggtctcgatctcctgacctcgtgatccgcccgccttggcctcccaaagtactgggattacaggcgtgagccaccgcgcccggccaacagccaattcttatggagcccttggttccatctagccctccctccggctctgtgctgggtgaagaggtggtcacacacctcacagggcaactcatcctctcctgcgagctcattccttcccactcctgcccctgttcctcactgaacctgacctctaagaacatggatgtcctgacctcgtcaccaccacaccacgcctcaagggctccccactgcctatgggacgatacccgtgctctggcagggctggctctgtctgctctcaccgcccctcccactgcctcctcccccttccccaccgcctgctccagactgcagattccaggacagcccgggacctcccccgccgaaggaggactccagggccccaggctgggttaaatgttcttcctggggctgcttcagctctggcctccccttgcgcaggccaaggtgctcaaagctctgttctcgcggggctggcgggggggcgttcagtgatgttccctggtgcttgcctggtccaagatggggagacagagcccatgagaggcttttctgcctcccccactccacacccttattcccctgcagcgcaaccaggcctagggcgccagcctcaccccagtccccaccccacaggactggatcgagtggaaggaagccagatgggcaggatcctggggcaactcctcgcacgatgcaatgccaccagttccggccaggtggcgctgcgcggctactgttccgggcggtagcgtccgacccgcgcctccagcaacgggcggggctagagccgcagtgggcggggccacgacgggtgggcggggtcgccccgtcggcggcagcggtttcctgcctctccccactcttgggtcgtcgcagtcccccggccttctctctctgtctggtctgtgggtctctgttggtcacctccttctgtcgcgctggctccgcctgctccagtttcagaatgtaaagagaggcatggtgcagcctgagggaagaggccctaggcgcggtctggttatgcttgaagggccattaatgtccattaggaagccccgcctgcctgagcagctctggaccattaccgggagtcggaatagtggccccacccccagacagggccccaggccacggccacaccccggagccccggtccaggtccaggctcgggctccctgagatcgctgggaccttgctggagggatgcgggttcaaggcccgaaggaaaggtcctgccaaaacaggagtgcacgggcggcccccaccccggtggaccccccaccgacagcccaggggaacggctgagacctgctctccctctgctggataggacccacgcctgggtagcatgctggcaggcgtgggttaagggggttgggtggagagttgggggatctcccaagcctctgattgcctctgccttgactttcttccctcctgctggggcccggggagcccacgtcgcccacaccccatctgcaccccacagaaccaggaaaataaagtccaccctcctctcgatgctgaccctactccctcccgcccacctccctagccctttcttcgagacaccaagcactttgcggcccctgaacacctttgcccaggtgcttcccttcgcctttctctgcctccagcgcagcacctatacgggccaaggtcagcctcggaccagggctgagagcttccggaggctggctggagaagaggcctgggagggtttgcccccgagagcttctaggtcacccttcctcgcctgttcctccaggcccctggactcactgtcccctctcactgactctgcacctcctctgaaatcgtgacctctggttcctctctggctgcctcattcctcctgctccctgctttgctaggcccacttcctttgttgcccggccctttgctactctgttaccctcctcagctccttcatggctttggggactcttttgttaactctgtagcagcagtgtgtccggtgatatttccttggttcctggccctggttgtgacctcatgtcccttgtggcccctccctctgccatgctgttctccatcccatctttttttttttatttgtttttaaattatttatttattgtttttgagatggtgtctagctctgttgcccaggctggagtgcagtgacgcaatctcagctcactgcaacctccgcctcctgggttcaagcgattctcctgcctcaacctccccagtagctgggattacagatgcccaccaccacgcctggctaattttttttgtattttcagtagagacggggtttcgccacattggccaggctggtctcgaactcctgacctcaggtgatccacccacctcggcctcccagagtgttgggattacaggcgtgagccactgctcccggcccctcagcccatcttcagtcactgggagtaggaatcagctgagtcctgggccagggaaggatggtgtatgcccaaggctgatcaggcgtctgccccacccagggcgggtaaggtctgcaagcccccttacccaggggacctggggctgctggagtctcccatccagccacctccctcgactctagtgtggccaggaagctacagcctgccaggttttgggtggacctggttggtgtgggatgaccccctaagcccaaacaggtgtggtatgtggggtgcgtggtggtgggtcacactgcccacagccatcttcacagactccaagggtggcagcaccaggctgtgtccagggaggccagccacaggccagacaggcagcctctggacatgcagacagagagatggaagcggccggccgggcgggagcctgaagcagccttacccaggaattgcaggggttggggtggcgagcagtcgcggcgcctcagcctaagtggcttttaggggcagctgccgggatatgggcacccagggggccatggcccaggaggctgcccagaggcgagccctgtgcttgggtgggggcaggggagcccagcccagggccccggagagacgagagggagaggaggactgcgccaagcctgcttctacggctcacatggggaattgcctgggctggctgtgcctgacccctgggaaccaggtatgtgcaagggggcctggctgggctggggaggagggcagactggggctgtgcctggactcagctaccttcctatattggagacagaggaagagctgggtggtgaagatagcatggactccgaatctcacatccctgggcccaaatggagctgaggaggcttcgtgggtcttttccctctccaggcctgtttgcaggtctgtgaagtggccggtcccctagggttgttccaggtaaaatgcacttaggcctaaatgatttcactgtggtggtgactgtcctgttggggaaggagggacactcgtgcttcaggtagaggctgagggacgtggacggctgtgggcaggggaggggaggcctgctgcctgcctgtggacactgtggagcagcgcctgtgcacacccagagcttagagcccaaataattcagtggagtgtagcccatgtcaggaggtgggtagcagggaccctcgagactcatatccttttgtcaccctgcaaagtcacagtccaggcctggggtgggctgggacacaagtgagggggccggcccggccaagggaaagaatggcagcagggcgtgggaaccgacgcggtgcagataggccgaacacggtgggtaggccagggagtctcccagccactggcccccaggatgcagggaggggctgctgcgtgtcacttttaaagccctttttgcctcctgggccctcctgagactctgccctgggccagggagtctcccagccactggctgggagggatccaggtgagacacagccgagaggagacaggcaagggggtccggaagggcttcccggggagggtggggagggctgtggcccttgttcttaccctttggcccctttgtcggggtcccttggcctggagaccctttgtccaacccgtcgcccacctcaagacctgcctcgatgctgcgcatacagtaggtatccaataaatgttcctgggatagaaggcaaaggcgctggcaccaaggcggctgcccagagtaggggcgagacagagaggtcccggtggttaaggggtcccctagccctgccgcctccccctgccccgcctcgggctggccgggcgcggaggtaggggcctggccgggacggctgggactggaggcgggggcggccgggcggcgggggcggggaaggggcgggcgcggaggcggtgccgcagcccgagccggagcccgagccggatcccgaggcgacgggagccgaacaggagccgccgctgaagccaccgccgggtgcccagcgccgccgccgcccccgagctcccccgcgcccctgcccgcgggcggccggtgggcagcgggcgccatggccgcgccggagccgctgcggccgcgcctgtgccgcttggtgcgcggagagcagggctacggcttccacctgcacggcgagaagggccgccgcgggcagttcatccggcgcgtggaacccggttcccccgccgaggccgccgcgctgcgcgctggggaccgcctggtcgaggtcaacggcgtcaacgtggagggcgagacgcaccaccaggtgggggccagcgctcgcccccggcccgccgccccctccccgagcgcgtccccctggggcgagcaggggtcgcacgggggcccgagggggctcccgcggggaggacgcggacgttgtcgggaggcagcggcccggcgccttcggagtcccggcgcaggaagctcagtcctgcacgggggtgggggggggcatcctggcagggaggggcccgcactgcggctcctggccgctggcctcgccctttggtcgcgttttggcctcagtgtgccgtgaaggagggtgttgggccgcctggagcccctccggaaaggtgaagacctgggtgcttttgcctgggtgtgtgtgtacacgtgtgcgtgtgaacacagctgggcgtgtgtatgcaggtccctttggggtcagccatgtgtgcatgcgcctgcctgtgcgtacccaggaggggtcgcagtaaaggcatcagtgtgtctgcacctgtgtgtgctgtagtgtgtgtgtgagtatacaggtctgcacgtgtgcctgtgtgtgtgcaggtctggactcctgggcgtatgggagctgggctctgtgtgtgtgcacgcctggctagtgtactcatcactgtctgcaggccggtgagtctttgtgtctgtactctagtgtgtcccagctggtgtgtctgggaccgggctgagttggycattgctggcaaccacattccttagctacaaaggcactactcctcctcagaggctgcctagcctggctggggttactggccgaagcctcctgcctcctggctaaggagaacagagccttttctctgtggkttctgacccctgaggtgtgtctgtctcccacaggccagggactccctccagaccctggttggggtccagcgtccacacaccccttttcctccaggtcccctgtccctcacagcaccgatgaatccataacctgtctacatggctggtcctggaacctaragattagcaggttggttcagctggacctggagctggtctcctgtttacctggtgccttgtctgtcactctgtcggccggcccyatgccttccacccagagtgtctgctgtgtaaggttgtttgctgaagaatgtggggatcaggccaggggcctggacctgagggattgagggtagggctgccagggctggggccaggctgctgttggatagtcactgccaccctcgccctgggaacacctgcttttccaaggccctgtggggctggtctctgargactggacacacagaccatggtggactctccccactgccccaggagggcaagaggggcagttactgccccatttgacagttgaggaaactgatgccagagattgagggtaacttgtctgggacacatagtcaagaagcagctgggcactgggttcctcttgtctcactctgggtcatggggagagaggagggctgggggaagatgggcctggctcagtccctcctatctgttcaccacccctgctgagcccggcagctggtggggagccttgtccaccctcccccaggccgcaggtgggagtaggsctgcccctcttcctgcccacttcccagtgggcactgctttctctccgcgggtgtgcgctggccccccgcgtggtccagacacttcacaggcacctgcacgcacacaccgacggccaccaagccacagctgtccacaggtgcacctgcctctccccctcgccggctgcacctgaatcctgcttccctggctgtgtgtgggtgcccgagccaggagcccagcccttcccctctctgcagatccagagggaatgggcccatggccatggcctggaggtagatataaggcctagggtcaggagtttagactcccacactgcacggcagagaatgacgggaatgggcacagacacactcaaactggggcccagggagacacacctctccttcaaacctggacggagacacagactttgaaacagatggatgcatgcgcgcacagggacaggcagactgaaaacctgaaggtccactgtgcaccatttttgtcacttccagacaggacttacccagcggccctatcctgcagccccttcccagccccgcctggagaagaccctgggctaagggcaaggctctgggagcaccctgaagccctcacagcctgggcctcagtgtccggagcctragtgcagagggagggagccgctggagtccgggggtggggggcggggccggcaggcctcttggtgcagccacccgcccatgcagaccagccgcctgtccgcacgcctgggccagcccagagtggtgccactgcccatgtgctgcccggaatgtgggccactgacccgctcctatcgcccattcgccccaggtggtgcaaaggatcaaggctgtggaggggcwgactcggctgctggtggtggaccaggagacagatgaggagctccgccggcggcagctgacctgtaccgaggagatggcccagcgagggctcccacccgcccacgacccctgggagccgaagccagactgggcacacaccggcagccacagctccgaagctggcaagaaggtatggcgggcttggcccacrsggaccaccctagcctctcccagaggctctmtsagcttttgacgacgatctttgcctttggtcacctccagaagtcttggtctcttctgccttttggggctccttttctgccccagggaccatcttgttggccactgggggccactgtttctaccctcagcctgtgttttaaactgggtagggtcagggcagcctggcctgttcctcttctccaggatgctccagagccacttgccctatcgaggggtcactctgacaagctgccgcctccccagcccccagcctcgtggctgaggaaccctgggaagaggcattccaggtctgcgtgtgcgcagctctgtgcctgtgctgggtgtcatccgtggctctgtctttgtctctgttgaaggcgcctgcatgctgggaaggcctgggagagggccggccttctccacaggcagcgccgtggttggggaagcctaggaggccactctgccaggcctggcgtaggtggggctgggagcatgggagtggagttgggggtccaggaggctccagggtgagcccactcctccccctagatacaagggagggccctgggaccctgtctgctgttcctcctggactcctgctgggtagtacttcctccttcccctgcccttgctcccagccaggagacccagaaaagtacaggggcggcctgctccacctcctgctaggtggccgactgggaggggcggcctggcaggccttggggaccaggaggaacagcctgaagctgtctgtcttatcttcctggaggccctgatggcattatctccatgttctctcctacctttttttttttttttttttcattttcaaagagaaccytggccgggtgcggtggctcacgcctgtaatcccaacacttcgggaggctgagatgggtggatcacctgaggtcaggaattttgagaccagcttgactaatgtggtgaaacccccgtctctactaaaaatacaaaaatcagttgggcatggtggggcacgcctatagtcccagctacttgggaggctgaggcaggagagtcgcttgaacccggcaggcggaggtttcagtgagccgagatcccgccatagcactccagcctaggcgacagagtgagactgtctcaaaaaaaaacaaaaaaaggaaaagaaagaaatcccttcaggggatatgagtccaggggttggccagaccccactgtgagaaccgcgcttggggcaggggtgtgggatctggagttctgagggtgcaggggatatacacattcactttctccctttcccagacgtcactgctgaagctggctgcccctaggagctgagcccggggggagcggcttggcagggagacagcattccctgtggggagcccagcctgggcgcaggcctgcccgtgggacctgtgggacccgttttgttcctggggcttgagggcgggccacagtggtgctcagggccaaggtgcccagcccagggctggtgggggggctggccttgcaggggggctggctggtcctaagcccctgtctccaggctgagggttggggcctccctctttcccagscaccttccctcccccaggaggaagctccccctctgcctcaggcgtttgtccattgatttggacacraacgcatggttcaccttcctgtggaaaaatccggccctcggactttatctggagggtgcrgtggcccaggcaccttgccttgggtgggaccttccccctctgctatttcaggctctgggggctgcaggaagccctaggaggggcttcctctgggtgtatttttagaggaacaaagggtggcctgagtggcaggtccctttgtgcatgagtctggctggggacaggggctccaggaggtcagggggcacccaaggaacagggtctccccttctctcttctggcatcaagacctgaggtttctttttctttttctttcttggctcactacaacctccgctgtctgggttcaagcgattctcttgcctcaccctccccagtagctgggattacaggcgcgcaccaccacacctgactaatttttgtgtttttagtagagacggggtttcaccatgttgctcaagctggtctcgaactcctgatctcaggtgatctgccctcctcgacctcccaaagttctgggattayaggtgtgagccactgtacccggcccctgaggtctgaggtttcatttctttctttctttttttttttttttgagacggagtttcactctgtcgcccaggctggagtgctgtggtgcgatctcggctcactgcaagctccgcctcctgggttcaagcaattcttatgtctcagcctgctgagtagctgggattacaggcgtgtaccaccacacctggctaatttttgtgtttttggtagagacagggtttcaccgtgttggccaggctggtctcaaactcttgggctcaagtgatccgcctgcctcagcctcccaaagtgctgggattacaggtgtgagcccctgcgcctggctcaggacctgaggtttcttcacctgagctcccagcatgggcaggaagaggtgggcctcacctgacctccacagagcaggctcagatcctgcccttctcagcctgggttcagggcatgcctcagatggtcagggagcccaggagggcaaagcttaccttgcggggatggctccagtgggggcactggtggcagagaggcagagctctggaagggatgtgtgtagtttgtctttggtgaaggatggagagggcccaactttgggtgccccctgggagctaagggtggctctcagtgtcctctgtcctggctggggataggggaggtgggcaggggaggacactgatgtggttggcccctccttttgggggccgtgaaggcctagttagtgatgactcagccctgggccacaccaggctgggggtggccgcagctgcagtgcagctgatcctagtagtgacgacaggggacagcccccaaacagagacggggtggccagcggtgccaggccctggaggtggtggcagaccctgagccctctgccccctgcccctagcccatgtctccacccccatctggagggccttgggggctaagagcaggtgtgaggggtgacagttctgcgggaggcggctgtgtggttggggcgcggtgcctgcgggggcttccgggcttccctggctcttgctcctctggagcctcaacaggaccgtcctgtgttctggggccgggactcctccctgtcccctcagccctgggtcctggggcagggcagggccttccagcagcttccttccttcctttcttgggacggaagcctagctgggtggggggcgccgggctggagccttcgcaggggagcgggctcagtcatcaccctgctccccagagtgactcagcccccacgtccccacccatccccggggagccagggccgcagagggaggtagataagtggggtggcagcctgggtcggccagagagttcaggccaccccggccggacgcctgccacttgctgtcactgtgccgctgtcatggcacgctccgggagtgccacgccacctgcccgggctccgggagcccctccacggagcccaccccagaggctggtacaggtcaggtggggtgggaggaagggagggctaggaggaaccggcagccgctcagcctcccggggtggaaggaggggactccgggaccttgatgtaagcaggctggtcgctgagcaacaatgaaggcctttctctgccagggctggtgcgtcaccatctgggggggtgcccagggtacccccatgccagcctctttgtccggacacaggcatggctgggggaccagggatggtccagctctgtgctggccgccggcagggagggagcctggagcccgtgggagcccgagggcctggcgggaggcggcaggaagtgtgtgctgagccagggcagggaggaggaatgtgagctatgaacgccgcccgagctcctcggctctctgggccccccttccccacgagcccatgtgctgccagcagcccaccctggcccctccattgcagcccctccacctgaggttttagtgctgtgcctggcgccactgggaccctgctgacaatgaaggggtttaggtttgataggcagaacttcttgccttgtagagtgaaagacggctgcttctggacagaggcagaggggtggccagaatgaccctgagaacactgaggggtccttggcctggcctcagggccccagacacccaccagatcctgcttcctgtctggtgccctgagaaaccctgcyccgcaggccgctgtgcaggcgtgggaagggctgccgggccagcactgtggggctggccgcatgtgtgggctgctgtgcgtgtttgcaggtgtgtgtggaygtcttgtgtctgtggctgtgtgatgtgtctttgcggactgggcccatatcacgctcccacctcctccactgaattgggctcctgtccccacgccttccctgcgtcccaggccagcctgggggccgtgctccacctcccctcccgaactggactcctgtccccacgccttccctccgtcccaggccagcctgggggccgtgctccacctcccctcccgaactggactcctgtccccacgccttccctccgtcccaggccagcctgggggccgtgctccacctcccctcccgaactgggctcctgtccccacgccttccctccgtcccaggccagcctgggggccgtgctccacctcccctcccgaactggactcctgtccccacgccttccctccgtcccaggccagcctgggggccgtgctccacctcccctcccgaactgggctcctgtccccacgccttccctccgtcccaggccagcctgggggctgtgctccacttcccctcccgaactggactcctgtccccasgccttccctgcgtcccaggccagcctgggggccgtgctgtgactgcatccctgaggggcactttggtgggcaggtgtcagggtcagccttgaagccccacgcctgtgccaccaggtgtgtctgggggaggagtgagtctatgtggtggggccctggagattttgggggtcttgcaccctccaattcagcccatgtggcccagctgagcccctgtggggccagggagccacaggcttgtccctggagtttctggtgtgacgggctgggtggtggccatgcagagagggttcagagggtgggcaggaggcttcagatgaggcatctggcaggctggacaggagaagggtgttccagaccaagggcaggtcctgagcccaggggacagagcactagctgtgtggagaaggacccccttgctcccttggcggggcggtcccccccgctgacatggccgtttctggtccattggggtttggagcgagcttgaaggtgggtggctggaggggttgggggtgtctgaggcctggagacctgccctcctgaggtctgagcgcccccttgccatgccgccccagccctggcctggcctggcctgtggtccctcagggacacacagggaggtaggaggtgagggaagggccctggcagcccccagcccgcctgcacagtctcccctgcgcacgccctcaagcttggcgctccctggaaacctgagctgcctcctgcctgctccggccaccgccatgtttaactgagcacgggcagccgctggccaccgccgccgcaccctggcccaccccctggctgggaggtggtcattgggcctggccttgcctgcatggtcccctggcccagagccctacygcaggatgccagaggtaacatggggcagggcctgggatggtagcggggggtccttccgggcaccaggaggccctctgtgccctgtccacactaagctcctgccccagcscctgcttgctgggcccacgggggtggggcggctcattttcctggaatgtgaaagcaaacagagccgccaccgcagccagccycacggaggcctctggagagaaaacaaaactgctggcctaggagcgcctgccccacgctctggaggagagcccggggcagggggacgcacaggcagagccctcagggacaaccgccccaggaggccracggcgacagttcatcccacctggtgcttcctcccaccctgcctgtgcgccacgctggcctcgagccaaaggaattctcccagcaacccgggaaggcggctgggcccgtcggggaggcttctgggtttgaaaacaggctttgcccaagttcccacagctaaagctctgtcacaggcagcctgggtgcccggagtgtttgccactgagacctgggcctgcccgtggggggcacggtaccgagtttgggcagyggcggcaccaccggggagtggcctctggaggcgggaggctggagcaagagactgaccctgtccsttgggcctgcaggatgtcagtgggcccctgagggagctgcgccctcggctctgccacctgcgaaagggacctcagggctatgggttcaacctgcatagtgwcaagtcccggcccggccagtacatccgctctgtggacscgggctcacctgccgcccgctctggcctccgcgcccaggaccggctcattgaggtaccggcccaccagggctgcggggtgccgrgtgccccgcacctgtccacactggggccctgggtccttgcagggaggagggagacgctgggaacctgagctggtgcgcctcctgctgcctcggtgggcggtggctgtgatgaatatttgatgccacacctggccacgyggcgttgggggctgtctgggcccatggcggggctgatacatgctggtggcggcaggtgaacgggcagaatgtggagggactgcgccatgctgaggtggtggccagcatcaaggcacgggaggacgaggcccggctgctggtcgtggaccccgagacagatgaacacttcaagcggcttcgggtcacacccaccgaggagcacgtggaaggtgggccacggcccagggcacagggtgggtgcggtgtggtggctgagcagccactgacacgctgtccccacaggtcctctgccgtcacccgtcaccaatggaaccagccctgcccaggtaagagggtggggtgcccatgagacacagggtgcctctgggggtacccaggcccgacagaggcccccttctccctggagatccgtcctcgaggtgtgctagtgacacccgattttagccctgtcacctccctttaatgcccctgtgggtctcatcctgggtcgtgccacacacaagccacgtggggcccctggggtcggggccactgccttctgtcctctcctgggcaccacctggtaaggagttgccctccagtctctgcctcctcagggagctggcggtggcctcaccccaggcgttgctcacgccggccattcctgcacctgaaccccctctgcaccatgagccggccaggccacctgcctgtcactgccaggcgcccggtgcctgccccgccgcatctggagtccaccagaggcccgaggccccctgccgagtggaggagcacacactggggggkkgtgtgcctctgtgcacatgtgtgcgtgtgcaggtgttgtgtgtgtctgtgaaaccacaatctgcccttggtttcccagctcaatggtggctctgcgtgctcgtcccgaagtgacctgcctggttccgacaaggacactgaggtatggatgttctccactcctgagctcacacgtggggttgctagaggccttggggtrggcgtctgtggagatgtcagcccgggcagtggggtctctgttcaggaagtcctcgtgagccccagccccagcaggcagcctctgttggttgctccctaggaggggccaccgtctggggtgtgggacyagggctcactccagacaccccacccaccgtgctcaccccaggatggcagtgcctggaagcaagatcccttccaggagagcggcctccacctgagccccacggcggccgaggccaaggagaaggctcgagccatgcgagtcaacaagcgcgcgccacagatggactggaacaggaagcgtgaaatcttcagcaacttctgagccccttcctgcctgtctcgggaccctgggacccctcccgcacggaccttgggcctcagcctgccccgagctcccccagcctcagtggactggagggtggtcctgccattgcccagaaatcagccccagccccggtgagcccccatcctgcccctgcccaccaggtactgggggcctgtggcagcaagatagggggagagagacccagagatgtgagagagagtcagagacagagacagagagagagagagagagacacagagagagacagagagagagcgagcgagcgcgcggcagccgcggggcgagggcctttgctgctctgcyggggcctgctgactgaaaggaatttgtgtttttgctttttttccaaaaagatctccagctccacacatgtttccacttaataccagagaccccccccccttcccctcccccttcccctcccccttgggacgcgctctaaataattgcaataaaacaaacctttctctgcaaaccatttcctccccgccccctcccctcagcagcggccgtcctgagtgggagtccctgggacttcccagtggccaagttggggcgcccagcctcttcgtggggaccttgggtaaggccagggaggcctgatgtggccgtaggagctgcccctgcccacctgccctggtgtgggggtccctaggccacaccctgctccccacccagctaccctgtgcgcctgtgccctgctgggggcctgggctctccgaggggcctgaggatggaggccccamgtccccgaggagggcggcctctggacaggcccctcattccgcgcggcagctcccaggcctggggaacgtaggtgtgtgagagcggcacccgggaaggacgcctggcctytggctcagccctgcttggcgggctcccccgtggacaccctgttgactttgcacttccctcccgggccccgcacccccgaaccgaccaccgatcgaccggcaccgctgttgcytcgtaagccatagcgcatgcgcgctctcagrataaacaggccctgcctgggacccacacgcctctgtcttttctgagcctcctccccgtggggtgagaggggtggagggatgaggctgtttcagggagccccctccccgagtctcagcagctggaaacggtctcgttcctgagcccgtgccctgcatccatctgctcccagccctgctccatctcccccgctgacccccatgggaccccctgctgtgtggcacatcctgggcccatgcccatctctcttatttggcagactcagcctcccaccttcaccttccctgtgaagccatccggccccacacaacacccacacgggccaccctttgcccaattcaccctgcgacctctagcagtcacaggtcaagctttgtaccctgtggcgccctgcctgggtccccagtgtccctttcaaggccgggtagctctgtaaacaggggtgggaccctggcagaggctgggctttgagggcatgaaagttcaggagctggcggtgtccgggctgggaagctggggggccggcggtggatagcatgaggggccagggtccccagccagctgcccgggggctgcttgcttccccagcggacttccaacagctggctgcagctggctctccccacttcctccctcccaggttcatgcacaccccctccccctccctgagtacatagcaaagattgtcacgtccccagccggcctcccaggcagccctgctccagacacgcgagcacgggtgtgtacgaacacatccttgtatgcgattcccaggctctctgccccctcagggacagacatcagccagatcccatctgcaaacacaccaaagctttattcaacaggcgtggcttcctgaagcgtaaagccacttcacagacggtggccacagcggcacctcggccagagccatgcggccatcaragaccctgggcggccgggcagagggcttggttgaggcaggcgtggcagcgagggtgcacaggcagacaggtctgctggccgaagcccaccaagagtccattgatctcgtgccacagctccctrtgggggtgggggctgggtcagtgctgacagagggcgggcggggtgagctcttctccctaggaagccccccacatactcatacctaggcagccaytcctccagggcggygcgggtctcctctggggacttggttgccttcttggtccacctcagcctgttggcgattctgtgcacatgcgtgtmcactgctgctgggaggccaagcggggtgaacaggggcacactccaccagcctagcccgtgcccctccccgcccagaggcgagtctgccaccacccccgtggccctccagttagacattggaaccgcaaagccctggctgcaagcctacatgtgaccatcttggctgcccctgaggtgctggggcaggggctgagccctctgttggggtgcaggcctctctcccatcacctgagccagcctggggggctctgttctgggctgcccactcccaacactggtgctagttggatgtgtgggtggtggggtctctgctttgggcagggcctgggggtgatgactcggctctgcttggagctctattccccacaataacagcgacagctcgcttggacaaacgcttgctgggggccagaccctgccagagagattggccagctcagtgagtcctcatgaggtcctacggatgctgaaaccgaggcccggcaggatcccgactccgaagcacctctcagccctcagcctccccaggaacgtggccctgtccccggaagggtccatccaggcttccctctgtctgtctcctgtggcctgaggctcctctcggcataagcactggctctgggcaccaggctgggtggcaacagctctgcctggcaggccggcatgaggtcactgcctgcagacctagcacctgccactgcagcggtcagggacacagcgggagcatgccctggccggccgcagctgctgtccacctgggttctggctcctgctcccctcagctggccaccccaggcgtctgctcactggggctcccttctcccacccggtggccccggccagctgcagccccagccctgcctcctcctcccgtgtttcccaaagagaaagccgaggcctgcaccagctccttcgctgctgcctagaaaaaggtgtccgagggtgtggggagaccacaaggcctgaggggtcacacccctggggctctgagcctcagtttcctcctctgtaacacggaagtggccatgcttcaaggctgagtcaggccacgtcacgttgtgtgagcctcctgcccacctggacagtgaatgacgaggactgcctcacccactttgtggccagagcttagagaagccaagggcctggcccagagtcacccagccaggaggtgcagagctgggaccggagccagcaatctatggctgtggcatttttttttttttttaaacggagtcttgctctgtcacccaggctggatacagacaatggtgcgatctccactcactgcaactttcgcctctgggtttcaagcgattctcctgcctcagcctcccgaggagctggaattacaggctcctgccaccacgcccggctaatttttttttttttggtgagacggagtcacgctttgtcgcccaggctggagtacactggcgcgatctcagctcactgcaagccccacctcccaggttcacactattctcctgcctcagcctcccgagtagctgggacaacaggcgcctgacacaatgcctggctaattttttgtgttttttagtagagacggggtttcaccatcttagcctggatggtcttgatctcctgacctcgtgatctgcctgcctcggcctcccaaagtgctgggattacaggcgtgagccaccacgcctggccacacccggctaatttttgtatttttagtagagagcgggtttcaccacgttggccaggctgatcttgaactcctgacctcaggtgatccacatacctcggccttccaaagtgctgggattacaggcttgagcccttgtacccagccagctctgacattttaactgagagcgtttctctttcggggaacccctaggaggcagccctggggtctccttgcaggtggtcaggcccacagacacctggagagggaggtatttccacatggctgtctcttgtgcccgctgctcccaaagcccgttccctgcctggctgcgggcagggaccttcccccacagccctgcccaaccacgatgcagcaccccagggacacgggcagctgaggacagccgcccagataagctcaagtgtccactgagaggctggcaggtggtgacgctgggagtctcagtcgggaggaggccctgccccggcgcacctggcctggctctggctctttggggctgctgtggctgttcagcctcaccaggtggccccggctcagaatagaggcccccggcccttggtggccctcttgcccaccagaaagtgctgcaagccccccgcctccggcacaggccccctgcaggagtcccaaaggggcctgggatgggggcacacagagggcagggccaagccctggtttctggactggctgggcccggctgcgtgtggccttaggagccccaaatcctctggacaaagccgaggaggaggcagccccaccccaaacccaggggtctgtctgcacccaactgccaagaagcctccggtgctaggaagagacaccaggacctgggaaaaggattcaaggagggccctccccccagtgcctccctccccaccctcccctcttctccctctcaaccctcccctcttctccccgcagcacctccctctccaccctccccccatcctcccagcgcctccctccccaccctcytcccccattcccccagcgcctccctccctaccattcccctcctgtccccgcagagcctccctccccaccctccccctttctccccccagcacctccctccccaccccacctgctgaggggatactcttcctcctccctcctcagtccttacctccccactctgccctcatctcattccagaacttcctgctcctggccctctctctcgcatcatggttttacagatgctgttccttctgctgggaacacacttcctcctcttggcctggctcaccccaccttgctctgcagctctcaggtgaaggatgaccttgggggccttcccagaggccctgggcccaagccaggccccaagagcaccctgcacaaccatcagggtttccactccacgagtggggaattcctcgctccacatttctcccgaatacaacgcagatggagtccagctccggggcctctctcagagccctgcacggagcaggtgctcagcccatgtgacctcctgccccagcacctgtctctgagtggggctggcctggctccaccctgggagcacctttctgactctatgggctgggtggaggaccagcatgctggaagtggagtcacaggtcacaaggatgtggggaatcccaagagcagccagtgggctggagccagccccgccctcctctactcaccaatgcctgacacagtgccccaggccacagccatagccaggtgtgccatcttgggcccaacacccggcagcgccaccagctcggccacagaggctgggatgtccccaccgtagtgctgctgcaggatggcgctggtctgcttgatgtatttcaccttgctctgaaagacaggggtgggttcagccttggaggcaagggcacagcccaacctgggaggatgcagcccccaggagacccacaggtggccagagctacctgcacctgctgaggacgtgtgcaagctcagcccccgccccccaggaggcgggaacaagcggagggcagcagggaggcccaaggtaggcctgaccccctcctcccacccgtgtgggccaatgatgcacgtgtaggctctggctggggttcccctgcccgtcattccctgccagcacccaggccaggccaagcaggccagccgctcccaggagtggggcttggctgcacctgcgccttcaggaaggagggctggagctggggcttccccaccagctgccaggcctgccgggtggttcccatcctgtgcctgagtggagagggctatttaaaacccatctgagaaactgcggcccacrcgggtgccaaggggaagcggccccacccaccaagctgctttcaacagatccgcccaccaccatccagtgctcggcggggttggggagcagcctccccagggctcctggagggtgaggggctctggacaggagggggtgacacaccgggagaggctagcagtaaacaaagggaaaggcgggtgggcaggcagccttggcggtgaggaagggtgggcaggcggcgaggcggggaagcagaggaaggaagggaggatgcgaacaggaaggccaaggagctgctgggactgggcgtcaggcctcagggccc

SEQ ID NO: 8826 - DNA, 14271 bp, Homo sapiens
gcctgtaatcccagctactcggggggccgaggcaagagaatcacttgaacctgggaggtggaagttgcagtgagccaagatcatgccgtagcactccaacctgggcaacagagcgagacgccatctcaaaaaaaaaaaaaagtccaggcaaggctcagtggctcatgcctgtaatcccaacactttgcgaggctaaggtgcaaggattgcctgaggccaagagttgaaggctgcagtgagctatgatggtgccattgcactccaacctgggcagaaaagtgagactccatctcttagaaaaaaaaaaccaggccgggtgcagtggcacatgtctgtaattccagcacttcgggaggctgaggcaggcggatcacttgaagtcaggagttcaagaccagcctggccaacatggtgtactttctatactaaaagtacaaaaattagccaggcatggtgacatgcacctataatcccagctacttgggagactgacataggtggattgcttaaacctgggaggcagaggttgcagtgagccgagattgtgccactgcactccagcctgggtgacagagcgattctgtcttaaaagaaaaaaaaaaaaaaaaaaggctgggtgcggtgtctcacgcctgtaatcccagcactttgggaggccgacgcaagtggatcacctgaggtcaggagttcgagaccagcctggccaagatggtgtactttctctactaaaagtacaaaaattagccaggcatggtggcatgcacctataatcccagctactcaggaggctaagacaggagaatcgtttgaacccgggcagcagaggttgcagtgagctgagattacgccattgcactccagcctgggcaacagagtgagactccgtctccaaaaaaaagaaagaaaaaaaatccagggccagtgtggtgactcatgcctgtaatcccaaaactttgggaggctggcccagcatggtggctcacacctgtaatcccaaaactttgggaggctgaggcaggcggatcacctgaggtcaggagtttgagatcagcctgactaacatggtgaaaccccatctctactaaatacaaaaaattagccgggaatggtggcatgcacctgtaatcccagctacttgggaggctgaagcaggagaatcgcttgaacccaggaggcagaggttgcagtgagatgagatcagtcattgcactccagcctgggcaacgagcgaaaccgcctctcaaacaaacaaaaaaaaactttgggaggccaagatgggcagatcacttgaaaccaggagttcgagaccagcctgagcagcatagaccctgtctcaacaaaaattttaaaatattttttaaaattagccaggcacagtggcacacacctgtagtcctagatacttgggaagctgaggtggaaggatgacttgagcccatggttttgaggttgcagtgggctatgatggtgccactgcactccagcctaggccacagagcaagacaccatgtcaaaagaaaaaaaaatccaatcacctctgctcacctccctctttctctctctctctctctctccctccccctctctcccctgcaacacacacacacacacacacacacacacgcacrcaygcacgcaccacacactctgacgacctttaaaggcttcctgtggctggatgaaatctagaggctttacccttcttgcatggccctgcatgacctggcccctgccctcctctctgacctcatctcccacccgcctcccagtctctctctctgctccagccacactggccttctgtttgtcgtcaacacccccagcttggttccgccttccagcctttgcagtagctgctccctttacctgaaatgctttgctcccaaacttttacctggtcactattttttgtcatttgggtctcagctccagtgccacccaaacactcaaagaggattttgctgactactgtatttaaaagtagctccctgccactcttacaacatcagcctgtcttattttctcatagtaccaatttcttcttcagtttctttcttttccgtctggcctcactggaatacaagctccacaggtgctggtaccttctctgatccctttgcctccatgtccctcctgccttaggacaatgcccagcatgtgttaggcacgcagatactcactaaatggaggaatggatgaataattcataaagcaggataaagttcaactttaggcttgtggctcagattggacttacatttagagtcagatttaagtttagtgttaggagtggtggtaaactggtttcaagattagccctagaaacagggttgggttggggtagaggagaagttttatttagggggttattaattgggatgtgtttagatttaaggttagggttacagttggggttgagtttgagttgtgatttgggttgaggttaaatttgggttagggttgatgttggtattaaatcccaattcaggttttgaggctaagttcaagtttgaagctaatgtcatttcagtctcatttggaggcttcagagatttcactagtttctccacaaagaccactataaagactgtatttccctgagtctggggcacaagactccagtcatcagctctcccacccagggaaagtcccaaaccaactgctggcctgcccaagaaagaaaccaaattcatacaacctccgaaactgagattgaaaccaagattggcccatctcaaggagcatccttcgcatatctcacatgcacgtgacactgagcctcagcccagtcttacccttccttcctctgtgtctctcatgtctccccatcacccttcttgccttcccttttttgtctttcaatgtcccattcttcctctttaatttaaatttctctctgtgtctcactgttaattgcaatacctttttttgtttgcttgttttgttttgttttgttttttggtttgtttgtttgaaatggagtctcactttgttgcccaggctggagggcagtggcacgatctcggctcactgcaacctccgcctcctgggttcaagcagttctcctgcctcagcttccctagtagctaggattacaggcgcgtgccaccatgctcggctaattttttgtatttttagcagtgatggagtttcaccgtattagccaggattgtctctatctcctgaccttgtgatctgctcgcctcagcctcccaaagtgctgggatgacaggcatgtgccactgctcctggccttgtaataacattttatattttaatatagctcagctggggtcccagtccatcagctcataccattagagaagcagaaagagacaacaggaagcaaaaaggaccctgagagaaagggcaacacagagaaaaagaaaggagcaggggctaaaagggaaacccacactgacacaagagataataaggttaaaagaatgagaagaaggttgggcgcagtggctcacgcccataatcccagcactttgggaggccaaggctggtgggtcacctgtggtcaggaattcaagaccaacctggccaacatggtgagaccccgtctctactaaaaatacaaaaaaaaatttggcgggcttggtggcgtgtgcctgtaatcccagctactcgggaggctgaggcaggagaatagcttgaacctgggaggcagaggttgcagtgagccaagatcgtgccactgcactccagcctgtgcgacagtgagaaactgtctcaaaaaaaaaaaaaaaggaaaagaaattttctgacctatctcatctgatagtaggttataagaccctcattccagaagaggttctgccctatacctgggaggaaggaatgctgtacagagagaccaagaagaatatggccaggccttgctgggatccccccagtcccagtctgtgaccattagatgatactccttttgttcaattacatttctgcacagctgttcattcttcatcaaatctaagcataaaaatagttttcccctgggtccttgggtcttcatttctgaaggctcccatgtcacctaaaactttgattaaataaatgtattatgcttttctcttgttaatctgtcttttattataggagtattggccataacccttatgatgggtcaggaagggatcacccctttctgcccctacagaaataatagctaagactagtaaagcataaaaggcaaaggggcaggtcctcaagtagagaagaacaggagaaatagctcatacacacccagaatgttacttacatgtccctccatgttacaccaagacccctcagggaccttgtgcctggggagagaagtggtctgccccatgcaacagtgggctttaccccgggtcaccaccagccccagctccaacccctctaacactctccaagtaaaatcacatcagtagcagtaataatatttgaggtgacaagttggtattatctcaaacttaggaaaagtgaataaagtcatctttagaaactgctttttttaaaccttgtaacttgcaagctaagtgaaaatgggctcatgtatgagaatgttcgtgttagacattttttgtgttagacaaaaactagaaacaaaccaaatccccatcaacagaatatattagaatatattgatacaatagaatattacatcataatttttttaaaaaacattactgatacatacaaccacgtatatgaatctcacaaacataatgctgactgaaagaagtcaaacagaaatgagtacattctgtgtgatttcatttatatgatgccccaaaccaggaggaaataatctatggtgataaaagtgagagagtggttggttatctttggagggtatcagcagggagggggcatgagggaacctgctggggacctgaaaatacgtggagctgggtggtggctacatacagatggaaaaattcatcagctgtacacttaagaggtgtccacctcatacctaagttacatatcaataaaaaggaaaaaaattttggaaactttttttttttttttttgagacagagtcttgctctgtcccccaggctggaatacagtggtgcgatcttgactcactgcagcctccgcctcccaggttcaaataattctccagcctcagcctcccgagtagctgggactgcagatgcgcaccagcacgcctggctaatttttgtatttattatagagatggggtttcaccatgttggccagctggtctcaaactcctgacctcaagtaatccgcccacctcagactcccaaagtgccaggattacaggtgtgagccactgcaccaggcctggaacaattttaaaataatgtattggctctgcaaatgcagcttcagaacaagtcccttagctgtccccaccccaccctaagtcaccacccttaagcctcacccatgtggaattctgaaacttcctttgtagaaaactttggaaggtgtctgccacattgatcctggaatgtgtgtttatttggggttatataaatctgttctgtggaagccacctgaagtcaggaagagatggagggcatccttcaggagtgagatgagacctcatcatacttgactgtccagcatcatctctgagtaaggggaccaaaaaatttatcttccaaactaggacactttcaagagtggaagggggatccattaatattttcacctggacaagaggcaaacaccagaatgtccccgatgaaggggatatataatggaccttcttgatgtgaaacctgccagatgggctggaaagtccgtatactgggacaagtatgatttgagttgtttgggacaaggacaggggtacaagagaaggaaatgggcaaagagagaagcctgtactcagccaagggtgcagagatgttatatatgattgctcttcagggaaccgggcctccagctcacaccccagctgctcaacyrcctcctctctgaattgactgtcccttctttggaactctaggcctgaccccactccctggccctcccagcccacgattcccctgacccgactccctttcccagaactcagtcgcctgaacccccagcctgtggttctctcctaggcctcagcctttcctgcctttgactgaaacagcagtatcttctaagccctgggggcttccccgggccccagccccgacctagaacccgcccgctgcctgccacgctgccactgccgcttcctctataaagggacctgagcgtccgggcccaggggctccrcacagcaggtgaggctctcctgccccatctccttgggctgcccgtgcttcgtgctttggactaccgcccmgcagtgtcctgccctctgcctgggcctcggtccctcctgcacctgctgcctggatccccggcctgcctgggcctgggccttggtgggtttggttttggtttccttctctgtctctgactctccatctgtcagtctcattgtctctgtcacacattctctgtttctgccatgrttcctctctgttcccttcctgtctctctctgtctccctctgctcaccttggggtttctctgactgcatcttgtccccttctctgtcgatctctctctcgggggtcggggggtgctstctcccagggcgggaggtctgtcttccgccgcgtgccccgccccgctcactgtctctctctctctctctctttctctgcaggttctccccatgacaccacctgaacgtctcttcctcccaagggtgygtggcaccaccctacacctcctccttctggggctgctgctggttctgctgcctggggcccaggtgaggcagcaggagaatgggggctgctggggtggctcagccaaaccttgagccctagagcccccctcaactctsttctcccctaggggctccctggtgttggcctcacaccttcagctgcccagactgcccgtcagcmcccyaagatgcatcttgcccacagcamcctcaaacctgctgctcacctcattggtaaacatccacctgacctcccagacatgtccccaccagctctcctcctacccctgcctcaggaacccaagcatccacccctctcccccaacttcccccacgctaaaaaaaacagagggagcccactcctatgcctccccctgccatcccccaggaactcagttgttcagtgcccacttcctcagggattgagacctctgatccagacccctgatctcccacccccatcccctatggctcttcctaggagaccccagcaagcagaactcactgctctggagagcaaacacggaccgtgccttcctccaggatggtttctccttgagcaacaattctctcctggtccccaccagtggcatctacttcgtctactcccaggtggtcttctctgggaaagcctactctcccaaggccacctcctccccactctacctggcccatgaggtccagctcttctcctcccagtaccccttccatgtgcctctcctcagctcccagaagatggtgtatccagggctgcaggaaccctggctgcactcgatgtaccacggggctgcgttccagctcacccagggagaccagctatccacccacacagatggcatcccccacctagtcctcagccctagtactgtcttctttggagccttcgctctgtagaacttggaaaaatccagaaagaaaaaataattgatttcaagaccttctccccattctgcctccattctgaccatttcaggggtcgtcaccacctctcctttggccattccaacagctcaagtcttccctgatcaagtcaccggagctttcaaagaaggaattctaggcatcccaggggaccacacctccctgaaccatccctgatgtctgtctggctgaggatttcaagcctgcctaggaattcccagcccaaagctgttggtctgtcccaccagctaggtggggcctagatccacacacagaggaagagcaggcacatggaggagcttgggggatgactagaggcagggaggggactatttatgaaggcaaaaaaattaaattatttatttatggaggatggagagaggggaataatagaagaacatccaaggagaaacagagacaggcccaagagatgaagagtgagagggcatgcgcacaaggctgaccaagagagaaagaagtaggcatgagggatcacagggccccagaaggcagggaaaggctctgaaagccagctgccgaccagagccccacacggaggcatctgcaccctcgatgaagcccaataaacctcttttctctgaaatgctgtctgcttgtgtgtgtgtgtctgggagtgagaacttcccagtctatctaaggaatggagggagggacagagggctcaaagggagcaagagctgtggggagaacaaaaggataagggctcagagagcttcagggatatgtgatggactcaccaggtgaggccgccagactgctgcaggggaagcaaaggagaagctgagaagatgaaggaaaagtcagggtctggaggggcgggggtcagggagctcctgggagatatggccacatgtagcggctctgaggaatgggttacaggagacctctggggagatgtgaccacagcaatgggtaggagaatgtccagggctatggaagtcgagtatggggacccccmcttaacgaagacagggccatgtagagggccccagggagtgaaagagcctccaggacctccaggtatggaatacaggggacgtttaagaagatatggccacacactggggccctgagaagtgagagcttcatgaaaaaaatcagggaccccagagttccttggaagccaagactgaaaccagcattatgagtctccgggtcagaatgaaagaagaaggcctgccccagtggggtctgtgaattcccgggggtgatttcactccccggggctgtcccaggcttgtccctgctacccccacccagcctttcctgaggcctcaagcctgccaccaagcccccagctccttctccccgcagggacccaaacacaggcctcaggactcaacacagcttttccctccaaccccgttttctctccctcaaggactcagctttctgaagcccctcccagttctagttctatctttttcctgcatcctgtctggaagttagaaggaaacagaccacagacctggtccccaaaagaaatggaggcaataggttttgaggggcatggggacggggttcagcctccagggtcctacacacaaatcagtcagtggcccagaagacccccctcggaatcggagcagggaggatggggagtgtgaggggtatccttgatgcttgtgtgtccccaactttccaaatccccgcccccgcgatggagaagaaaccgagacagaaggtgcagggcccactaccgcttcctccagatgagctcatgggtttctccaccaaggaagttttccgctggttgaatgattctttccccgccctcctctcgccccagggacatataaaggcagttgttggcacacccagccagcagacgctccctcagcaaggacagcagaggaccagctaagagggagagaagcaactacagaccccccctgaaaacaaccctcagacgccacatcccctgacaagctgccaggcaggttctcttcctctcacatactgacccacggctycaccctctctcccctggaaaggacaccatgagcactgaaagcatgatccgggacgtggagctggccgaggaggcgctccccaagaagacaggggggccccagggctccaggcgktgcttgttcctcagcctcttctccttcctgatcgtggcaggcgccaccacgctcttctgcctgctgmactttggagtgatcggcccccagagggaagaggtgagtgcctggccagccttcatccactctcccacccaaggggaaatggagacgcaagagagggagagagatgggatgggtgaaagatgtgcgctgatagggagggatggagagaaaaaaacgtggagaaagacggggatgcagaaagagatgtggcaagagatggggaagagagagagagaaagatggagagacaggatgtctggcacatggaaggtgctcactaagtgtgtatggagtgaatgaatgaatgaatgaatgaacaagcagatatataaataagatatggagacagatgtggggtgtgagaagagagatgggggaagaaacaagtgatatgaataaagatggtgagacagaaagagcgggaaatatgacagctaaggagagagatgggggagataaggagagaagaagatagggtgtctggcacacagaagacactcagggaaagagctgttgaatgcctggaaggtgaatacacagatgaatggagagagaaaaccagacacctcagggctaagagcgcaggccagacaggcagccagctgttcctcctttaagggtgactccctcgatgttaaccattctccttctccccaacagttccccagggacctctctctaatcagccctctggcccaggcagtcagtaagtgtctccaaacctctttcctaattctgggtttgggtttgggggtagggttagtaccggtatggaagcagtgggggaaatttaaagttttggtcttgggggaggatggatggaggtgaaagtaggggggtattttctaggaagtttaagggtctcagctttttcttttctctctcctcttcaggatcatcttctcgaaccccgagtgacaagcctgtagcccatgttgtargtaagagctctgaggatgtgtcttggaacttggagggctaggatttggggrttgaagcccggctgatggtaggcagaacttggagacaatgtgagaaggactcgctgagctcaagggaagggtggaggaacagcacaggccttagtgggatactcagaacgtcatggccaggtgggatgtgggatgacagacagagaggacaggaaccggatgtggggtgggcagagctcgagggccaggatgtggagagtgaaccgacatggccacactgactctcctctccctctctccctccctccagcaaaccctcaagctgaggggcagctycagtggctgaaccgccgggccaatgccctcctggccaatggcgtggagctgagagataaccagctggtggtgccatcagagggcctgtacctcatctactcccaggtcctcttcaagggccaaggctgcccctccacccatgtgctcctcacccacaccatcagccgcatcgccgtctcctaccagaccaaggtcaacctcctctctgccatcaagagcccctgccagagggagaccccagagggggctgaggccaagccctggtatgagcccatctatctgggaggggtcttccagctggagaagggtgaccgactcagcgctgagatcaatcggcccgactatctcgactttgccgagtctgggcaggtctactttgggatcattgccctgtgaggaggacgaacatccaaccttcccaaacgcctcccctgccccaatccctttattaccccctccttcagacaccctcaacctcttctggctcaaaaagagaattgggggcttagggtcggaacccaagcttagaactttaagcaacaagaccaccacttcgaaacctgggattcaggaatgtgtggcctgcacagtgaagtgctggcaaccactaagaattcaaactggggcctccagaactcactggggcctacagctttgatccctgacatctggaatctggagaccagggagcctttggttctggccagaatgctgcaggacttgagaagacctcacctagaaattgacacaagtggaccttaggccttcctctctccagatgtttccagacttccttgagacacggagcccagccctccccatggagccagctccctctatttatgtttgcacttgtgattatttattatttatttattatttatttatttacagatgaatgtatttatttgggagaccggggtatcctgggggacccaatgtaggagctgccttggctcagacatgttttccgtgaaaacggagctgaacaataggctgttcccatgtagccccctggcctctgtgccttcttttgattatgttttttaaaatatttatctgattaagttgtctaaacaatgctgatttggtgaccaactgtcactcattgctgagcctctgctccccaggggagttgtgtctgtaatcgccctactattcagtggcgagaaataaagtttgcttagaaaagaaacatggtctccttcttggaattaattctgcatctgcctcttcttgtgggtgggaagaagctccctaagtcctctctccacaggctttaagatccctcggacccagtcccatccttagactcctagggccctggagaccctacataaacaaagcccaacagaatattccccatcccccaggaaacaagagcctgaacctaattacctctccctcagggcatgggaatttccaactctgggaattccaatccttgctgggaaaatcctgcagctcaggtgagatttccggctgttgcagctggccagcagtccggagagagctggagaggagccgcattctcaggtacctgaatcacacagccaagggacttccagagattcgggtgtctaggcttcaaatcaccctgtcctaactctgcaacctgaaccagccacttaacctatctatccaatggggataggaatgtccaccacacatagggcatgtgagagaaggcctgacctccatcagaggacctcactcagcccttggcacagtgggcacttagtgaattctggcttccttcaaccagtttccagctgttctatccccttccattctctcagtgggtgaaatcgaagagactgaggacaataaagaacaaggaaccgaactgccggacgtggtggcatgcacctgtaatcctaccactttgcaaggccaaggtgagaggatcgcttgaacccaggagttccagagcaacctgggcaacatagtgagatcctgtctctattttttaaaaaagaatgaaacataggaataagatgtgggtgaaggactcacatgccggcttggtcccactggtctttgtggtgaaggaggggagaggtgagaggtgggtaatccggaaagagaaaagcaccccctccctggatgaaggctcttctggagagagtcaaagacaaataagggtggggcgcagtggctcatgcctgttatcccaacactttgggaggctgaggtgggaggaccacttgagcccactagttcaagaccagcctgtgcaacatagcaagaccttgtttctagaaaaaaaattaaagattagtcaggtgtagtggtgcatgcctgtaatcctagctcctcaggaggctgaggcaggaggatcactcaagcccaggagtttgaggttacagtaagctatgatcatgccactgtacccccgtctgggtgacagaacgagaccctgtctcaaaaaaataataattccaaaaacaaatatggagacggaaattgagcccccctagactgggagcccccactgagttcggaaattaggctttacctccagccctggggtgccaggcaggagaaaaccatgtggtaggctgagggggtagggtgacccattggggtgacctakatagggccttgggtcaccctctgcctcctccagcctgtggctgaaagtcagccatgaagtaatgggggacactgttactcatcccagaagcacccacacttactcacttttgggaagggggacctaaagtgtgaaaaaaaggtgaggattttccgtctcaccctaaatgggacaccctaagtggggcatcggtttttcctcctccccagaacttcctggtgttttcaggcaccacaggctccttcctgccatccccatctctctctaatattctccccttctttctccttcagcctcctcccttcagaccccatgagccttgaattaagctccttggaggagaagagttgactgtcgggtaggagacagagaggccttcaggcagctctagggggagaagtgcggggcccctccaggcttcattcctctgtcatgataggggcttactctgctgctgggcctttctgagtggtgcttgctgggctctgtaatgacccctctcactgttggggggtacccaagagaaaagagtatggtgcagagtctggttgggaccatgtggccctgaaaatcaggatgcctagagaa

SEQ ID NO: 8827 - DNA, 24054 bp, Homo sapiens
  misc_feature (1)...(24054): n = A,T,C or G, or insertion/deletion polymorphism (see Tables 1-2)
ccaggctggtcttgaactcctgagctcaagtgatccacccaccttagcctcccacagacctattattttttcagaaatagggtctcatgggtcaggcacagtggctcacgcctgtaatcccaacactttgggaggccgaggcgggtagatcatgaggtcaggagtttaagaccagcctagccaatatggtgaaaccccgtctctactaaaaatacaaaaaaaaaaaaattagccaggcatgttggcggttgcctgtagtcannnnnnnnnnnnnnnnnnnncaggcatgttggcggttgcctgtagtcacagctgctcaggaggctgaggcaggagaattgcttgaacctgggaggtgaaggttgcagtgagacgagatcgcaccactacacttacagagcgagactctgtctcacaaaaaaaaaaaaaggaaaagaaatagggtctcactctgtcacctgggctggagtacagtggcatgatcttagctcactacagcctcaacctcccaggttcaagtgatcctcccacctcatcctgctgagtagctgagactacagcacacgccgccacacctggctaatttttaaatttttttgtagagacaggatctccctatgttgctcaggctggtctcaaactcctgagctcaagtgatcctcctgcctcagcctcccaaagtggtggggttacaggtgtgagtcactgcacctggcccatccttcaggtctctcgaaggtaaggctagagctagtgtcatctgctctctaccctgaccctatctctcctctgcagcctgtgcctgtgacccacagggctccatcttgcccagctgtgattcacacatgggcacctgcttcttcagagagggcatcttagggctgaggtgccaggcatgtgctcatggctccagaggtgccttcccacactgcacctcctgtcccacctgcttcaccttctgagaccaactcctggctctgctcccactgcagctggaagctgtggcccaagaggtggccaccctatgctaggggatgcctggtgggggtgttaggggccagggtggacacctgcaggtcctagattgggtactgtagcaggcacaggctgctccctccaacctgggaccctgcccactgttcagtgggctcttgttgccttccacaactcctcccatagcctggacatagagtcacagccttggagcagcatcaacaacaggtacacagccagggggactgtgggtgggagccatgggggagtcacaggaaaccatggcttggacatggtgttgtaggcaacatattccacatctgacccacgcccaccagctgcagcaaatccaggccatagcaagctccacaggaatccaggcacaggagacatggtattgggaaaggggaccttggggcatgactgccatgacccacatgcaagcagccgtgcagatcatccagcgcttcctcatgggtacatatctgcttgttgcatgtctgttcacagccaagggcagggttaatagggtatgcaggacactatcatgatactccttccagaatgaggaatattcatcagggctgaccaggggtcaagtgggaacactagtgtgtgcgtaaattttttttttttttttgagagggagtcttgctctgtcacccaggctggagtgcagtggtgcaatctcggctcactgcaacctgcgccccccgggttcaagcgattctcccacctcagcctcccaagtagctgggattacaggcacactgtaatttttttttgtatttttagtagagacggggtttcaccatcttggccaggctggtcttgaactcctgacctcatgatccacccgccttcgcctcccaaagtgctgggattacaggcgtgagccaccgcatctggccatgtgtgtagataaatttttaacaactggctgtgagtcaggggaaactgatttttagcatttgtcaatatccatgatgtaagtaatgctatcatgattgatttcagtccataccatttgacaacttatttgcaaaattcctgaaaatttaacaattggctctttttattttagtattattattattatttttgagagggagagtctcgctctgtcacccaggctggagtgcagtggcgtgatctcgggctcaccacaaccgccacctcctgggttcaagcgattctcctgcctcagccttctgagtagctgggattacaggcacccgccaccacatccagctaatttttgttatttttagtagagatgagttttcactacattggccaggctggtctcaaactcctgaccttgtaatctgcctgccttggcctcccaaagtgctgggattaccctttttttattatcattttattttttattttttttagagacagagtctcgctctgtcacccaggctagagtgcagtggtgtgatcttggctcactgcaagctccgcctcccgggttcaagcaattctcctgcctcagcctcctgagtagctgggagtacaggcacatgccaccatgcctggctaattttttgtattttagtagagatgggttttcaccgtgttgctcaggctggtctggaactcctgagctcaggcaatctgcctgcttcggcctcccaaagtgctgggattacaggcgtgagccactgcgcccggccaacaattgcctcttgtaagcctccagcacaccactggatagttgtgtctaaggcaggatcagtgagaggctagggtcagggtttgttggctcagagttcagggttcaggcctaagatccctaccctcttccccacagacaaaggtgtggacaccacaagtgtggagctggctgtcagtgccccttccccaaggtgggggcagtaggcattgctcttctgctgggtcagatccagggtgctctccctgtaccggatgccatgggccagaagctgcccaaagctgaaggcatcctccatcaggcagagtgaaccaggtgaagggccaggaggctggaggtggaagtcagagggtggccagaaaagggatgcctaactgaacacctgtgttcttcaaggagggtacaacctgggcccagcaccaagcactggatgttcagggggtgctggctgaggggggaatggaactcatgcaggggccgcagagcaagggctacaggaagtgaagctggcacttgaaggcctggagggcactgtacaggaggtgataccctacttgtaccctcagctcctttacatcccttgttcaatgactgctgtgatttccattctccctgagatccttgactcactatgataccacagtgctaccaagtaccttgaccgtgataacactcagcctagttgctactgtgctgtgtcctctctgtgaccccctaacctttgccccaggtagtagggcgcctggcccagatggcactggcagttgaggtgaccccagtcccagggcgtctgtccagtgtagctaaggtgctcagggcatgttttgtcctgagtcagcagcaggcccaggaggcagaagaatgggcagcatgagtcgtaggcagggctgagggcctgggcaagatgaaatggggaagagtgggcactggggtctcagggacccctctggaacagtggaaagtggggtttgggctggggctgggctatactggactgaggcgggatctcagttctaaattctccttttctccaggaaccttaggcagtaatatatttgaggcaatatattctgggtggggtggggattcaggtccagccctgccctaggagttgtaggtggcccctttggctgtggccgagctgcaggaggacacatatggcctggtagccactgtgcaggatgcaaaagaatgggtgcagcaggcttgagctgaggcccaggagctcctgaagaaggcataaagcagcttcagctgcctgcatggtgcatggctggcctgcaatagggcaggcacagggaacggcttagggtcagatggaaaggtcagggccagaatagggatgttgtggaagggttaaggctgggtccagatcagatcttgactcatgtagggatcagggctagggtcaaggtttagaccagggatcaagtgttgattaggttcagggtttatttaaggttagggctgggtcagggtcagggttgtgatagagactgggaccaggatcagaggttagagccaggggtcagagcctggctcagatgacctgaccccagggttggagtgccgcctgacacagaatgcacaggcactgggcaagaaggcagccaccctgcaggccctggagcagcaggcagctgagctgcttgggcacatgatgtgctttgccaccaataagtatgccacctgctaattactgtctatggaagccattaagaaggactgtgggatcacctgggtaactcaaagtggccctagagtgatccaggaatctcctggccttgggagaccaaagatcctactgagtgcccactgaccctgagtgacccccccatgtggccccacgatgtcccccagtggccctctgaccttgagaaagcagacagatcatgtaactccctgaggccatctagtgtcccagaccttgatacacctttatctctgagtgatctaaaactgtgagactacagtgctggcattctccactcaaaataaatagatggggcctggcactatttactggctcatgcctgtaatcccagcgctttcggaggcagaggcgggaggatcacctgagatcaggagttcaagaccagccaagccaacatggtgaaaccccatgtctactaaaaatagaaacattagctgggcgtggtggtgggcgcctgtaatcctagctacttgggaagctgaggcaggagaatcgcttgaacctgggaggcagaggttgcagtaagcggagatctcgccactgcactccagcctgggtgacagagcgacactctgtctcaaaaaaaaaaaaaaaattaaaattctcagtaatttctagtatccctgatcccccaggttgactacatgatcctcagggtgactggagacctctactccggatatccagaataactcccagcgatgcctaaagtccaacggattgactgacccccacccaaccctcacccaacccccacccccgccgcccccatgctcctttgtgaagtggggtgattcccctgaggaactatcatcagctttcttccctggatggcagctcagggcactccctgccgggactgtggaggcggcaggccagacccagccctaaagaccggaggaccccatgtttcccccagcttcccgttcccagggccctgggtggggcgcgccccatatcccccacccactttcctccttctctccccctccacgccgccgcgcacattccaaccccaggctcctgcgatcccggcaggccaaaaagtctggagcggataaatagccacaagatccggagtcgctcgccgtagctctggtccaccacccagagcctatttccatacagggaaacccgcagcacttctcgtgcctacttaccgtagtgactagtgggggaggcagtgacccccctggagctgtgcttcgggctgggtgtgcactttccccatctctcccccagccccattctgtccagtccctaggactacccgagagccccccacagccctgaataggggcatgtgttgctcctgcttgtgccctccagcctctctgttgatgctggagccctgggatcaaacggctgagttgatggtaatttccacggcgcccatgacgctgaggggaaaaggctacggtctccttggtccagagttggagatcccgaagatctctcatttgctcctgccatgcccccaacttcgtgagccctcttccaaggatagtttaaagcaccaaaccccttaccttcccctggccctcgtataggtgtgggcttgggggcacaataaagatttgtgggtgaagtggtctgtctctggttcctggggcgaaggcagtttccggagggaaggggtagggttggggtgggggcgctctccgcccggtgttgcgctccttcccagaatccgctccggcctttccttcctgccgcgattcccaactttgctcaaagtcgctggactctaagctgtcggagggaccgctggacagacctgggawctgacagagggcctggwgggaaacaggccaaagacccacaggcagagttgacacggaaccccaaagcaaggaggagggctcgggcccgagaccgttcacctccccttatccctgttcccctcttcaggatggagctgacctcaagggaaagagggaggggacagcctctgccctgggaacttcgactgggcctactgctaagcggtgagagggcctggtgggggctgggggttgtggaatgtgatggtaggtcctggtagttgcccttggggcacatgaggtggagccactggataggaactcagcggaactgactgagctactgtccccagtgctggctgccacactggcacaggcccctgccccggatgtgcctggctgttccaggggaagctgctaccccgccacgggcgacctgctggtgggccgagctgacagactgactgcctcatccacttgtggcctgaatggcccccagccctactgcatcgtcagtcacctgcaggtgtggctggggacagggtgtgacgccgagtcagggtggggctggcactgcctgaggcactgattctaatccccatccaacccaggacgaaaagaagtgcttcctttgtgactcccggcgccccttctctgctagagacaacccacacagccatcgcatccagaatgtagtcaccagctttgcaccacagcggcgggcagcctggtggcagtcagagaatggtgaggccatgggtggggcaaaagtgagcagggctgcccaccagtagctttgagtccttgacttccgattcctgtcccaggtatccctgcggtcaccatccasctggacctggaggctgagtttcatttcacacacctcattatgaccttcaaggtgcctgcatatctgggagcctgcccgaatcaccctgcttggctctccattgcccctggacagagcctcagctccttaacacagcctccttgagcatggatgcaggaggctccttcatcccttcacaccttccatttgcctccaggcctttgcacatgctcttctgcctttccaatcccaggctgggtcaggcgctgtctccctgagccccatgaaccctgagtctccccattagaggtggctacctttgctggtcattatctggcttccaccagtcacccccactctctgtgagctatttgagggcagtcttgggctgagcagggctcttgatggctctgggttgggcttgggtcctggtgcctgctgatcagctatgcccccctacccagacatttcgccctgctgccatgctggtggaacgctcagcagactttggccgcacctggcatgtgtaccgatatttctcctatsactgtggggctgacttcccaggagtcccactagcacccccacggcactgggatgatgtagtctgtgagtcccgctactcagagattgagccatccactgaaggcgaggtgagggctggcatctgggctgggggctggaagctggggatgatgggcctgaggcaaggtccagtgtgactatgaactccctgcttctccaggtcatctatcgtgtgctggaccctgccatccctatcccagacccctacagctcacggattcagagtgagtgctccaccctttgagtctggcacagtccgtgtccggctagggactatttggggcctcagtaactattttgggtgcttcctarggcaggtgccaagcccagtttagctcgggtggcagtgtataggaggtctttcaaggtgaccttggcagctgagcccctgggtggacatggggcagcaagggcctgcctggtcagttggccccccttcccccgcctcagacctgttgaagatcaccaacctacgggtgaacctgactcgtctacacacgttgggagacaacctactcgacccacggagggagatccgagagaagtactactatgccctctatgagctggttgtacgtggcaactgcttctgctacggacacgcctcagagtgtgcacccgccccaggggcaccagcccatgctgagggcatggtaagrggcttcagacggttgggatagggctaggggcaggggcggacatggctgagcagtgctgacaacctacctgccaacctctataggtgcacggagcttgcatctgcaaacacaacacacgtggcctcaactgcgagcagtgtcaggatttctatcgtgacctgccctggcgtccggctgaggacggccatagtcatgcctgtaggagtgagtgagatcttggcctccatagctccagcactctgcagcctggctgtgccctgggtagaacctagagctagttggtcaagcccctaaaacccaggctgtatccaaagagtatgcagaccttgatgccccttgggaccccctcaatcctcctctgcagtctgctctgggtagggaaccagtatgatgctgaggccttgaagtccctgagcccctacccacaaattctggcctgtgatagggatctaaggtggcctacttcttacccttgtgacctggttcctcatgtggcctttgccctgcccttcctcccctgccagagtgtgagtgccatgggcacacccacagctgccacttcgacatggccgtatacctggcatctggcaatgtgagtggaggtgtgtgtgatggatgtcagcataacacagctgggcgccactgtgagctctgtcggcccttcttctaccgtgacccaaccaaggacctgcgggatccggctgtgtgccgctgtgaggctgggattgggcacggggagagaaagctgagcctggggcaggaactagagagctggactgctgtctaaattgcaggaaattggggttaggggcttggratagaacttgaccagggatccagggtgggatcccttaggcttaggagaggactggcagtgagctagttgagatagggtgagtgaccctgtatctctttttgccgtcagcctgtgattgtgaccccatgggttctcaagacggtggtcgctgtgattcccatgatgaccctgcactgggactggtctccggccagtgtcgctgcaaagaacaygtggtgggcactcgctgccagcaatgccgtgatggcttctttgggctcagcatcagtgaccgtctgggctgccggcgtatgtgtctcctgccctaacttctatgctgacctttaacccctgtcctcttactcctgactcagctgaacatgagcactgccacagtttcccaaagtgctgatggttctccttccctgcaggatgtcaatgtaatgcacggggcacagtgcctgggagcactccttgtgaccccaacagtggatcctgttactgcaaacgtctagtgactggacgtggatgtgaccgctgcctggtgcgactggaaggggctggagttctaggggcatgatttgtccttagagcacagggctggggtgtcacatctatgccagtgggtgggtgctgagagcttaggatccagtcctggctgagaagcctcaggtctgggaggccaaggatgtgggccagtggtctggggggcatgttttcactgaggggtgattgaggctaagacgtgtggttgggatttcctgctgggtggtgatggggtctggaggtctgtttctggcccccagcaactcctttcgtgcagcctggccactggggcctgagccacgacctgctcggctgcygcccctgtgactgcgacgtgggtggtgctttggatccccagtaagtgttgtaaagggggcctgggaagggatggggaaagatcctgagcagaagagaaggttcttcttgagtaaccacagagttccctccaggtgtgatgagggcacaggtcaatgccactgccgccagcacatggttgggcgacgctgtgagcaggtgcaacctggctacttccggcccttcctggaccacctaatttgggaggctgaggacacccragggcaggtgtggggcctccccctaagcagagggctggatgtgggtggacacgtctatgactggagaggtggggttatgggcagtaccttgttgaggggataggggtgatatctagctttggcaggagaaatggggtttggggctggctgtggcagaagaggcaaagcctcacctgagcctccatccctggctgcattatctcccaggtgctcgatgtggtggagcgcctggtgaccccyggggaaactccatcctggactggctcaggcttcgtgcgrctacaggaaggtcagaccctggagttcctggtggcctctgtgccgaasgctatggactatgacctgctgctgcgcttagagccccaggttagaccctgttatctaatctggrgctgaacctctgggtgtgggagcatctcctccatcatcccgttttcccaggtccctgagcaatgggcagagttggaactgattgtgcagcgtccagggcctgtgcctgcccacagcctgtgtgggcatttggtgcccarggatgatcgcatccaagggactctgcaaccacatgccaggtgagggcactggtggtagcactcacaatggcagggggttgtggggccagccctaagctccctgcagggcacctggaagaccccacagctcattcatctgttccttctttcaaatacctccagaatgctggttgccaggccctgttgggcatggctctgttcacagaaaggaagtagacagatcaaggcctgctctctcaggggtctaaggcccagaggccaaggcaggaattaatgggaaatcacctggtgtcactatcaggagggtccacagtggtggtggtagagggtggtagtggtggggttgtggcatcagagcactctgagcagggatgtgcctggtctgattaatgttttattacattttgggtagtatttgtttcatgtttcatgtttcttttttttttcttttcttttccttttttttttttttttttttgagacggagtctcgctctgtcaccaggctggagtgcagtggtgcgatctcggctcactgtaatctcccacctcccgggttcaagcaattctcatgtgtcagcatcccgagtagctgggactacaggtgcacgccaccacgcccagctagttttttgtatttttagtagagatggggtttcaccatgttggccaggatggcctcgatcttctgaccttgtgatctgcccgccttggcctcccaaagtgttgggattacaggtgtgagccaccgtgcccagccctgtttcattgtttcatgttttgtttgtttgtttgtttgtttttgagatggagtcttgctctgtcgcccaggctggagtgcactggcgcgatctcggctcactgcaagctccacctcccaggttcacgccattctcctgcctcagcctcccaagtagctgggaccacaggcacccgccaccatgccttgctaattttttgtatttttagtagagacggggtttcaccatgttagccaggatggtctcgatctcctgaccttgtgatccacctttctcggcctcccaaagtgctgggattacaggcgtgaaccactgcacttgacctattgcttttagtttttgaccatgtaaatattcaaacagaaggaaagagaataacatattgaacctggctgtgcccattatagacattttgccaactgtgacttgtgtttagaaaaaaaattcctctagaccaggcatggtggctcatgcctgtaatcccagcactttgggacactgaggcaggaggatcacttgagcccaggaattcaagaccagcctaggcaacatggcgagaccctgtctctacaaaaaataaaataattagctaagcatggtggtgtgtgcttgtggttccagctgcttgggaggctgaggtgggaggatatcttgaacccaggaggtcaaggctgcagtgagccaaggtcacgcactgtactccatccatcctgggcaacagagmccgcatctcaaataaacaaataaataaataaatcagaaaataaaaagaaaaaagatgagggattgaagaacaatttttgggatgggataaaagaacccaagtatgagtttgcagcacaatgggaaaggaaagccttggagacaaagagagagggggcgacatagtgttgatgaagaggagcagccattgtaggttgtaggtcggggtcagaggaagcgtgaggtggttgttgaggagaattggcaagttcttgggatttccaggctttatgagtatttccagtgagtctgcacaggtggatgtatgattctagagggccacctttatgagactattctgtgcagattctttgttgggctgcccagctgtttgttggcctagcgcagcccaacgcaacccagccatagtctctgctttggccaatggcctggttgctgggagaaggatgggggaggcccagatgatttgtacagggcccctagatgacccactgcacctgtccccactcgcccccaggtacttgatatttcctaatcctgtctgccttgagcctggtatctcctacaagctgcatctgaagctggtacggacagggggaagtgcccagcctgagactccctactctggacctggcctgctcattgactcggtgaataatctcctcttgcccacaccaaccaagatggcagggcccgtggtgtgggacttgagggatagcaggggtctgtggcagaagaggcaggcccatggtggtgccagggtgggcaggcttgtggcagtgctaaggcaagtgctctggcaatgcctacgtggtcccaggtctgaactgcgatcttccttgctcactccttcagctggtgctgctgccccgtgtcctggtgctagagatgtttagtgggggtgatgctgctgccctggagcgccaggccacctttgaacgctaccaatgccatgaggagggtctggtgcccagcaagacttctccctctgaggcctgcgcacccctcctcatcagcctgtccaccctcatctacaatggtgccctgcgtgagtgtctgtgatgtgggttgatggggcagaggtggggacccagcctgacttggcccaaccctcctccccacagcatgtcagtgcaaccctcaaggttcactgagttctgagtgcaaccctcatggtggtcagtgcctgtgcaagcctggagtggttgggcgccgctgtgacckctgtgcccctggctactatggctttggccccacaggctgtcaaggtactcttctgccccttgttccctcctatgcttctctctccttcccattactgttctctctcctccttctggacctgctgctggtttcctcaaactaagtcttggaccctctactctcaacctgggtcagttgtagttctcttccatttcctgaccttcccacctagactcccactactcacactcccctgagaccctcccccacccacactcccctcagaccccctcccctggctctggctcagctctgccttgctcctagcctgccagtgcagccacgagggggcactcagcagtctctgtgaaaagaccagtgggcaatgtctctgtcgaactggtgcctttgggcttcgctgtgaccgctgccagcgtggccagtggggattccctagctgccggccatgtgtctgcaatgggcatgcagatgagtgcaacacccacacaggcgcttgcctgggctgccgtgatcacacagggggtgagcactgtgaaaggtgagactggagcagctatgagtgggttggttggtgggcaggcttcccagggatgacacatttcttcttcctcctccctgcaggtgcattgctggtttccacrgggacccacggctgccatatgggggccagtgccggccctgtccctgtcctgaaggccctgggagccaacggcactttgctacttcttgccaccaggatgaatattcccagcagattgtgtgccactgccgggcaggctatacgggtgagtggatgggggcaggcrtgggatcagggtgagttggctgggctgagcactcacagcttcctcttaaccgtgggcagggctgcgatgtgaagcttgtgcccctgggcactttggggacccatcaaggccaggtggccggtgccaactgtgtragtgcagtgggaacattgacccaatggatcctgatgcctgtgacccmcacacggggcaatgcctgcgctgtttacaccacacagagggtccacactgtgcccactgcaagcctggcttccatgggcaggctgcccgacagagctgtcaccgtgagtatgagtgtgggagggcatggctgaattggggttctgcttcttggcctcctcttgactactgtgctcatcttggttggcacaggctgcacatgcaacctgctgggcacaaatccgcagcagtgcccatctcctgaccagtgccactgtgatccaagcagtgggcagtgcccatgcctccccaatgtccagggccctagctgtgaccgctgtgcccccaacttctggaacctcaccagtggccatggttgccagccttgtgcctgccacccaagccgggccagaggccccacctgcaacgaggtatgggaccctcctgcagatccctggttagatggggccaggtgtctgtcttatctccagggcttagcctctkatagaggctctgaccctgccttgttcccaccccagttcacagggcagtgccactgccgtgccggctttggagggcggacttgttctgagtgccargagctccactggggagaccctgggttgcagtgccatggtgagggagccagcggggccagggtagatggaggacttcccagaatgccccacagtgaccctaactctgtgctctgctctttcttgcagcctgtgattgtgactctcgtggaatagatacacctcagtgtcaccgcttcacaggtcactgcagctgccgcccaggggtgtctggtgtgcgctgtgaccagtgtgcccgtggcttctcaggaatctttcctgcctgccatccctgccatgcatgcttcggggattgggaccgagtggtgcaggacttggcagcccgtacacagcgcctagagcagcgggcrcaggagttgcaacagacgggtgtgctgggtgcctttgagagcagcttctggcacatgcaggagaagctgggcattgtgcagggcatcgtaggtgcccgcaacacctcagccgcctccactgcacagcttgtggaggccacagaggagctgcggtgcggaagggcctaagaatacatggtgggatggggcagaggcccagtggaccagggctgaagcctctctaaacacccccctctccatcattgcaggcgtgaaattggggaggccactgagcacctgactcagctcgaggcagacctgacagatgtkcaagatgagaacttcaatgccaaccatgcactaagtggtctggagcgagataggcttgcacttaatctcacactgcggcagctcgaccagcatcttgacttgctcaaacattcaaacttcctgggtgagttgttagccaactaggcaggtggaccagggtcagtcttcagctgactgtctgcctctgcccaatttaggtgcctatgacagcatccggcatgcccatagccagtctgcagaggcagaacgtcgtgccaatacctcagccctggcagtacctagccctgtgagcaactcggcaagtgctcggcatcggacagaggcactgatggatgctcagaaggaggacttcaacagcaaacacatggccaaccagcgggcacttggcaagctctctgcccatacccacaccctgagcctgacagacataaatgagctggtgaggttgaagtgttgggtggggcaggtgggtgtagatgttcctctcacagggccctgacttgttctgtgcctggcaggtgtgtggggcaccaggggatgcaccctgtgctacaagcccttgtgggggtgccggctgtcgagatgaggatgggcagccgcgctgtgggggcctcagctgcaatggggcagcggctacagcagacctagcactgggccgggcccggcacacacaggcagagctgcagcgggcactggcagaaggtggtagcatcctcagcagagtggctgagactcgtcggcaggcaagcgaggcacagcagcgggcccaggcagccctggacaaggctaatgcttccaggggacaggtggaacaggccaaccaggaacttcaagaacttatccagagtgtgaaggacttcctcaaccgtgagcctcccacgtgtcccaggccatgtggttgtcccctttggcawctcccggtgtctgtatctcccttggttcatacttgagcctcagggactacactggattagtgtttatgatcccttgactggctcctgagttattgcccatatgtggtcccaggtccatgttcttgagtctgagccccttgtatagtccctgtccttgtgattatatccttatgcctggtaacaaacccctatcccatgtacatgtcctgagtccataccccaaaactgtatcctcatgcccatgctggagaatctatgttcttaagttcttgctgtgtccctatagaggagggggctgatcctgatagcattgaaatggtggccacacgggtgctagagctctccatcccagcttcagctgagcagatccagcacctggcgggygcgattgcagagcgagtccggagcctggcagatgtggatgcgatcctggcacgtactgtaggagatgtgcgtcgtgccgagcagctactgcaggatgcacggygggcaaggtctgaccccatccctggcccctatccctgacacctggttttgatacctccaggttctgattcccccttctccccaggagctgggctgaggatgagaaacagaaggcagagacagtacaggcagcactggaggaggcccagcgggcacagggtattgcccagggtgccatccggggggcagtggctgacacacgggacacagagcagaccctgtaccaggtsaggtcttcctaggacatcagtgggacaaggttatgggcatgaaccgtagatctgtgtaacctttggctcacccatggcaggtacaggagaggatggcaggtgcagagcgggcactgagctctgcaggtgaaagggctcggcagttggatgctctcctggaggctctgaaattgaaacgggcaggaaatagtctggcagcctctacagcagaagaaacggcaggcagtgcccagggtcgtgcccaggaggctgagcaggtgggttgaggcagagccagctggsgaaggtaggggtggaagatgggcctccactgagctaccacgctaacctaaccctctacatctgcagctgctacgcggtcctctgggtgatcagtaccagacggtgaaggccctagctgagcgcaaggcccaaggtgtgctggctgcacaggcaagggcagaacaactgcgggatgaggctcggracctgttgcaagccgctcaggacaagctgcagcggctacagggtaagaaatggggcaccagagacacaagactgcgggaaaccccccctaaactgacacctgcccttcctagaattggaaggcacctatgaggaaaatgagcgggcactggagagtaaggcagcccagttggacgggttggaggccaggatgcgcagcgtgcttcaagccatcaacttgcaggtgcagatctacaacacctgccagtgacccctgcccaaggcctaccccagttcctagcactgccccacatgcatgtctgcctatgcactgaagagctcttggcccggcagggcccccaataaaccagtgtgaacccccactgtgttgtctggactctgatttggggcgggcgggggagtctccaggggaacctcgaggttgcccccagcagaacccatgcaccgctaagccacccgagcaccgcctccttccgctcgggcccgccccggagctgcgggtcgctccgagcccattcccgccggaagtgcgtcaccagcttggcgctccgcctccctcggccttagctagaagtcgaaacaaaacaagccgctaaggcggtggcggcggcgccgggacgggggaggggcgcgccggaaccggaaccgacctgcgccggaaccggaacggagagcgggttgccagggcccgaagagggctggctgcggcggtctcgctcggtgagtggagcaggctgcaactcgctggcttggccgcagcggggaggccgcaacgcgcggccgcggcggcctgttcaaggtcacgggccgtgccagtccctacccctagtgccccgcagcgtgccagcccactgatgccggcagggccgttacgctatgcctgtggccagcctcccacctgggagaggactggcggccagcgagggcaacttcgtgggagaggtggtggcgggctcggggttcagaggctgaagctgggtcgcagctcgaccggggcgctgatctgtggtcagtaaccccgcgctgccatttcaggccggctcgggtctctaaacagccccttacccgcctcgacgtccctggggcatgggggagggacgcgaccttcggctggggcctgggtgcaagaaggaggcgycggtggcaggtgtcattaaagatccagcccaccagtaccacatctgacctgtagaagggtatcctgccatccctccttcctcctttacacacttaggggaacacagactagtcattatctgtcctgctactggttcaggccaggcttgaggctgccaggagtcctggatctgtggtcctccccagcctcatctcagtatctagtttcaagaccttcattttggaggaggaaacagtccagaatccactggtgggtctgtgggaaactgtagtggtccttgtggctcagagctcatgagtgaaggcatctgggaaggaaggtgataatttctgttccagtctcaaactggatgcccatcctgccttagtactggagcagggttgctgctgaagaggtagcgtgacatctagatacacttttcagtccctttctgcttgggacagcagctggggagaggactttctcttgaaatgaagaaggaccaagcagtacataggagcaggttcttgccaagggtgggagctggcaggaggcaggtggagtgccttagccccaggactttttctgggcaatggtagaacctgggttgagcctgtttacagccacagagcctggttctcctgcggcttgtctcctgtcctgccttcctcctccaccttctatttctccagtggtgactaagcagccagtgagagtgaaggaaaagtgagcaccctgctcggagtgccagccctgtgggctggagccgtggctcctctccagattggtggagtagcctggtcccaggccatgacttccttgacctggtgccccctcagtgaggctttcacctgtgtgggactgttatggtgggtatctatgaggcttggccagaagtggttgctgctacttgcattatttattacctcttcagaatatcctgagagtgtccaggggtacttaagagatgagaagatacagctctgtagcattagtgtcctgtgttgctgagccctgggtgtagctaaagagcaagttgttgggtcttggcagtgatcactggcttctttccattaggctgtccgttccttgctggagaatttggccacaaagagytgccaagatagctgggccaggaagaaagcgccgcagccctgacccagacgctgttgccgaccccggggcactctggctgtcgaccaagcggctcaagatgtctggcggggccagtgccacaggcccaaggagagggcccccaggactggaggacaccactagtaagaagaagcagaaggatcgagcaaaccaggagagcaagsatggagatcctaggaaaggtgggagtggcattcccagagtaattgtggccttctctgcctcccatcttattggtatacagattggggtttgggagatgactttcttgttcttctctctgtcctggtttgatgatgagagaagaaggacccatgataacctcagtagagcctcagctttgaagcctgagtacttggctaagatccagaagatggtgctgttggggggcttgccttctttcctttttaaacttttttcttttttttgaacctgttctttttttccttttttttttgagatggagtctcattctgtagcccaggctggagtgcagtggtgcaatattggctcactgcaacgtccacctcctggttcaggtgattgtcctgcctcagcctcccaagtagctgggattacaggtgcatgccaccacgcaaggctaattttttttttttttttgagacaatgtctcactctgtcatccaggctagagtgtagtggcatcttggctcactgcgggctctgcctcccgggttcaagtgattctgctgcctcagcctcccaagtagcctcagcctcccaagtagctgggattacaggtatgcaccaccacactcagctaatttttgtatttttagtagagacggggtttcaccatgttggccagactggtcacaaactcctgacctcaggtgatccacccacctcggcctctcaaagtgctgggattgcaggcgtgaaccaccgtgcctgtcccttttttttttttttttttaaaggcagggtctcactcttgcacagattggagtgcagtgcaggtgtgatcgtagcttactgcatcctcaaagtcctgggctcaagcagtcctcctacctcagcctcctcaccatgcttgactaatttttcttattttttttttagagacagggtctcgatatgttgcccaggctggtcttgaacctctggcctcaggtgatccttctgcctcagcctcccatgcagctgggatcacaggctcacgccaccgtacccggctgttctttccttcatcgtcagggtcagcatccactcctcaagaggagcagaccaaagagggtcagtaacgaatgggctttttgttgctagggaaggggagggggcacttgcaatttggctcccatctgaagcagtttcattaggctgggtctctgttacctgcttatcaccatcaggagcttgtgaagaccctcatgatctcttggctactcccactccagagttgttgctcgattggaggcagagtgcagaagaggtgattgtcaagcttcgtgtgggagtaggtcccctgcagctggaggatgtagatgctgctttcacagatacagactgtgtggtgcggtttgcaggtgtgtccatctgccctgagcacagtagtatgtttgaatcttctgatatctcctatcctacctcatggaccctgctctgtccccaggtggtcagcagtggggtggtgtcttctatgctgagataaaaagctcttgtgctaaagtgcaaacccgcaagggcagtctcctgcacctgacactgcccaaaaaggtgcctatgctcacgtggccctccctcctggtgagttctagtagtacagggttgggtagggataccagtgtagtcgacagggcctgactgctgtatctttggcagaagaaacctctagggacccaggagctggtgccggggctgcggtgccaggagaatgggcaggaactgtctcccattgccctggagccaggccctgagccccaccgggctaagcaggaggcccggaaccagaagcgggcccagggccgtggtgaggtaggcgcaggggctggccccggggcccaggcagggcccagcgccaagagggctgtgcatctctgcagagggccagagggggacgggtccagggatgaccctggaccccggggtgatgccccacccttcgtggctgacccagccacccaggtgagagctgggcacctgtttgggtgttaggagatggggggaaagggtgtgcactggagtgggagccacctggcagacccagggctgattctttccacaatcttgccattaataggttgaggctgatgaacagctttgcataccaccgctgaactcccaaacctgyctcctgggctcagaggagaatttagcccctttggcaggagagaaagcagtgcctcccgggaatgacccagtctctccagccatggtccggagcagaaaccctgggaaagatgactgtgccaaggaggagatggcagtggcagcagatgctgcaaccttggtggatggtaaaggtgggggtgggcaggcagagccctaggttgggttgcaaagtttgtaggtggatagagagtagcaataggctggaacctgtcctggttggggctgagccatggtctcaatatagagcccgagtcgatggtgaacctggcgtttgtcaagaatgactcgtatgagaagggcccggattcmgtggtggtgcacgtgtacgtgaaggagatctgcagggacacctcaagagtacttttccgtgagcaggacttcacgctcatcttccagaccaggtgggtgggtagatgatggggcaaacaatgcctcaggtgggacagtatgtctcatgctcttcctcttgtccttcctcctatcctgctgtgcctctgcagggatggaaacttcctgaggctgcacccgggctgtgggccccacaccaccttccgttggcaggtgaagctcaggtgggtggtgcccggccccaccactgtgcctgtcctaccccgtgggctccatctccctggctcatctatcctgatgctcattcctcctaagtccctgagttcagccttttcccacaggaatctgattgagccagagcagtgcaccttctgtttcacggcttctcgcatcgacatctgccttcgtaagaggcagagtcagcgctgggggggcctggaggccccggctgcacgaggtctgcacacgagctcccttcattgcccagttccacgtgaccaggacccaaacccctgtcacatgctgctaaccaccagccctctcattccccctttttaaggtgcagtgggtggtgcaaaggttgccgtgccgacaggtccaacccctctggattcaaccccaccaggaggtgctccccaccccctgacaggccaggaggaggcccgggctgtggagaaggataaatccaaggcacgatctgaggacacagggctagacagtgtggcaacccgcacacccatggagcatgtaaccccaaagccagagacacacctggcctcggtgagaattctggggtgggaaggacgaagaatggaggctggagagtcttggggctgttctctcatgtcgtctttgctcctgcagcccaagcctacatgcatggtgcctcccatgccccacagcccagttagtggagacagcgtggaggaggaggaagaggaagagaagaaggtgtgtctgccaggcttcactggccttgtcaatttaggcaacacctgcttcatgaacagcgtcattcagtctctgtccaacactcgggaactccgggacttcttccatggtgagggcagggcctggagcctgggttatgggcagagagagtgcctttgttcctcacacctttgctcggctactattcctagaccgctcctttgaggctgagatcaactacaacaacccactagggactggtgggcgtctggccattggctttgccgtgctgcttcgggcgctgtggaagggcacccaccatgccttccagccttccaagttgaaggtgatctgtgaccactgtcacccttggctggagggggcggggagggccagccagctgggtgtgcagtgggtgctagggcttcatgttcacaccttggctcctgtatccaggcc

SEQ ID NO: 8828 - DNA, 14804 bp, Homo sapiens
tcaagaccctgggtttgggaagtgaaaggaagtcccaaggtgactcgggaaacaggccagatgtgagtagaagaaatgtccctatttctcaaagccacctccctttatcttcttctaaacccacagattcccaaaagtgccccaaagatgcccaagtagaggttaagggagaagcaaggcaccgggtactactgtttgcagcaaacacggatgctggcctgcccaggggcccctctctcctttcggattttattcaggaatcatcgttggtctcaggtgatcatgacacagctattctcctttgccagtgactgacatgagattcagatctcactaataagatgtaagaggatgtctcctgggagcttttggaaactgtttcatccctgaaaagggaaggcacatgaagaaaaatccaacatccttttgctactgacttcttgcttcctgttttgtatcctgccatgtgaaaatacagcatttggagatgtggcaactttgtgctggccatgaaggaatgcgtcccccacacggcagagtacaaggaccaaagaagccaggccatcgccccaggccggcctccctcactggataaacagcatatgcccttatgctgcatgagctggattttccctttcttgtggctgaaatgcatttggatacagtttgtttatactcatagagtcactgtaagtcaggggcttattgtcaggaactacttaacactttgcttaggatattggatttaaagaaaggaattttggggaatccatgctatagaaataaaagtatcagtaagtaagagggggaaacatacaaatttaaaatgtgcacataagaaacttaatagtaactcctccctgctgggggcatgggaagggagaaatgaaggaacaattatttttcatttggtaccattctctgtatggcttggattttcttgctattatttttatttgttaaaatctgggcagtgcaataatggggcacttctatttcttccgttttctgtattttccatttccctctattttctgtattagaaatacactacttagccggacatggtggctcatgcctgtaatcccagcactttgggaggtcaaggcgggcagatcacctgaggtcagaagttcgagaccagcctggccaacatggtgaaatcctgtctctatttaaaaaaaataaataaattagccaggcatggtggtgggcacctgtaatcccagctactcgggaggctgaggaagaagaatcacttgaactggggaggtggaggttgcagtgagccgagatggcaccaacggactccagcctgggtgacacagtgagattcttcctcaaaaaaaaaaaaaaaaaagaaagaaaagaaaagaaaaagaaatacactacttaaaaataaaaggaaatgttatattggcatgtctagagaattgctcctttctcctcctccagggaggaaaacagaggaccttatatttagcaatccagcatcactctcctgacattccctctagtagagaatcatgcctaactaaagagctcagagctcacagatagatcacctctgaagccatgtccaggcaagggtcaacaagaatgaaaacacagggtaacacacaaagcattcagtccacaaatcacaggcatcagtctgacttctagtcatacttttgcaaaaagaattccaagagttccagtatctagtctaaatcttataaaagatttatgcattcctgagtactgtttaatactataactaaacactgatacagcacactaagacagttactggatacaaaaaacaatttctcacttaggtaattcattttttatttatttatttattttttgagactgagtctcactctatcactgaggctggagtggagtggtgtgatctcggctcactgcaacctctgcctcccagattcaagcgattctcgtgcctcagcctcccaagtaggtgggattacaggcacccaccatcatgtccggctaatttttgtatttttggtagacagggtttctccatgttggccaggcttgtgttgaacttctgacctcaggtgatccacctgtctcggcctcccaaagtgctaggattacaggcgtgagccacctgcgcccagctgcgaaatttttttttttaatcaatccattttcaaatcaaagtatatactgcagattccagcctagttatttcaactcagaactcctcagcttaggcctcttaattgccttatttcataagaagctgactcactcaaaggtcacaaaggcagcgatggcagagccaagatcagaagtgttaaggctgaaaacaggaagagggcaacagaatgtctgtggaggtgctcaaaggttaggcacaattttccttgggcactactcagaagccagccaggaattaccttagttctgtggttctctgcattcagtccctcatatagagatttgttgaaagatatttcaccaaggatctgcagttcagttacatcttttagtaactagaagatggggaaaggaatgagggaaacaaaacatattttagacatgaactcactgtgtttgaacagccttcaccacctttccctttaaaggtattcctgggcttagttaatggccctaacgtacacaacactacataaagttacccaaacaagacatctgcagttattcttcaacttccttttttttttttttgagatggagtttcgctctttcgcccaggctggagtgaagtggtgcgatctcggctcactgcaacctccaccccgtcaggttcaagcgattctcctgccttagcctcccgagtagctggaattatgggcatgtgccaccatgccaggctaatttttgtatttttagtagagatggggttttgccatgttggccaggcttgtctcgaactcctgacctcagatgatctacccacctcggcctcccaaagtgctgggattacaggcgtgagctgccgcgcctggccttttcttcaacttcttttcccttgtgccatccaaagtcagttcttgactgactgacttatttttgagacaggatctcgctctgtcacccatgctggagtgcaatggcatgatcatgggtcactatagcctcaaccttccaggctcaagtgatcctcccacctcagtctcctgagtagctgagaccacaggtgcaccccaccacactgggctaatttttgtattttttgtagagatggggttttaccatgttgcccaggctggtctcaaactcctgggctcaagcaatccacccaccttagcctcccacagtgctgagattacaggcatgagccaccacacccagcttattcattttatttaacgtaagagatttttcctttttttttttttttttttttttttttgagacaaggtctcactctgttacccgggccggaatggagtggctcaatcatagctcactgaagcttcaaattcctgggctcaaacgatactcctgcctcagcctcccaagtagctgggactacaggcatgagccaccatgcgtggctaatttatgtatttatttatttttaagaaatggggtttcactatgctgcccaggctgatcttgaactcctggcctcaagcaatcctcccgcctcagcctcccaaagtgttgggatgacagatgtgagccaccacactcacaattctttttttttaaattatttcttgtatctgtccctttcttttccacccccattgctacttcttcagttgagacctcacaaatgtcacctggatcactgtaaaacattaaacttgatcacttgatcactagttcccactttagaataagtgatcagggaaggcctctctaagaaaataacacgtgtggccgggtgtggtggctcatgcctgtaatcccagcacttcgggaggctgaggtgggtagatcatctgaggtcaggagttcaagaccagcctgaccaacacgatgaaaccccatctctactaaaaatacaaaattagccgggcgtggtggctcacgcctgtaatcccagcactttgggaggccaaggagggcggatcacctgaggtcaggagttcaagaccagcctcaccaacatggagaaaccccatctctactaaaaatacaaaattagccgggtatggtggcgcatacctgtaatcccagctacttgggaggctgaggcaggagaatcgcttgaacccgggaggcggaggttgcagtgagccgagatcgtgccattgcacaacaagagcgaaactccgtcttgaaagaaagaaaagaaaagaaaagaacacctaggtcgggtgcggtggctcacgcctgtaatcccagcactttgggaggctgaggcgggcgatcacctgaggtcaggagttcgagaccagcctggccaacatggtgaaaccccctctctactaaaaatacaaaaattagctgggcgtggtcgccggcgcctgtaatcccagctactcgggaggctgaggcaggagaatcacttgaacccgggaggcggaggttgcagtgagtagagatcgtgccactgcactccagcccgggtgacagagcaagactccatctaaaaaaaaaaaaaaaaaaaagaaaagaacacctgagctaaatttaagaagaaaccacctacgtcaggacctagaggaagagcagtgtcaagcaaaggaacagcaagtacaaagtcttgtggccagaataatgctgtactggcgagctagaagaataggacagaataacccgattataaaaggggcagtgggagagaaaggcgagtactaggagatgaagttgaagaattaagcagagaccagatcaagtactgccttgctctggccatgaaaaaagtatggattttagtctaagtgtgctcaagcatcagttttgtttgtttgttatttttaataagcaggggaatggcacaatctaatgtctgctcttagaagacggatagctgttacgtgggaattatttgtaaagaatgtgggaaaagcagaggcaagaaaggcaggccgaaggttattgcaacagccctggcaagaaagggtagcttgaattacaacggcagtggaaatggagagaagtgaatgggtttaggatatattttggccctgaaatggcagggcttgctgctggaatagacgtggggatgtaggaaagaggagtcacaggtaatccctcgagttccttgtactgtaactggagtatatctccctcctgagggtagctaaggaacgggttgggacagagggttggttttttgcaccaaaagatctattttggacatggacatgttatgcaaagatgctattatctcttctaggggcgatgcccgtgagcaactggataatcaaatctggagcatttcagtctcaaacacctcctcagagtgatcccaggagatctctgcagccacggtgacattttctttatctgaagcgatgacacagctcactgaatgccattcttccacatgctggaaaagcgaggtctagtgaacacaattcctttccgtgcggaaagtctgaaatctttttaacacttcggacacagagcatcgtaaggtcccagaatagagggtgtgagcaatttcagcgctcacctcggcccaagcgaagctccagcgggagcaattgagacccagggacgaagctagggagggcctggcagcccccggcactggccggcaggggtaacccaggaaaaacagtctcctggcctctcgttacccgcttcaggccctccgccctcccctggcctctcgggacggccgcgcttacctgaaccgaactgtacgcacaagcgcgctcctgactccaggtgcacaccgtggaggcctgaaacgagagccatgaccgcgacgcgctgaacaaaccaagccgccagttttccgtcccgtcccggccccggccctggcgaggtgcgcatgcgcagggccgggagctaggaccccgcggcaggcgggcgcgtccgcgtcgcacggaagtctcgcgatgtttgcgtttgaacctcttggcgggtgccggccatggcggcttcgctcccgggacctgggagccggcttttccgcacatatggggctgcggacggcaggagacagcggcggccgggccgggaagccgcgcagtggttcccgccgcaggaccggaggcgtttcttcaacagcagcggcagcagcgacgccagcatcggcgacccctcgcagtccgacgatcctgacgatcccgacgaccccgacttccccggcagcccggwgaggcggcggcggaggtgtcccggcggccgagtgcccaaggaccggcccagcctgaccgtgaccccaaagcgctggaagctgcgagctcgcccaagcctaaccgtgaccccaagacgcctggggctgcgagctcggcccccgcagaagtgcagcacaccctgyggcccgctccgacttccgcccttccccagccgcgactccggccgcctcagcccggacctcagcgtgtgcggccagcccagggacggcgacgagctgggcatcagtgcctccctgttcagctctctggcctcgccctgccccgggtccccaacgccaagggacagtgtcatctcgatcggcacctccgcctgtctggttgcagcctcagccgtcccgagcgrcctccacctcccagaagtctccctggaccgagcatctctcccctgctcccaggaggaagcgacaggaggagccaaggacaccaggatggtccaccaaacccgcgccagcctcaggtcagttctctttggccttatgaactcaggaacccctgaggattctgagtttcgggcagatgggaagaatatgagagagtcctgctgtaaaaggaaactggtggtgggaaatggaccagagggtccaggtctgtcaagcacaggcaagaggagggccacaggccaggactcttgtcaagagagagggcttcaagaggccgtccggagagagcatcaggaggccagtgttcccaagggccgcattgtgccaaggggaayagacaggctggagagaactagatcaagccggaagagcaaacatcaggaggcaacggaaacctctctcctccattcccaccgctttaaaaagggccaaaagctgggaaaagattcgttccccacccaggacctgactcctttacagaatgyctgcttttggaccaaaaccagggcttccttcagtttccacaagaagaaaattgtgactgatgtgtcagaggtctgcagcatctataccactgccacttctctctctggatccctcytatcagaatgttcaraccggcctgtcatgaacagaacaagtggtgctccgtcctcttggcactcctcctctatgtatttgctaagccccttaaacactctaagtatttcaaacaaaaaggcatctgatgctgaaaaggtttatggggaatgcagtcagaagggtcctgtcccctttagccattgccttcccacagaaaaactgcaackctgtgagaagattggggaaggggtgtttggcgaagtgtttcaaacaattgctgatcacacacccgtagccataaaaatcattgctattgaaggaccagatttagtcaatggatcccatcagaaaacctttgaggaaatcctgccagagatcatcatctccaaagagttgagcctcttatccggtgaagtgtgcaaccgcacagaaggctttatcgggctgaactcagtgcactgtgtccagggatcttaccctcccttgctcctcaaagcctgggatcactataattcaaccaaaggctctgcaaatgaccggcctgatttttttaaagacgaccagctcttcattgtgctggaatttgagtttggagggattgacttagagcaaatgcgaaccaagttgtcttccttggctactgcaaagagcattctacaccagctcacagcctccctcgcagtggcagaggcatcactgcgctttgagcaccgagacttacactgggggaacgtgctcttaaagaaaaccagcctcaaaaaactccactacaccctcaatgggaagagcagcactatccccagctgtgggttgcaagtgagcatcattgactacaccctgtcgcgcttggaacgggatgggattgtggttttctgtgacgtttccatggatgaggacctgtttaccggtgacggtgactaccagtttgacatctacaggctcatgaagaaggagaataacaaccgctggggtgaatatcacccttatagtaatgtgctctggttacattacctgacagacaagatgctgaaacaaatgaccttcaagactaaatgtaacactcctgccatgaagcaaattaagagaaaaatccaggagttccacaggacaatgctgaacttcagctctgccactgacttgctctgccagcacagtctgtttaagtaagctaaatgtatcttactgccccgaaatgagaggagactggtcttgaagcctctggtgctgtttcaacctccrtccccacaggagggtggaactcccattctcacaggtttccagtcagcttttcaaacaagaattttgtttccaaatggaaactgaaatatttgttgaaatgtttaaatttgctgataacaaatgttctgaaagaagtaaactagccgggcrcagtggcgtgcgcctgtartcccagctactcgggaggctgaggcaggaggatcgcttgagcccaagagttcatatctagcctggtcaacatagcaagacccctgtctctatttttttaaataaataaactacatgtgaaaacaaacgtttatatttataaaccctcttttttttttttttaattttattgagacagagtcttgctctgtcacccaggctagagtgcagtggtgcgatctcagctcactgcaacctccgcctcccgggttcaagcaattctcctacctcagcctcccgagtagctgggattgcaggcatacaccaccatgcccggctaattgtttgtatttttttagtagagatgggggtttcaccatgttggccaggctggtctcgaactcctcaccttgtgatccacccacctcggcatcccaaagtgctgggtgattacaggagtgagccatggcacctgacctataagccctctttctaattgtcagcagagtcctttctgtaaattcctttccgttttttgagccttaacacttatgtagtctgagcaaaaaaaaaatgcccaggcttcagcttcatactgagcagagcctgttgcttcaggtatcaaggctagctttgggaaccagactacagatgagacaactgaaagcaaagaggctgaggcaaagcagagaccaaaaaagagtctcaggggagaagaagggaagctagtaagcaacttatagggggcagtgtaagaaatgtcacatgttacatcactcacacagagaagcagaatttatcaattttcaaagggaaaatgtctctgtctactgacaaggttttaatttttgcttttttttttttttgagatggagtctcactctgtctcccaggctggagtgcagtggcaggatctcggctcactgcaagctccgcctcccgggctcacaccattctcctgcctcagcctcccaagtagctgggactacaggcgcccgccaccacgcccggagaattttttgtatttttagtagagacggggtttcaccgtgttagccaggatggtctcgatctgctgaccttgtgatccacccgcctcggcctcccaaagtgctgggattacaggtgtgagccaccgcacctggccaatttttgcttatttttcctcaaagggaggaaaactgacaggttgctttaagagctgagtgattgagagtccttctgaacaggacttcgggaatttactcctaatcttttcccatggttaacttgtcttcactctgtttctagaactctggtttttatacttgagactctgtagtcactgtggaaagaggtgtgactgataaagaactgcctttaaatacctgagtcctcgtcagcttcttcactgctacaacctggagacctcgtaatttggttgggacgcaaatttgcaactggtattctgctccaaagaggttctccccatgtacctgcaaattaaaatcagagtaggaaatcaaagctggtattgctttgccatctacagctttacaataataagtacttacatggaagaggaattctttgtggtgagaaagcccctggcctgtgttcacgtacattatggatggtctgcaattgacaggacatgcgtcagcccttgaggagtctttctcccttttttggagacagggtctcactctgttgcccaggctagagcacagtggaacaatcatggctcagtgtagcctcaacctcccaggctcaagtgatcctccacctcagcctgcgaaagtgttgggatgacaggcatgagccactacactcatccctttttttttttttttttttttgaggtggagtcttgctctgttgcccaggctggagtgcagtggtgcgatctcagctcactgcaacctctgcctcctgggtttaagtgattctcctgcctaagcccccaagtagctgagattacaggcgcctgccaccacacctggctaattttcatattttcagtagagacggggtttcgccatgttagccaggctggtcttgaactcctgacctcaggtgatccacccacctcagcctcccaaagtgctgggatgacaggcgtgagccaccgcacccggccttctctttttgaatgaactcgactgctttcaactgaatacattaggacagagggcaccagacctttaccaggaatgaggccgggtgcagtggttcatgcctatcatcccagcactttgggaggccgaggcaggcggatcacctgaggccaggagttcaagaccagcctggccaacatggtgaaatccctgtctctattaaaaattttttaaaaattagctgggcctggtggtgtccacctgtagtctcaactactcgggaggctgaggcaggagaatcgcttgaacctgggcggcagaggttgcagtgagccgagatggcaccactgcactccagcctgggcgacagagtgagacttcgtctcagtttaaaaaaaaaaaaaaaaggaataaaagctgaatgtcaaaatataaagtggtcgtagcgcagttggggtgaggtggaatatttgaattctgtatcgttgggctggttcattttctaattatccctcaaatggccttactcatcccctccttacttcccagtcccacagctgccttcttccctccacagcgtcatattaattcccttttgtagcacgactagttggcaatacacctcctttgatgaccacagtggggtttttgtgacccaaatgttagcaccctagagatcaatatcagagcctgggttctaagcaggctcctctcagaaggacagtgtccacattcatcctgaccaccagctccatctacgagagagagcccaaagctgccccctgggcgatggagtcacaccgctgctggcctcttgggagtactcacttggacagaactgcaacgaagccatgcctgaattgaagggtgtgggtctcgttggccaaagaccgtctttcattggaactaggaataagagtgttagttcatagcacacctgctttgtacatagcaagtgcttcttaaaaagggcttcgctctgttgcccaggcaggagtgcagtgttgccgtctcagctcactgcaacctccgccccccgggttcaagcaattctcatgcctcagcctcctgagtagctggaattacaggcgtgagccaccatacccagttaatttttgtatttttagtagagatggggtttcaccatgttggccaggctggtctcgaactcctgacctcaagtgatctgcctgccttggcctcccaaagtgctgggattacaggcgtgagccactgcgcctggctatttttttaagttccagggtacatgtgcagatgtgcaggtttgttacataggtgaacgtgtgccatggtgctttgctgcagctgtcaacccagcacctagttactaagcccaacacgcattagctattcttcctgaagctctccccaaccctgcccctcccacaggccccagtgtgtgctgttcccctccctgtgtccatgtgctctcactgcagaacaggtgcttctgcacctggctccccagggtcactgggagtcagataagaaaaggctctcagaggctgggcgcggtggctcatgcctgtaatcccagtgctttgggaggccaaggctggtggatcacgaggtcaggagttcaagaccagcttggccaagatggtgaaaccccatctctactaaaactacaaaaattagctgggcgtggtggcgggcgcctgtaatcccagctactcgggaggctgaggcagagaactgcttgaacctggaggcagaggttgcagtgagccgagatcacgccacagcactccagcctgggcgacagagcgagactcgtctcaaaaaataaataaataaataaaaggctttcagagataagcaattggagttcagaattgtctctagaagaccacacttagaagaatactgattttaaaagggcttctcagcctccacactattgacgttttgggccagttagttcttggttgtgggggctgtcctgtactgctctgcgtgatgtttggcagtattcctggcctctacccaccagatgtcctactgaacacccccctccccaagtcatggcaatcaaaacaggcacagcctctggtgggcagaatcacctccctttgagaactcttcccagcagcgttccccaccttaccccccaacacagaggtcttgcagataacatagctatcccaagctattccaaagctgagtgaacgagaaccagaactccagggctcattccaccaggctgtaccacagttttactttgtgtgtgaacaaaagaacattttcattatctctggtaacaagaagagaaagtcgagtccctgcagggaaacagatgccttctgtgggctcactggggtttcctttctccctgggctgtaagggggccgttcctctcacagcgtgcatgtggcagggagatgtcttccggggtcatagcctgactctgctgtgacccaggcagtacttacttggtgacagtcacagtgatgtctgctgtcctgtttggaaaggcattctcctctagctgccaaacgactgaaacatgagcctattttaaagggggaaaaatggtcagttgattctctctatgccactcacaattcagaccgctagctactcgtggaacagacctaggagacgattcctcagattttcacattcctcacatttttctaacacagcatgtttcctttcccttccttttttttttttttttttttttttgagagggagtctcgctctgtcacccaggatggagtgcaatggtgtgatctcagctcactgcaacctctgcctcccaggttcaagcaattctcctgcctcagcctcccaagtagctgggattacaggcacgcaccaccacgcccagctaatttttgtattcttagtagagacggggtttcaccatgttggccaggctggtctcgaactcctgacctcaaatgatccacccacctcggtctcccaaagtgctgggattacaggcatgagccaccgcgcctggccccgttatttcagttaagcctcaaatacaaatatggagtaagcaaggcaggcggcctcattccccttttacaggtgaagaagccacttcagagatttcccacagcacagagatgacaagggacagatcagggttaataacttttcgtcttggccgggcatggtggctcatgcctgtcatcccagcactttgggaggtcgaggcaggtggatcacttgaggacaggagtttgagaccagcctggccaacatggtgaaaccccatctctaccaaaaatattttaaaaattagccgggtgtagtgctgcacgcctgtaatcccagctactcaggaggctgaggaaggagaatcacttgaacccgggaggcggaggttgcagtgagctgagactgtgccactgcactccagcctgggtgacagaatgaaactccatctcaaaaacaaacaaacaaaaaaactttttgtctgacacgccctccatactacccacaacttcactctgcttcacggaggtgagcaggcagttcacctagggctgtgtactggaaagctctcgtccccatcaccccctactttcagagccagcttagccactgtaagcactgctggggacacactgcagtcaagcgaagcgcaaagctggaaccgagagattgagatgagaccaagatgcagaagacgccaactgcagggtggtgagaagagcgaatcggtccaaaccgactcacagatgacctcttgaggacggggtgaccaatcctgcagttcatgatcaggacagaagcaaccggctgagggtcatcacactgaatgtttggagagggaggctgttaaaagagcagatgacattctcttaaagagccaaacaaaacaaaacaaaaacgtggtttcctcacagcaattcagcaaacattcactaatttttctgcctgtcagacaccctgccaggagctaaagaaataaagtccacttggtccctgtcttcctcacaagccggacaggcagggtcagcagtagatccccgaggaatttaaatacaaggtcgaaggggtgcttctgtgag

SEQ ID NO: 8829 - DNA, 12306 bp, Homo sapiens
gatgtgagattacatggccctgactgtcttgcctggtgctgcaggccaccttcacagccttgccataccttttcccatttatccatggattggtatgagccctaatggtgcacccttccgacaatccttcatccttcccagacgtttcatcagccaagtgaaatttgcaattgtttcagtgattgaaattatgcttggagtgcaggtgtcatggatgaaacagcaatgccttgcggtgacaaattcagtgtagaaataattttagcaagcccagtgattggaaaacaatgactcaactttaagctatattgattttgtatttctgggctcagcttttgactcagtctcattccccagaaataatccctgttaacatttcggtttgtgttatggaagtgttttctcttctatgaattagctaatgcccataccatacatatgcctgcatttgtacactcttaagccaaataacatcgtactgtgtattattctctagtagcctgctttttattgaacttaatgataaatggcaaacatttgaccatgtcacttaagtttcttaccgtgatctccaacagctaggcaatattctgtcatatgggtttaccatacttttctcaatccacaatctcatcagagtcccaatagttgcctgatatgtctccatcagttgtgaggtatgtttcaaatgatttattactagaaattcttagcgagctgaagtttgtaaattttctcaagctactttattgatatataacacagatacataaactttgcccattcaaaatgtacaattcagtgctttcagtatattcagagagttttgcagctgtcaccacagtcaagtttagaatattttcattttcccaaaaagaaacccttgactggcatccttttccccacttccttttctctccactcccaacctctctcccagctccaggtaaccactcatctactttctgtctctatatagatttgcctattctagacttttcatataaataaatcagatactgtgtggccctttgtgtctcgatccttacacttagcatcatgttttcaagggtcattcatgttgtagcatgtatcagtacttctttttttagggctgagtaatattccatttacggatatgccacatttcatctatgcattcagttcacggacatgtgggttgtttccacattttggctattgtgcataatgcttccaggtacacttgtctacacatttttgtgtggatataggttttccttttttggggtatgctcctaagagtgcaatttctggatcacggggaactccttgtttaaccttttgaggagccaccagattgttctccacagcagccacacccatctacattctaaccagcagtgtaggaaggttccgatttctccatatcttcaccagcactcgctgtcatttttctttttagtcttgtcattttattgggtatgaagcggtattgcattgtgattttgatttggattttcttgatggcttaggatattgaacatctcttcatatgattattggatggatgatttttttcagcggttatcaggtcacacctgtaatcatgcccacctcattttcttacagtgcagtgtgtgcttttaggcacataccaagagcttacagagatccttctggttcagaggaaagattcacatccccaacaaacactgctccccgattacaatatagagaggctaaattatagtccatatcacttttcctttaaatccctttacttttttgtgctacaagagtttcagaataataattctgcagaaaaaagtactgattgtccagcagttgtgtcaggtagaaaactgggatgcccgactgcattggtttagccagaactgtggccatgaaaccttgcctggcccccagggatggggtgaggggggatatcatatatgctttaggtggggcagaggggtggtctgcccctgtgcaggcaggaatgttcaggaagcaggctgcctctgtttctactctaaatatttaacattcacggatggcatggatcctgactaagcggagcagatgctggctctatattgcacatagctcctgaatatcagccctgcttggctatgcatgtgttttttgttagtttttgagacagagtctcggtctcttgcccaggctggaatgcagtggcacgatgttggctcactgcaaaccctgcctcccaggttcaagcgattctcctctcccagcctcccgagtctctgggattacagacgtgcatcaccaggcccagctaatttttatatttttactcgagacgtagtttcaccatgttggccaggctggtctcaaactcgtgaccttaggtgatatgcgcccctcagcctcccaaagtgctgggattataggcatgagccaccacgcccagcagtatgtttgtttttcttcaaacctagatcaagagtcaaacactcaaatgtttggtgggagcagttgatgatccagagctttggagtcagcgagacagtagagagtggtggagatggtggcgcacaagagggtcagtgccccatctcaaggaacagctgcacctcggcctacgcgattgtgaaaatgtgagcatatgcaggccagaccttggcttctctgtcttcatttttcacaggagccagaagtttggatgtgcaatgtgaaatctcacaaattaaacatgttacataactgtattttgtttcctatctctgctgtaataaattttctcaatgttagtgacttagaaccacacaaaagttacactttacagttttggaggtcagtggtccaaaataggtctcagtgggctaaaatcgatgtgtcagcaggacaccatttctttctgtaggttctagaagagaacccacttccttgctgtttccagcttccagggactgcccaaatcctttggctcatggccccttcctctatcttcaaagccagggatggctgctcaagtccttctcaaactgccctgttcctggttctctctcttctgcttctgcttttaaggaaccttgtaacttcagggagtctaccctgataatctgcgataatctgcctatttgaaggtcagccaattagcaatcttaatgccatctacaaccttaattaccatttgctatgtaacatatttatagatatcagggattagttcatgaacatcttggggtagagggcattccacatacagcagtacctataatgtatatgcttcttaaagaatgcatgagtcttatttattttatgtccttggagtgtatagcagagttagatagatctttctggattggcggttgattgaatattggctgtacaaagaaactggttaggagtatagagaaaagatcaatcatagcactagcttatagtttattttattctttaatgattttttaaaaatatttctctcacttacttgaaaagcagtcttagaaattaactggaatgggtaatttatttgtctttcttcttttgtaaaataatggcagtttgtaactcagatttttgtatgaggaataaataaaatactgtctgttttcctttgatctttctatttgtggtccagccagccagctaactatgcattcctttttctgccttttcatcataacacctatcttagcaactcttcattgctgctttgcaaagaggatttgagattgtttatgtaggggcccgtgtataatacctcaagagaaaaagacacagatgaggctattgggattaagggaaaatcaagtaaatcgagaggtaaagcactgtgcagaaatattggccagaagctatgaacagttgccacagctgggctgaagagttacctgtgagccttccaggggtgtaagccaagagaaagacagttcaccaaatctatcgattaatagaaatcatccagcagcagtgccactgtaagatgttcaatacgtagcacctttctgtcccttctcctctagccagttgggacaggattagcaagccaaagactttctgaaataatccttagctatattcttggtattcaccaaggaatttaccaatatgcaaagacttggggataattagtattatctttgccattacctgcagtaatattatgaagattagagatgtaactctgtcctgaagaactgcagtctgtggctcaccttggagaagaacttaagaacttattgaagtgagcaggctcacctgcctttgctcagagccacatcacctgcaggcaggatctgcaaggtcagcagttagcgtcaagttgcacagcctgggcttgggtggcgttcgctttacccttgcccttgatgtggtgccgagttgtcaggattctcgtaaaattcctgggtgatggcttcttctgttctctttatttccttaactgaacatctgtctaattgttcacctccatcgctttagtgctttcctcatgctttctctctttccagacaataaactttattttcttcataagaattcagtctacgcaagggtattaggcagcttgtttgcaccttttaattgctggatgttttccagaaaggctgtttgcagtagttccagtgggttcatctgtgaatcaggaaagacaatgcagctttgtgttttggtttttatcagttaccttctgtttgtaaacatctgtttggaaacgtttgctggtgcccaccccagcacccctccacccctgccagaaataaagggattaatctctttttgcttggcatagggagaagacagtgtctgctgatgtgcttaactttttttttttttttttttttggtcaggtgcgtaggtatgtgactgaaacccatagactttgcacatattgtcaaatgactttccagagggactcaggcactttatttaattaatgccaatgaagcccgttaatccgctcattactgcagtttaattttgatgctggtttttgatgatgtattgaaaacttgtataaactggcaattacaactggaaaacatttctagtttagaagagacccttatttttcatatgcttaggaatatccagcaagccacttttaaaggctttttatcacattttattcttaagctttctgaattccttattatattttgcctgataaatagttggattttgttttttggttcaatgtaagaatattcttaaactaggtaaactgttttaattgtttgtcattatgttctctcattctgttaaattttgttttctatttttcatgtttttgggtttttctagatggcctgtctttaacacttcttgatatttttgattaaattttcatatatcatcaaaaatagagatgacagccaggggtggtggtgcatgcctataatcccaacacttttggaggccaaggtgaggagaccacctgaggtcaggaattcaagactactgggcaacatggtgaagctctgtctatcctaaaaatgcaaaaattagccgggagtggtggtgcatgtctgtagtcacagctacttgggaggctgaggcaggcgaactgcttgaacctgggaggtggaggttgcagtgagctgagatggagccactgcactccagcctgggtcacagagggagactctgtctcaaaagaaaagaaaagtagagaggatagtataatgaggttcctgtctgccagtcactctatagtaactattaggaaacccctttttttctctgaagtcattgctcctgtgtgtgtgtgtctgtatataaaaaaaagtatgtatacatatacgtatatgtatgtgtatagataaaaatgcatgtatggtgctgggcgcagtggctcacgcctgtaatcccagcactttgggaggctgaggcgggcgaatcacgaggtcaggagatcgagaccatcctggctaacacggtgaaaccgtgtctctactaaaagtacaaaaaattagcctggcgtggtggcgggcacctgtagtcccagctactcgggaggctgagaccgaagaattacttgatgaaacatggcagacgacatagaccagcagcaaactaccaacactgtggaggaccycctggatcttaggctcagcccagaggagcgaatttgtgtgaaaatgagaaacgaccgagagcttcgaggcagattacatacttatgatcaacatttaaatatgatcttgggagacgtggaagaaactgtgactactatagaaattgatgaggaaacatatgaagagacatatgaatcaacaaaacagaatattccagtgttctttctccggggagatggcattttcctggttscccctccactgagagttggctgaaacaaagaatttgtcctgtatggaaaacaggagactttgtacagtggcctctctaaatgtgcaagatattcaaaagagaaacccgcatacatttggatattaagaaataattctggggattcttccactcctgaaatgagttgatttgcagataattcacaacttcttaagctaaatggtattttcgtttttctcaagctcttccaataaatatgaccaccaagatttttttttcctaaaaaaaaaaaaaaaaaaaaaagaagaatcgcttgaacccgggaggtggagcagtgagccaaggtcatgccactgcactccagcttgggcaacagagcgagactctgtctcaaaataaataaataaaaatgcatatatgtatatttgtgtgaatcatatacacatatataaaatatatgtatcatatacatatatatcacatttctttttctagtgtgtgtgtaccttgatttatgtctcacatattcaaaataactcaacttgtttaaaataagagcacaacctatttaagtagtaaagattcaaagccttcttctaaaatgcttaactttcctgtggatttgtggacccgtgggaaaatctcagtccccaggcaggaaggaaggagatatgacacatctctagtttgttgtaagtcgcctaccctagacctcatctccagtgctctgaatgtggagaggtaggtgcagggcagtgggatagagaggtgcactttgaaagactatcacatggaaacaaaagttccggctgggcacggtggctcacgcctgtaatccaagcactttgggaggccaaggcgagtggatcacgaggtcagcagttgaagaccagcctggccagcatggtgaaaccccgtctctactaaaaatagaaaaaattagccgggcatagtggcatgagcctgtaatcccagcgactcgggaggctgaagcaggagaatttctggaacctgggaggtggaggttgaagtgagctgagatggcaccattgcactccagcctggcagacagagtgagactccatctcaaaaaacaaacaaaaaaaagttccaatacacaatatgttatatgagatcttcacccaatcaaggattaaatggccaattcctaaatgatgcctacctttttatggccatgtatacctttgcctcagtactactggcatttgctgacatccatttatcaagatacagggatggatttctagaaggcccaggcaggggtgctggccaggagacaccaggcatagaccttcctttctcagagccttcgtggcccctagtttgaatctttgagtcactgcagtaaagttcctgatgtttgacagtactccttatgaagggagtcatatgagttgctagctgggttctctggatggtggtgtcatgccaacatgggagccactagcacaaagaacatgctaggttctgttgagacctgactttgggaatagcataggtacttatctttctcagcaccacacaaacacactccagaatgcaaaggaacctgcactgtgccatcttgcttctccctgcatagccacttctctttccagtggtgtttgtattttggttcattcaatcaatgaatgattgattgaatcaaccacttggtcccttcaatctgtaaccttcctgcaacactgtctttgtgatgttatcataaccttgatttttgagggatagaattgggcataatcagagaaaacgtggtctgggacacatttgtgggctattctatgctaaacatttccatatcattaatgttcaacacagctttgtggtgttggagataggattatcattgttaggatggttattatcaatactagctgtgattattgatcacttccacatgccaggcacagtgctgggtgctacatatttattacctaatttatagcttgctgcactcttgctgggtatgtgtaattattcccatttcacccgatccctgggagtttggtgaattaatcacccagcatccaaatagctaaccggtagcagagctgggattcaaactcagttaggctgacttctgtgcctgttttcttgcctaagcggtggacgcattgagtaggagaaggccagttattcctctttgtcactgatacaactggggacctgttgccggagatgtggagctgtgcattagggctgggtagaacacacataatgaaccatatgcacgagaactttttcatctttctgcatacacttggaactagttctttgttattgtaaaagcatcatgcaccaggtaaaatgtttaataacacagagaaatctaattgtcaagtatcttctcaacacacattaatcaacaattctcatatcgaaggataacctcttgtatttacaaaaaaaagaagaaaaagtgctgtcatcagtaaattcattcatgtatgttatacacttacatacaaaatgtatctatttgattaaattagaactctgctaatgaattactttccttgattgcacagtaataaagtcaatgttgtaaatataataattatagccaagtgcagtggcttacacctgtaatcccggcactttgggaggctgaggtgggcagatcacttgaggtcaggagtttgagaccagcctggccaacatggtgaaaccctgtctctactaaaaatacaaaaattatctgggtgtggtggcacatgcctgtaatcccagctactcaggaagctgaggactgagaatcgcttgaacctgggaagtggagtatgcagtgagccgagatagttctactgcactccagcctgagcaacagagcaagactccgtgtcaaaaaataaataatatatgtgtgtgtgtgtgtatgtacatgaattatatacaaatgagggaaaatatacaaatgagttgaatatatacaaatgagggaaaaattgttccttgtgtcaggaacaattactgtgaattttgtgtagcttttcctgactttttaaaattcaaatatatttcataaagttgaaatcacactgtggtctttttttttttttttttttttttaaccaaacatatagtggccatgtttctatgtcaatacatactgtttggcagtacagttgtactgacttgacattatagcttcataacttagtaaattaatcccttattgctgggcacagattctgttttccattttttcagtcatgagcaacgttgctggtttacctggggctaaataagaagtttaaatgcaaatagataattcttgagaaagcttcttccctgtatatactctttctgcagcagtgtctgagtgtctgtaccttcctataccttcaccatatcatgtatttgtcattttatagtgagttgtattacttgctaggtgagctggtatctcctttgataacacaaagaaggcctgggtttgcttggcaatttgttccaatattcttttcagttttaaataagttttgaacaaaaagttttagcattttacataaaaacctctaaagctctcaggctaattagtaatgtagcatatacaaattaagtttttttctgctgtgcttaattcttattaacacactaatcatgagagcccccaaattgctgtaaggagcacatttagaaaacatataaaggatcgatagttggtacttaagaaatcgttgaaacaccttttcttttttaatctatcttagagctgaaagataaaaagacttaaaatgagttagaatatgagtttttcagcatcttatagcttatgagttaaagcaagatttaaaaaatacatttaacatactaaatatttcaaaagctacagagataccgtaacatttaaaaaaataaattttcattgtggaaatcaactgccacaaaaacacaaccttttacgagacaacgtgatgtgcatgagaagccctgatgttgagaagctcataattcggtgtgagaaacacacaaggcatgatgccattcccatctgggatgaacagggaagacttcctgggagaggtgactatggacttaattttgctttgacacagcaaaaacatgaggaatgaattttgtgacttggaagattgttagttttctgtggagggaacaacactcatcttgcaaatttgccttcactattcaatcattagaaaataattttaaatgagcttagcagttctcagaattttggatttcaggaaacaaactttttaaaaacaaaacaaaaaggaggataccaatttaagcttgtcaaaaagattttcccccaaaagaaaaacacattaaaaacaacgacaaaaatcaacaaaaactaacactgttcccccatcaacaatcaatattactttctaaaagcaagggcgttttgacaccagatattgtgaggacatccacctgctctaagggacagccatttcactggtgttctgtcaatttttattttgaactaattttagactcacatagaagttggagaagtaggctgggcaccagtggctcatgcctgtaatcccagcactttgggaggccgaagcgggctgatcccttgaggccaggagttcaagaccagcctggtcaaatagtgaaatcctgtctctactaaaaatacaaaaattagcctggcatggcagcgcacacctgtaatcccagatacttgggaggctgagacatgagaatcacttgaagctgggagctggaggctgcagtgagccaagcggagtgccactgcactccagtctgggcgacagagtgagactctgtctcaaaaaaaaaaaaaaaaaaaaaaaagttgcagaaatagcaatatttaactatacttgttactcaaatttcaccactaaagcagtgtcatctttttattccaggatctagtccaggatgccacattatatttaattgttgtatctccttggtgcctttagtacttttttttttgagacacggtctcactctgtcacccaggctggagcacagtggtacaatcatgggttactgcaacctccacctcctaggctcaagcgatcctcccacctcagtctcctgagtacctgggactatacgcatgcaccaccatgcctggctaatttttgcatttgttttatcaaggcagggtttcatcatgttgcacaggctggttttgagctcctgggctcaagaaatctgcttacctcggcttcccaaagtgctgggattacagacatgagccactgcacctggcttggagcattcagtctttgatagttgcttacttatttccttctttctgatcttgagaccttgatttgtccagtattttctcatcattagctgagtgtaagcattttttggcaagaacattataaaaatgatgtggtatctttcttagtatattatctcaggtagaacataatgttgatctgtctcatccctggtaatgttaaccttgatcacttggttaaggtgatgtctgctgagtttttccaatgtaatgttattaatttttcctttgaaattcataattatttgaagggagatgttttgagatgatgctggcagccccgttttccttaaactttcacatgctgactttctattgttggatcttgcctgcagcagtgtttaccatgatgcttggctagtggtgactatgtatttcccttactctttttatagtcagtaattggaattcttctgaagaaagagctatcccttctcccccatttctttcttttcttttctttttgttgagacaaagtttcactcttgtcgcccaggctggagtgtaatggtgcgatatcggctccctgcaacctctgcctcccgtgttcaggcgattctcccgtctcagcctcccaaggagctgggattacaggtccatgccaccatgcccagctaatttttatatttttagtagagatggggtttcaccactttgaccaggctggtctcaaactcctcttctctggtgatcctcccacctcggactcccaaaagtgctgggattacaggtgtgagctacagcgcctggcccctccc

SEQ ID NO: 8830 - DNA, 34730 bp, Homo sapiens
cctgaaatttaaaatgttcaacataaaacacttgaaatacaagataaatggtatttccatttgacaagagaatatggttaaactttcaaaaatctttccaactaaagtagccttaaacgggcattcattccaaaatgcttttatagtgttactttataagaattaagttcactcaaaattggtaaacttaatatattcttcaacctccagtttttcaggataactatatttatacagaaatctagtctattacaacattaaacaaaacaaagacgacaaacactgggttattgattttatcacaggttttgttcaaaccaacatatttagtaaagtaccagtagtttcagcatgagtaaagtccaaaggaaatcttacctcagtaataaactaccacgtcctctacctccaccaggaccagaaagggccagcaatctggcttggatgggcctgtaaaagatttacaaatcagtgcaaaatcatatgtagacacacacagtcgcacccaaatactttcagagatgtggatcataaggagaaaaaatcacaaaagttccaaaaagatagtttcaaataaatctaaatgtctgaaacaggacaggaagtactatttcatttaacttcctcgtttctccaggacctgtgtcacagaaattatattcacctcgatgcccccacacattaacaagcctggatcaggtccccatcccgccatccccgaggaggctgcacgtggacaggaagctggggtaaggcggcttgttgcgtcccggcagggtctcggggccagcaacgggccgggtgtccgccggagcgggaaggggctttgtgctgcagttccgggcctgcagggccgagagcgggaatcagcagtccgggtcttctcacaggccaagaaagcatgccggcgcacccaggcctcgctctccttcctcagggacctgagaccagcgctctacggaggggacctggggcctctccacctcggcgacaacagggttttacccgccgccccgcgaacaggcctcgaggttccagtcttcttaaggctggccgccctccccgcccccaattcaccccgacctgagggctgcctctccgagctccgagttccgagttcccgttaggcccttacctcacgtcattcggatcccgcccggtgagcttgcgaatgttctcatccacgttcttaagactctctttggccttttccagctgttcctgcaaagttctcacggcgaccgccatcttctccctgcggcaggcttgagactgctttacaggccgagccgggctatgccgcgccgccgaggcgcgaaaggactgacagccgggctcagccaatgacgatgagcgttgtcttccggcctcaaccactcagcgaccggaagggggaagaacctgcagcctttgtgactctgagccaatgaaaagtcagccaggcagtcatctccctccccagttagctgcgggtgcctggatcccgctgctagcgcagagtcggggcgggtttcacaatccctgagttctcggagacttaggctcgcgagtctgcagttctggcaaggggagcgcggagttttctaggccttttaacctatgatgtaatgtgccttacaccgttttaacgtgatcacatcagagtgggacttagccaagcctccttttcttccttaccctcaccttggttaatgatttaattaggaaagggcgcggctattctgttggtgcgcatgctcagagagggggtgggcgcgtgctttcctctattaggttaattttttttttttcacacggagtctcgctctgtcgtccaggctggagtgcagtggcaccatctcggctcactgcaacctcctcctcccgggttcaagcgattctcctgcctcagcctcctgagtacctgggactacaggcgcgcgccaacacgcctggctaatttttgtattattagagaccggattccaccatgttgggcaggctggtctcgaactcctgacctcaggtgattcgcctgcctcgacctcccagggtgctgggattacaggcgtgagccaccacgcccagcctgattaggttaaagtgagaagagggaagacaaaaatgaaaactagtaaaagtcattagtcataatggctaacgtttgttaggggttgatcttgttcccgaccctctgtgaaaccgtctacatgccttatttctcacaaactgaaagtgtggataaaatgcctgttattactgataaggaaattgagactggagataatataactgtcctttggtcacgccagttgagaatcagtctctgattagacgctgagcatctatactagagaaaagaaagcaatggcgagacagacacgcagtcatggttgagttagcctcttcacctggcctagagctggttaagaccagacctaagggagcggccctgttgttagtggtgtctgtgtgtgttgtcccgcttctggttctgccctacctgcactgccaatgtaggaactagttttgttctataaatatatatacaaattgaagctcagaaaacattttttcacaggccaggcacagtggctcacgcccgtaatcccagcacttagggaggctgaggcaggtggatcacttgaggccaggagttggagaccagcctggccaacatggggaaaccccgcctttactaaaaatacaaaaattagctgggagtggtggtgtacgcctgtaatcccagctactcgggagcccgggatgcggaggttgcagtgagccgagattgcaccactgcactctagcctgtgcgacagagtgagactccgtcccaaacaaacaaaaaaacaaaacactttcccacagaaacaatgctttaaataatctcagccaggcatctatcttccttgtacaaagaattagtgggcccagtgtattaattaactcaagctaccactttaatccagcaatcttttagagcttccattgtgtatcagcagtaagctagggtttgaaaataaagcctagaacaagatagttgtgattcctgcttctgtggggtttgtaggcttccaaaggagcaatgatcattcattagttcaacaaatactgagggcccactatgtgccaggtgctattctaggcacttgggtatatcagtgtacaataaagatctctgagcaagtccagtggattgtgcctgtaatcccagatacttgggagactgaggtgggagaatcgctacagcccaggagttaagaccagcctgggcaacatagcaacgatcctgtctctaaaaataaaaattttaaaaattgtactggagaggctgaggcgggatgattgtttgagtccaggagtttgagactgcagtgagctgtcatcacaccactgcactctagcctgggcagcagtgagactctgtctcaaaaataaataaataaataaataaatagtatagcatgttagaaagcgggaagtactataggagaaaaaaatgtagagatgaataatggggatgaagattgacaattatctaattctgattgtgagcatacttagcctcattgatcttattacaggtctgtgtacaaccttaggcagtacctgaggcatgagagtgtgataatagtagagcgtattcagcaagtgtaagaatgtttgcatgtatggtcggcccggtaatcccaggattttgggaggccttggtgggcggatcacttgagattgggagttcaagaccagcctggccaacatgatgaaaccctgtctctactaaaaatacaaaattagtcctgcatggtggcaagtgcctgtagtgtcagctgcttggaaggctgaggcagaattgcttgagcccgggaggtggaggttgcatgcagtgagccaagatcatgccactgcactctggcctgggcaacagtgagactctgtctcaaacaaaacaaaacacacacagctgggcacagtggctcaagtctgtaatcccagcactttgggaggccgaggcaggcggatcacctgaggtcacgagttcgagatcagcctgaccaacatggagaaaccccgtctctactaaaaatacaaaatgagctgggcttggtggtgcatgcctgtaatcccacctactcgggaagctgaggcaggagaatcacttgaacccgggaggcggggttgcagtgagctgagatagtgccattgcactccagcctgggcaacaagagcaaaactctgtctcaaaacacacacacacacacacacacacacacacactcactgtccttgcttccataggatctattcctaggagccttggcaatttaactttatggagaaggataagtaggatgctgtgttcaatagttagtaggtcctcattaaataagtttcctttctatccagaaacgtactttaaaagcctcatgttattgtggttggagaagtcaactttgataaattggccatttacttactttttgacttgtgtggtggacttggactcctttttcttgatggtagtgatgagggcaagaatgtcatctagacataaaggacctgatttcgcataactgaaaatttagtgctggaaaaattaagattaccatggcaaaatactcttcaaaattacacaatttagtgttttcaaaggcttaagtggagcttttatgctggatttacgtgatgaatggaataaactgattcaaacattagaagggacatgcttaaaaaaaaaacctaccacaattaaaattttggaacatgatcttaaattcctgtgaaagggcatgaagagtttgtgtgtgtgtttcgttttttgagacgaagtcttgctctgtcgcccaggctggagtgcagtggcacaatttctgctcgctgcaacctctgcctcccaggttcaagtgattctcctgcctcagccccccgagtagctgggattacaggcacctgtcaccacgcccggctaatttttgtatttttagtggagacgggttttcaccatgttggccaggctgctctcaaaactcatgacctcgtgatcccccccaccccccgtgcctcggcctcccaaagtgctggattttacaggcatgagccaccttgcggtatgttaatttgggggaaaacaacagggacaattggggaaaaattttgttttgtgaattaccaatggaagaactaatcacaggctaagcaacatgcttacggttgaatttgccaaatttaagatgtacatactatgatgtagcatgtgtatttatttgcacatgcagtgggacaattcctacagttgtctcacactgctgtagattattagcaactccatcctgcagtgacatcgcttttctgaattctatagcacttttcacctaatcctctgattagtctgtattttccggttcaagtgtatcttgtttttcgtttgctccacttcccttgtcccttgcaccccactaacaggaaaattcctggtggtcaaaatggctctaattctttttgtatacccgggcttaattcaataggaattgggataacttttcaatatttaaaaaatttgcactgtgaaaacgtatattttaaactctttctacaacttttcatatttgaagaacatatggcaggaagtggatgcttttgatgaagccaaaagaatttttttaacttctattgctaattaacaaggaggtggccgcgggagctctttttttttttttttttttgagacggagtttcactcttgttgcccaggctggagtgcagtggcgcgatctcagctcaccgcaacctccgcctcccgagttcaagcgattctcctgcctcagactcccgagtagctgggattacaggcatgcaccaccaggccccgctaattttgtacttatagtagagacggggtttctcaggctggttcgaacttccgacctcatgtgatccacccgcctccgccacccaaagtgctgggattacaggcgtgagccaccgcgcccgggccaggcgggagctttaggtcttattttatcttgctctgcccccgacatcgtggtgagaggggaaccttcctcatatctgggcgctggcctctccgggcttggragagaggaactcagtgatcatagagctggccgaatgccggggtagaggggaccggaagttgtttttttcgcccccgcccagcggccggatcgcatctcagctggttggctttggttagasctcccgtcagactttmgttcggccctaggatttggtakccccgaagtgtgggctctctccagtaccagactcatttcagtaccagcctttgggaagtcgtgtgaatacctcggtctcttagccacagggatagaatggcggcctgacggagccgcggcgccggcgaagtcgctgaggcgcgagctggaacccccagaccagctcaaacgggagccaaamctcgaagcttggaagaattagcaggaaatggcggatgaggcgttgtttttgcttctccataacgagatggtgtctggagtgtacaagtccgcggagcagggggaggtggtgagtgctgccacacaaccttgaggtccttttgcggtgacacaccttgtttcccctcagtgctttccttcaacccctgtcccatcgccacccgacgcctcccgaggtgtacacaaaatggtccacctccaggtgtcctaaaccctagaacctgtcagttgtctcctttgaaccgtcatctttcatcgttttctctttcgtatcttcttctatttgattctcttttgtctattcccgtacgtttgtcttgcacgccacagattttggtacttttagtgttgtccctgccattatttacgagagggttaactgcagagcctacttagttttgctggcacttccagcacttgagccatgcactggacagacctgtgccaacctgagaagcctgtccctccttcctcattcctaatgctcagtacaactccacacaacttgagacctgaagcctaatgaaggttgagtttgcaaaggaaagtttgcaggcgttaggataattagggaacataatttaaattaattatttcagaaagtatttatttagtgcccttatgtcagagcgatttctaggtgccagggatatagtagtgmatgaaacaatggccccatccttgtagagatttttttttaatctaatttaatccgaaatgtgatagtatgtrgcggttacttmtaatatgtgggagtccttattcaatcattgtgggcctgycactgctgacactgctagataaattaaataaaataatactcctgcctcacagtatttagggaatagtgatttaatgaatagttaacactgagtattggctggtagaatcatggagttgtaacggattttagaaatactccaaagtcatgctcaagtcaggagccctttctttaatgctattgataaaaaatgagtggagagtggggataggaaatgtatcctaggcaaagataaagtggtagaggtatgaaagagtggtggatttaaatacacttaagcatttctttggactagactgaatagagagtgagaagaattgagaggtgaagttagaaagctttgtgtaattaaagaattcggatcttttcgagggaatatttttaaggaagggaatgatgtggaccatttgcattttagaaaagtaatccagtgtttgggctagagagggaagatccttgtagggggaaaatcctttattacgggagtcactgcaggaggagatgaagatctggattaagacagggatagtgagaaaaggagataacagatttgaaagttagaaagtggaattctgtaggccttgtttaaggatgggagtgggagttgaaaattatcgtcaggttttcagcttgagcagctgggttggatggtggtactrttaatcagaaaaggaaataaaggagaagaaaaaaataaggaggtaagataatgagttatttcggggcaggttgaacttttgaggtgcctgtatgacatccaaaaaaaaggtactgccagtttgcacaagaaggataggcaggatacatttggaaggttattggaaatgaagcgaattctattcttattcaaatgacccatctataatagagatttttttcaagtcacaaacttctgactttattattgacctcaaggtttactgtttgtgcaaagctagccttccttttccctctagaacagttaacacaccccttttacttttttgtcataacccccgatccccccaaaccacttgcgtattcagttctcttcattctcccctcccttcttacctttcctcttctctctctctctttttttttttttttagwtggagttttgttcttgtctcccaggctggagtgcagtggtgtgatctcagctcactgcagcctccgcctcttgggttcaagcgattctcctgcttcagcctcctgagtatctggaattacaggtgccggccaccatgcctgactaatttttttgtatttttagtagagacggagtttcaccctgttgaccaggctgttcttgaacttctgacctcaggtgatctgcccgccttggcctcccaaagtgctgggattacaagcgtaagccactgcgcctggcccttttctgactcttgtctagaataatattttttcttctttttaaaatatcttttttttttcccgtgggttaatcctaaataaaatgaacagagctgttctactcaggcctgataattttaagagatggactaacatacaagagaaaggaagttcatagttttgaatcatttaagctaaaaataactttctttttctactgcagtgtatttatgatgggggggaaaattgaaagtacataataagcaaaaattatataaataacagttatgtggtagtcttcataatcagaacccatactgaaatacgggtatataagggttcacattagtgtccatactttgagtgtgcttgaaatttttcatcatgaaaaatgtaaaagatacataatcctgtcatccagaggtgatttttagagatttttttcagacataaaaagatctgtaaaaactatgttgtttatgtctgaaaagacctataaaatccatttctcgctgacaggattatgtgtctttttttttgtttttgttatggaaagtttttttaaatgaaataaagttttataaattttcagtatagcaaaataaacttccataagacttgaggtgagataaaagaaagaaacagtgttctaaccctccaaatcaaggtttttcaaactatgcttaaagaggaattctcttaaaatggactaattgggcatttctcaatttatggtgaatggattttgaaaggctaatggataaaatgttctcaagttgaatttttcttaaaaatttggtgcctactcaaaagtgcatgaacaagtagcaaaattaagtagtagggcttaaktcaaaagctcatgtgatcataggatttgaaagtgtctgcrtataagcatattgtaactgcccagtgggttcttcttccccactgcccaggtagagctgatctatcaagacaggagaattgcaataaggagtttatgtagagctgctaaatgggagagcagagttttattattgctcawatcagcctccccaaacatgcagagtctagggtttatcaaggatagtttggtaggctgggggctggggaatgggtgctcctggttggttggggatgcagttacagaggtgggggccagaggaccagttggagtcatccgaaatgcaaaagtctgaaaagacatctcaaaaggccttttttaggttctacaatagtgatattatttacaggagtaattggggaagttacaaatctgtgacttccagaataatgtctgattatcatttaactacctacattttagcagaattcagacccctctcataagcctaaccttatagtctttcattagttttgcaaaggtgatttagtttcgggaagggctattatcattcttgctttaagcttacactataaactaaatttctcccaaagttagcttgggctgcatccagaaatgaccaagggcagcttggaggttaaaggcaagatggagttgattaggtgagatctcttttacagtcatgattttcttactgttacaatctttgcaaaggtggtttcaatagttcctgctaataaatatgttcctaggtgattctacagagagcagattattccaaaaagagcatcatgatttacagacacttattctagctgaacttgtttttttgttttttttttttttaagagacaagtctctgggttagtgtggtggctcacacctgtaaatcccagcactttggaaggctgaggtgggagaattacttgagcccaggagttggagaccaacctgggcaacatagtgaaacagtgtctctatttaaataaaaaaaaaaagaggctggacacggtggctcaggcctgtaatcctagcactttgggaggccaaggcaggcaggtcacaaggacaggagttccaggccagcctggccaacatggtgaaactccgtctctactaaaaatacaaaaaatagctgggtgtggtggtgcacgcatgtagtcccagctactcgggaggctgaggcagaagaatcacttgaacccaggaggcggaggttgcattgagccgagattgtgtcactgcactccaacctgggtgacagagcaagactcagtctcaaaaaaaaacagagagagagagagagagacaatgtcttgctctgtcatgcaggctgaaatgcagtgttgggactttggctcactgcagccttgacctcctgggcttaagtgatcctcccacatcagcctctcgaatagctaggctatgggcatgctaccatgtccagctaattaaaaaaatttttttttgtagaaacagagtcttgctatgttgctcaggctggtctcagactcctagtctcaagtgaccctcctgcctcagcctmctacggtgctgggattataggcatgagcactgcgcctggcctcatcctaagcatgtttgagaagtgtggagaatagcagaaaaactgaagatagtgatacgtacagtaatagatgtatgtacagaattttacgacagcatagggcctaaggaagtttcagggaagccatctgggagaatgtaatacttgagcagaatttaaagaatgtgaatgccaggcgcggtggctcacgcttgtaacccagcactttgggaggccgaggcgggcggatcacaaggtcaggagatcgagaccgtcctggctaacatggtgaaaccccatctctactaaaaatacaaaaaattagccgggcgtggtggcggtcgcctgtagtcccagctactcaggaggctgaggcaggagaatggcgtgaacctgggaggcagagcttgcagtgagccgagatcacgccactacactccagcctgggcaactgagcgagactccgtctcaaaaaaaaaaaaaaaagaatgtgaagtctagggaatagcacataaaaaggcagggagacagaagagaacatggcactctggagttgctgcagaaatttcagagtggtaaaagggaaggatgtttgtgaatttggttaactagccaggagtctttaaggaaaggacataccatgatgccatgctaaggagtttggactttattttttgtttgtttgttggtttgttttgagacaggatctcactctgttgcccggtctagagtgcagtggctagatattggctcactgaaacctctgcctcctgcactcaagccatcctcctacctcagcctcccaagtagctgggactataggtgcatgccaccatgttcacctaatttttgtaatttttttaaagatgaggtttcactatgttgcccaggctgccctcgwactcctaagctcaagcaatccttggcctcccaatgtactgggatttacaggcatgagtcactacatcaggcctggactttattttgaagraaggggagcrggtgctgaaattccagtagagaataacatgattttttttttagacagagtttyactgttattgcccaggctggaatgcaatggggtgaccttggctcactgcaacctccgcctcctgggttcaagcaattctcctgcctcagcctcccgagtagctgggatwacaggcatgcgccaccatgcccagctaatgttttatgtttttagtagagatggggtttttccgtgtcggtaaagctggtctcgaactcctgacctcaggtaatccgcctgcctcggcctcccaaaatgctaggaggcgtgagccatcatgcccggccgagaataacatgattttttttagaaatttactttagtagaagttacactaccagaaatatagaagatgacacaaagtaggaaaaaatgagacaagaccagttggaaagctatagctaaaaaccaggagagaaatgataaggctttacttaagaagtaagggtagagagagacgatgaattttgaaaagcttgtaaaagataggctccaccggactacagtgtatggggggttgggagcacaggggtgaagaaaatggaagttttctggttggagtaactaggtgaatggtggtgccattaatgaagttaggaaattttggaggcagagcaggctgaagacattaataaaatgaatatcatttgaatatgcatacttcgaaggtcctgtgggaccactagatgtctatgcccaataaagtctgtactagaaacgcagatttartagtcacagcaccataagcagagtgcatggttccttagaagaaagtttagcaaataataagccctatggtttccttagtgggagacaaacagccttcagaatatacaaaaatccctgcctttttggagctttattttagcagagaggggaacaaggggcacatgggcaatataaaatagtaaaatgtatggtatattaaatggtgaaagaagttctgtggagacagattaagcaaggaagtgggactgagtatcaaaatcaatttttagaaggtttgttaaagctgattagcggccccatacccagagtttctgattaagtaaattgggagtgggactagagaatttgcaagttcccatgtgatgctgatgttgctggtcttttttttttttttttttctggtgaygaagtctcgccctgtcacccagactggagtgcagtggcatgatctcggctcgctgcaatctctgcctcctgggttcaagcgtttctcctgcctcagcctcttgagtagctgggactacaggtatgtgccaccatgcccggctaattttttgtatttttagtagagatgaggtttcactgtgttagccaggatgatctcgatctcctgacttcgtgatccgcccgcctcagccttccaaatgctgggattacagatgtgagccaccacacccagccaacacatttttaaaatcactaggatagagagttgccaaaggggtatgatgttgcacttttaaagaagatggttaaaatgggcctaagatggtgacatgagagtagactcaaaggaagtgagggagttggttgtgtgactatctggaggaagagttgatgcaaaagcccctggaatgtgcctggcatgtttaagggacggggcagagtgcatctgcagaaggttgaagccagagaggtatggggtctggattgtagaggacagtccatcagtcatccataggatttggatgtgttcagcatagaggtactatttcaagccttaagattgaatgagattgtcaaagaaagagcaaagcaatctcatgatttaaggcaaagtgtgataatcagctaagacactgagaactgggaagcctggatgattctgagacattttgaagcaaggaacaatagaacttagagcagaaagcaaatgactcagggaaaaacatcaaaggtgataccaggttttataacctaggagagaagaatgattgaaattgggataaaagggagacgaggagtaattaggaagaggatttgatttctgaaaatcaattataagcagtagttccctgtttatcctgttgccttgtgccaggtgcagtggctcacacctgtagtcccacagctttgggaggccaagccaggaggatatcttgaggtcaggactttgagaccagcctgggtaacagagtgagatcccatctcttaaaaaaaaaaaaaatagccaggcatggtgatgtgcctgtagtcctagctacttgggagactgaggtgggaggattgcttgaacccaggaatttaaagcttcaatgaaccatgatctcgccagtgcactgcagcctgggcgacagagcaagacttgtcaaataaataagtaaatagcagtttggtcttttgttggaggaacgtctattcttagcttggacactgcggtttttccttgggcagcagaagcaatgtggcgattgaagaagtgacctaaaactttgatgttaggtagaagcagatggcccaagccaagacaagtgcttgtaaatccactggtgggagcccctcctcctaacagcaggttattaacgctgccagaaaaaaagtgtcccctctaccggtctggtgaagaaacctcatcgctacgggcctgggactgtggcacttctagagattctcgttaccagaaattgacctagcttctcatctggaagctgcctttctagaggttggtgagagagatcacccaggatttcaaaaccaactttaggtttcagagcacagtcattggggtgctgcaggaggctagtgaagtgtacctggaggctagtgaagtgtacctggtgggttggtttgaagatgctaatttgtgtgccatctacggtaagagagttggctctcatgcccaaagacatccagttggctcgccagacacggagwgagcgagcttaagtgaaggcagattttaaggcattttatatgaattctgtaaaatactttggtttaatttgtgactttttggggagaaattatttataatatgttgcatttgtgcttaagtcattccgtcttttgggatgaatgtgaaaagtgactgttcatagacctcagtgacgtaagcactgttgctcaggagtgacaagttgctaatacgcagaagggatgggtgacattttttcattctcatgacgcatgtttctgtaagttaatgacttgttaggtagctattaaggaactagagttgataartaaatgtgtataggttccttttgcaatataactggttattacttgatccaagtgtttaacatttggagctaagtctgaccatacattactgtgatagaatgtgggccttttcaagggtgaagatacaagccttaaccacagtataacttgcagtttccttaaacaaacaaagaaataaaaacctagcatggagtacattatgtgcatttataatagctattttaaatattgtagtgtcaacattcaaaaattaattcttttacattcgcaaatggtggggagtcttgtcattaaggtgtgtataacttagaatccacttggttttctcctaactggactgcatttgttttcatagtagtaaaatgttatgtgtattacaccttgcataagtcctcattctactacgtgttaactaaccctctagatgataatgcagatgctaactgtgggattttatttrtaagaactctagaataaataccagttattcctaccaacatcggctgttactaatattctgaagtagttagtgcaacttttcattgtgttgtggttggtctcctaagtaggttggatttttctcctcttctaagagaaaacaatagtgaaattattttctttctcttttctctctgtttctgtctctttctctctctctttctcccttcccttyccttccctcccctcccctcccctcttcttttcttttctttctcttctcttctcttttctttctttcatggggtcccttgctcaacctgttgcccaggctggagtkcaatgacatgatcatggctcagtgcagcctcaacttcctggactcaagcaatccacctgcatcagcctccaaaatggcacatgctaccatgcccagctattttatttttacttttagtacagatgtggtcttgctatgttgcccaggctggtcttgagccattgagctcaagtgatcctcctgctttggcctcctaaagtgctgggattacaggcatgagccaccgtgtcttgaggggtttgtttctattaaaagacttggtgtcagggaggagcacaaagctttaacccattgaacctctgacagttaagatggtgttgggttaggttacatctggttactatcctgggaaaatcacttctatagagatggccttccaagtggttttaaaatgtatctttctgtctgggcgcggtggctcacgcctgtwatccctgcactttgggaggccaaggcaggtggattgcttgaggtcaggagtttgagaccagcatggccaacattttgtatttttgtattttctctactaaaaatacaaaaattaaccaggcatggtggtgggtgcttataattccagctacttaggaacctgaggcaggagaatcacttraaccctgtagatggaggttgcagtgarccgagatggccccactgtactgcagcctggatgacagagcgagactccatctcaaaataaatttaaaaaatgtatccttctattgaagtttttaggttaatcatgtatatgttgactaaattatgaattaacttgtttatcaaaaaaaaagtaaaaagtaaagtaagtaaaagtaaagtaaaataaataaaatcaaccttataattcactttttcttaaactgtttcagggaaaaaagtataaatgtttacattaatatttttaaccaatcttgtaaaacaatttctgaatactawcatcctagcattctaaaagtatttaaaactattgttttttaaaataggaaaacggacgatgtattactaagctggaaaacatgssgtttcgagtgggacaaggattgatagaaaggtgagcaggttggatttgaaaattttcttgcaggtaggttataaacaaaggtgatctatttcaaaagattgcataaaacttgggatattttaattttaattcctgaatgttattctctttacttcaaaaattaaaatttctttttagatccaatgccatttaactcatttattcaaattttattttaatgtttaaagaaaatatatattttatatattttagactttcttcctgaagctattttagactttattcctgaagctattgaagcaactatctaaaatcttactgcattttcaacttaagatctgctaggttctttaacctgcatagaatttttaagtacataggtttgaaataactatagtctatgtttatgcgtgtaattatctttgaacttataaatcagttctttttagtatttctttctcactacctgaatagttaaactcggagtatattttatataacaatgtcatgataatgctcagctctttgttcttttgtggttttttgatgtgctagaatgcattgcacctgaaattttggctataatgttagactaatttgaggcctcataatttatataacataatgtgaatccattgagataggatcatgttacctggtgcttatgactttattagtgttaataaatgttcagccaggtgtggtggctcatgcctgtaatcccagcactttgtgaggccaaggtgggagaatctcttgagctcaggagtttgagaccagccagggtaacaaagtggaaccctgtctctacaaagatatacagattagctgagcatggtgacatgtgcctgtggtctcagctgctagggaggctgaggtgggaggatagcttgagcctgggagggaggtagacgttgcaatgagccgagattatgctattgcactctaacctgggcgacagagccagaayctgtctcaaaaaaaaaattaaaattaaaaaacccaataaatgttcagtgctrttctggcatttggaaattagttaataattagtccctcttgctttttttggaggagaaatactgtattacttctagttgatctttttaggtttacaaaagatactgcaaggttcaaggatgagttagatatcatgaagttcatttgtaaagatttttggactacggtattcaagaaacaaatcgacaatctaaggacaaatcatcaggtaattaaattaattaaggcctatattttaaagtcctttaacttgatataaatatygtattttagtgacttatttaaaacctaaaataatttctrgttaactttggaatatgtttatgttattaatgagttattagtttttttcttctaatagtgtgaactgaktaaagacaaagggacagttatcagtaatgatagctgttcctttcacccaattawatgctatgttaagttttttaaagtagcataagtcaggatgagaatagcttttactatttggttccttagttactgttaattagtggtaataatatgcagaaccacaaatatatcacctttatgtctttagagtcatttcttttttttgaagaagaagaatttggattattttaattatttttatatacagaaaactcaacagtgtatgtttaacccagtttggtgtcaagttctttagcctttgccttttcctgcttgacaattcaagccacagacttgagacccaggacattgcctccccagtgacagtggatttcgttttgtctgtcgtaattggttctgatagcttccaccagctgaacctaagctccattgtcctctgagttaatctgtgtaaaggcgacagtggtgcgggtcttcttgtggattagacatcccagtcttgccttccccttgataatgcggtaagggacccccattttatgacacaaggcaggcaggaagacagccacctcgatgggatccacatagtgtgcagtcaccaccagctgagccttcttgttctcctccaaggtggagatggtgttaactcctgctcggaggacaagtggtctcttagtggggacatcccctttgcctgcagctttcttttcagcccgggccaatagcctctgcttattttcttgctttgtctttggtctgtacttgtgggccagcttaagcagctaagtagctatttggcggtgcagggcctgggtgaactggttaattgtaggaggcactttcagytgcttacagaggatggctttgtgccactgcaacctgatatagcggggccatttcacaaagtgagtgaggtccatattgggtggatgtcctgtccaatgccagaattcttaggccttttctcaaacaggggattcaccactttctttctttctttytttttttttttttttgagatggagtcttgctgtgttgcccaggctagagtgcaatggtgcgatctcggctcaccacaacctccgcctcctgggttcaagccattctgcctcaggctcccaggtagctgggactacaggcatgtgccaccactccggctaatttttgtatttttagtagaggtggggtttcaccatgctggccaggctggtctcgaactcctgacctcaagtgatccgcttgtctcggcctcccaatgtgctgggagtacagacgtgagccaccacgcccaaccaggattcaccactttcttggcctcctgtttcttcatgacaccaagggccagagccacctccttcctcttggcctttccttttggcatcttgggtggcaggaagagattctttatagtcatttctaaagtctaatttatagagcattttactcttaaataactcctggattattactgctgtcatattttctactcttaaaagattttcttactacaaaattaatagattacatagaaaactatgtatttattaaaattttaaaagggagacagagtctcgctttgttgcccagactagtcttgagctcctggactcaagtaattctttggcctcagcctcttgcatagctgggattataggcatgcaccaccactcccagcttcattagattttattttatgaacttcaaggaaatacttagagtagatttggaattttgattaagtaaaaaattaaatgtatctggtactctcaataggataattcatttatttatttatttttaattagagacagtgtctcactatgttttccagactggtctcaaactcttgggctcaatggatcctcccgccttggcctcccagagttctgggattacaggtgtgagccactgtgcctggcctggaattcattttgtaccaactttagcttggaattactggaaatgctaataggaagaaatgactatgatttttttactctctagacatgatttactaatatatatcagctggctggacatggtggctcatgcttagaattgcagcattttgggaggctgaggcagaaggattgcttgagctcaggagttggagaccagcctgagcaacatacttagaacctatttctacaaaaaacttgaaaaaaatttcaccaggcatattggtatgtgcctgaggtttcagctacatgggaggagttcaaggatacagtgaaatactacacttttgcctggataacagcaaaattctgtctcttaaaaaaataaagctgggcgcggtggctcacccctgtaatcccagcactttgggaggccgaggtgggcagatcacctgaggtcaggagttcgagaccagcctggccaaygtggtgaaaccctgtctctactaaaaatacaaaaattagccaggcatagtggcgcacgcttatartcccagccactcaggaggctgaggaaggagaattgcttgaacccgggaggcagaggttgcagtgagcctagatcacaccactgcactccagcctgggcgacagagcaagactctgtctcaaataaacaaataaatccgggtgcggtggctcacgcctataatccsagcacttcaggaggccaaggcgggtggatcacctgaggttgggagttcaagaccagccctgccaacatggagaaaccccgtctctactaaaaatacaaaattagctgggcgtagtggcgcatgcctgtaatcccagctacttgggaggctgaggcaggagaatcacttgaacccaggaggcggaggttgtggtgagctgagatcgagccattgcactccagcctgggcaacaagagtgaaactctgtctcaaaaaaataaataaataaaaataaaaattaggtcgggtgtggtgatcatacatgtaatttcagcactttgggaggctgaggcaggaggattacttgagccctggagttccagaccagcctaggcaacatagggagaccccctttctacaaaaaattaataaaactagccgggtgtggtggcatgtgtctgtggtcccagctactcggaaggctgaggcaagagaattgctaaacacccaggtgtttgagggtgcagtgagctgtgattgcaccaccacactccagcctagacaacagagtgagagctcatgtctaaataaataactatacaaacaaacagcttatttcatgtggacatgtattaatgattccatcgtactagactatgagtttttaaggatagggactatgtctcagacagtgtttttatcttcagtgtataaaaccgttcggtatacattagtgttgtgaaaatactgaactcgcaactcttcagcttgaacattgcaaaactccttcatttaaacaaaatttgaccaggctgggcacgtgggcttatgcctgtaatcccagcacttcgggaggtcaaggtgggcagattgcttgagcccaggagtttgagaccagcctgggcaacatggcgaaaccccatctgtacaagaaatataaaaattagcagggcatggtgatgcacgcctgtagtcccagctacttgggagcctgcggtgggaggattgattgagtctgggagttggaggctgcagtgaggcgtaattgtgccactgcattctaccctgggcgacagaggagaccccgtctcaaagaacagaaaaagaaaacttggccaatgggaaggagacttttaataactttaaaaaacacttaaattgtttcataagaataaaataattttaaggactgctaggtacrttgactttggattttttttctatttttggaacagggcatctatgtacttcaggacaacaaatttcgcctgcttactcagatgtctgcaggaaaacagtatttagaacatgcatctaaggtatttaatggaatagaagttggggtttttgttaatagtaggactacagggaaaagtacagtgctaatcataacaaactattgaattaaaaatatgttttaaggtgttcttttttgtttaaagagttttctatgaaatgagagacatgttacaataacactaaactgtagctaaatagtcatagagtgaccaattaaagaaacactggccgggcgctatggctcacgcctgtaatcccagcactttgggaggccaaggcaggtggattacctgaggtcaagagttcaagaccagcttggccagcatggggaaaccctttctctactaaaaatatgaaaaatagctggacgttctggcgagcgcctgcaatcccagctattcgggaggctgaggcaggagaatcacttgaacccgggaggcagaagttgcagtgagctgagatcgtgctatcattgcactccagcctggggtataagagcaaaactccatctcaaaaaaaaaaaaaaagaaaaaaaagaaacactataactaaatracagtgaaatgtagatgtatggtagatcactttttttttttttttaagacaaggtcttgctctgtcatctaggctggagtgtagtggtacaatcatggcctatcttgaccttgacccccccgggctcaagtgatcctcccacttcagtcacccaaggaggtaggactgcaggtgtgggccaccatgcctggctaatttttaaaaaaattttttagagatgggatcccacgatgttgcccaggctcgtcttgaactcctgggctcaagtgatcacctcacctcggcctcccagtgtgttgggattacaggtgtgagccactgcatccggcctgattgcctattttctatatttttggggtatccaggctctaattacatttttatggttaatgtgtatattttctctcttttttttttttttcggacagagtgtgagactcactgcaacctctgcctcctgggttcaagtgattctcctgcctcagcctcctgagtagctgggattacaggtgtgcgccaccatgcctggctaattttttgtatctttagtagagacagggtttcaccatgttggcgaggctagtctcaaactcctgacctcgtgatccacccacctcagcctcccaaagtgctcggattacagacgtgattacaaaagccacccaaaatgctgggattacagcctcccaaagtgctgggattacagacgtgattacaaaagccacccaaaatgctgggattacagcctcccaaagtgctgggattataggccatgcctggcatattttctcttttttactaacttcttagtttaatatttctggttctcacttaactttttgggatcttggtttcttcagctgtgaaaagagtaagttggaccaattcagtgatttctaactattttgagttatggacatctttgagaactggaacacctttccccataaatacgcacatatacatggtttttattttcataggggtcacaaattccccgattaagaactcttgggatgaacaatctctaaggcctcttccagcttaaaatttcatgactcagatctagttacttattagtrcccatttatgtatattatttataagataatattttatattattcgtagataatgtagtatgttgaacatcatgcagtatagatgtgggtaatcaaaaattccctgaattgctaatttttcaatccagttcttgtcatgacttttggttttgtagctcagccctattccctttctttgtttctatatgacagggtttctcaacgtccaaactgttgatactttcaaccagataattctttgttgtggcaagctataagtcttgaacaagtcaagattcttggttgtaaataggggaaagaaattctgcttgtaagctaacaaaattgataagctcaaagaataggcaataaccaggggaggttaaggcagccagtaagatagccaagtcactctgcagactgtatctacttagaatcctgcaggcagcagggactgtagacacaaactacctttactgcctccagaactaattctgatcagtttctggcttgtttttgtcactgagtctagattcacagtcctggactggagtacttmattggctgagcttaagtcttaagtcctacrtccatgctttagtttccagggagctgggaaatmtatcaatatttttcagtaatttgaacagttcttcaaaatcctttttttaaacaggaatgacttactgatgataaatcatgtaatgttgtatttatcaatagctttactattttagtaaatccttactatttttaatgrttttttttccttttagtatttagcatttacgtgtggcttaatcagaggtggcttatcaaacttgggaataaaaagtattgtaacagctgaagtgtcttcaatgcctgcttgtaagttgaattcacctttcttacaaatgttttagtaatttgttttcaggtctgtttttttttttaatttaactgagaggaaatttaaaatgctgaaactttcattttagttttatcaatgtaacactttagtgtagtaatatgtagcatactacattcatwttcagtaatttttgaataatggactaaaatccaaatttataagacaatttaagggatgatttttaacttttctaaagttattcaaactgtaacttttttaaagatattcttctgaatatctcctgcagtgttttaagatagcaaatttccctagaacattgaaaatgctattttttttttttttttttttttttgagacggagtctcgctctgttgcccaggctggagtgcagtggcacaatctcggctcactgcaagctccacctcccgggttcacgccattctcctgcctcaacctcccgagtagctgggactacagttgcctgccaccacgcccagctaattttttgtatttttagtagagatgggtttcaccgtgttagccaggatggtctccatctcctgaccttgtgatccgtctgcctcggcctcccaaagtgctgggattacaggcatgaaccaccgcgcccggcccgaaaatgctatttttaaacaattgtttaggatatgtctattatatcaagctaagtaaaaccaaatattcttttatcactaaatgtctccctaaagatcttttcaccagagctaccaaccaagaaaaaatggacttgagctttattgtatttcttttcaatttacaatgatcattagccatgaaatactgtacccaaatgtaggattcataaagagaaacaaaagtgcttactcaacaaaccatataatcatcccataaaaatagaattgactggccgggtgtggtgcctcacacctgtaagctcagcactttgggaggccgaggtgggcgtatcatgaggtcaggagtttgagaccagcctggccaataaggtgaaaccctgtctctactaaaaatacaaaaattagctgggcgtggtgacagacgcctgtagtcccagctactcaggaggctgaggcaggagaatcacttgaacccaggaggtggaggttgcagtgagcagagatcgtgccactgcactccagcctgggcaacagagcaagactccatctcaaaaaaaaagaaaaaatagaattgactttattgaatattatgaagaatgcgaaaaagtttttgacatagcagatttcttgactgaaactatttcctatatggaacagaaaattgatgtttagacttgttttctttgtatctaaaatcaaagaattatttgtatttttttttttaggcaaatttcaggtgatgatacagaagctgtagaacatactgaaatgcaaggcttcaacagtgtaaagagataaattattcatgtaaaagtatttcaagtagtgatgatttaattacattgttcgatgtttgtacaggagtaagcatgtatttttatcaatttaacacagatcaaaggagatgaagggacattctgccatgacatacacttaaccaaaactattcaaaatgaaaaccggatttcaaataaccagacaccaagatgcagggcccttattttaaacctttttatttggttagagtgatatgtatttagccatagatggagaaacaaagctcagggtttgttgaattagcatgagagaaaattatgtaccaacagaattatttgtgagaagaatgaacaaattttgataaagtatgaatttgttttattttaaaaagcaaacatactaaattttttttattttattgcttataatttattaagaatgtttacacctgtataaggatttcatatatacattgtatgtgtgtatatataaatacatatatgactgcctaaattgtttataaatttaatttttctttaataggtttcattccttcagagctccattaatgtaatcaaaatgaaatatagattagtttaaatgtgaattcagtgactctagggccaaagaatattaggtatgtttggaaagaatttttgtatttattcctgttacagttttgactttcaacttctctccccgtgcatggaagtcctggtaaaggatctaacatctttattcccttctttcctcttccagctgagcagagttggataattgaattagtcattctgacattctttggaccatatcatcttagtggtttggggtcagtgctcatctgatawatctttcttaccacctcttctacttactttctcttacttaaattatctggcataagcagttatctccagcttttgttagaatcttgcatgttgattactaaaactatactttgtttcccatttatttattacccttttgcatgtatttgtgtgacagggaactctgcagcagggggtgactgacacaccaaacaagatgtttcactgggtactctgccatagaaatggcagattaagaagattgactataccaaacattatattaaaaacacaraataaaaactataaaaatgtactttaggacattaaagaaaactcaagttagaagcataccattttcctttcatggaagggtacagtattacaaagataatttgtttaacttgatttattaaattctagttatgtgccctataatgatktttcagtcagtgacagacctcatatatggcagtggttccataagattacaatactgtatttttactgtaccttctttatgtttagatatgcaagtacttaccattgtgttacagtgtcctacagtattcactacaataatatgctgtacaggtttgtagcctaggagcaataggccatagcttaggtgtatagtagatcataccatctaggtttgtgtaagtacactctgtgattgtacaattttaaaatctcctaatgatgatgcatttctcagaatgtatcccctttgctaagcaatgcatgactgcaatcctaattctcacatgttttggggaaaaaattttaattttgaaaaaatttaggaaagttcctacyaaatatacatgtataaagtttattaaaagtcataatgacccaggaatagctaatgacacagaagtagatcaaaatagaacacaatagagaacttcaaaataaaacaggtgtgagaattgtgtgtgtgaaaaagctgggttcaaataagttggtttgttagacattcatatgcctacycatcagccatttcgttctcccttccttgctgacaaagccccattttttttttctttttttttggcctaaaactctgtatggctgccttgtgctatagaatagggtgcttccctagcctagagagggtgagtgttgattagattctgtgccaatcatggtaattggcttacttgatcatttgatggaatctaggctaacgagacaaaggaagtctgaaggctttgaataagaaattttctgttgctcttaacaattgatacaagttagggatttgccagcatccctcttctgcttctcagtgaagatatgtgatatggatgtttgaagctaatctgcaacagccttctgatggccatgaaaggacaagtatggagatgaaagctatcacactgagaatagtgggatgtagatagaaagcacctgaattgtgcttctgaattaaccaatccaggaactgctttacctttggactttttgttatgtgagatattctttatattgttccatttgctttgggtatatgtatattgttacttgtagccaaaaagaaacctctcttagtagaaacaaagggagagttaggttattcaaaaattagtatgggacarttgaatatgcctttttctgcgggagtaggtggggagaaacttaaaggttcacttgtaaaacaataaagtactaaagaaaatgtgataatactttcgtgattttgtggtggagaaggcctttccaacacacaaatgtaggaaatcataaaggaaaactataaaacaaagaaatgtagtaaaatctcttcaacaaatagtgttgggaaaactggacatccacatacaaaagaatgaaattggattgttgccttaatgccatacatagaaatcaacttaaggccgggtgtggtggctcaagcctgtaatcccagcactttgggaggccgaggtggggcagatcatgaggtcaggagttcaagaccagcctggccaaacagtgaaaccctgtctctactgaaaaaaatacaaaaattagctgggtgtggtggtgggcgcctgtagtcccagctacttgggaggctgaggcaggagaattgcttgaacccgggagtcggaggttgcagtgagccaagatggagccactgcgctccagcctgggcgacacagtgagactctgtctccaaaaaaaaaaagaaatcaacttaaaatggattgaagatttaaaagtaaaatctgaaactatacaattctagcagaaaacataggggaaaagcttcgtaacattggtcttggcaatgatctcttgggtaagacaccaaaagcaggcaacaaatgcagagatagacaagtgggactacatcaaactaataagatgcacagaaaggacagtgaaaaggcaacttagggatggaagaaaatatttgtaagccatatacactcggccctttctatcttgacggttcaaccaagaattcaaccatccttggtttgaaatatttgaaaaaaaaaaaacaaagacaaggcctggctcacacctgtaatcccaacactttggaaggccagagtgggcggatgacccgagatcaggagttcaagacgagcctggccaacatggcaaaaccctgtctctactaaaaatacaaaaattagttgggtgttgtggcacatgcctgtagtcccagctacccaggaggctgaggcaggagaattacttgaaccgtggaggtggaggttgcagtgagccgagatcatgccactgcactccagcctgggtgacagagtaagactccatgtccaaaaaacaaaaagaaaaccaaagacaatataaaacacattttaaaactacagtatgacaatgatttacgtagcatttacagtgtgcttggtataagtaatttttttcctctctgtattgatcatgtggcaggtataagtaatctagagttttttttttttttttttttttttaaggcagagtttcgctcctgttggccaggctggagtgcaatggtgcaatctcagctcaccacaacctccgcctcctgggttcaagtgattctcctgcctcagactcccaagaagctgggattacaagcatgcgtcaccacacctggctaatttttttgtatttttagtagagacaggatttctccatgttggtcaggctagtctcaaactcccgacctcaggtgatccgcccacttcagcctcccaaagtgctgggattacaggtgtgagccactgcacccagcctagagatgatttaaagtatatggtggtgtggtggctcgcatctgtaatcccggcactttgggagtctgaggtgggcggatcacctgaggtcaggagtttgagaccagcctagccaatatgatgaaaccctgtctctactaaaaatacaaaaattagccgggtgtggtggctggtgtctgtaatcctagctacttgggaggctgaggcaggagaatcagctggacctgggaggtgggggttgaagtgagccgagatctcaccactgcactccagcctgggtgacaagagtgagactctgtctcaatcagtcaatcaatcaatcaatcaatcaagtatacaagatggcagagcaggccaagcaggctgggtgcagtgattcacacttgttagccaagcactttaggaggccaagatgggattggttgagctcaggagaccagtctgggaaatgtggcgagagctcatctcttaaaataaaaaaaaagttagccaagtatgtactcccagtttcttgggaggctgaggcaagatgattttttgagcctgaagggtttcatgagcatgggaggttgaagctccagtgaactgtgatagtgcccttgcactccagcctgggaccggcgagataagggattttctttctccctgggtatgttcaacctgtgaatgtacacaatgacgaggtcagggtgtagagtttatatgagggcttcagaaatttggcttagggccagatttcatgttttttaaccacagtaacaaaatgacataacaaaaagtttgcattgcagaaagcacaattttaaaaaggaaaattatttacagtgcataccacataagcgaatatttgcaaatttttttgtaataatagagatgggtctccctatgttgcccaggccagtctcaaactcctgggctcaagtgatccacctgcctcagcctcccaaagagctgggatacaggcgggagccacggctcccagccacatatttgcattttaaaaatgcacgtataactttaaaacatataatttaactcagcaattccacttctacaaagttaacctaattaagtaaatgagtatgagaacttgtatgtataaggattttcactatttggttaagtgtccattgatggtactttattaaattatgatgctaacagccaggtgcggtggctcacacctgtaatcctagcactttgggaggccgaggcgggtggaacatgaggtcaggagttcgagaccagcctgaccaatatggtgaaaccctgtctctactaaaaataaaaaaattagccgggcgtggtggcacacacctgtagtcccagctacttgggaggccgaggcaggagagttgcttgaacctgggaggcggaggttgcagtgagccgagatcatgccactgcactccagcctgggtgacagtgatactccatctcaaaaaaaaaaaaaaaaaaaaattatgatgctaacggccaggcacggtggttcatgcctgtaatctcagcactttgggaggccgaggcgggtggatcacctgaggtcaggagttcaagaccagcctgactaacatggagaaaccctgtctctactaaaaatacaaaattagccgggcgtggtggcgcatgcctgtaatcccagctatcgggaggctgaagcaggagaatcacatgaacctgggagggggaggttgcaatgagccaagattgtgccatcgcactccagcctgggcatcaagagcgaaacgccgtcccaaaaaaaaaaaaaattatgatgctaacattcaaggaaattctgtgcagctgttaaaaaggatgaaatagatttacatgaatttacatggaaagatgttaactggtatattaagagaaaaagttttgctacaggatactgcaaatgtaatatttaagtatatataatgaatatatacatagtgtcaaaaagactgaaagttaaaagtaaattatacagtagttctcttgaaactttttttttctttttgagacggagtttcgctcttgttgcccaggctggagtgcaatggcatgatcttggctcaccacaaactccgcctcctgggttcaagcaattctcctgtctcagtctcctgagtagctgggattacaggcatgcgccatcatgccctgctaattttgtatttttagtagagacggggtttcttcatgttggtcaggctggtctcaaactcccaacctcaggtgatctgtccgcctcggcctcccaaagtgcagggattacaggcgtgaactaccatgcctggccaattctctggaatttttgacattaagtttctatattatttgggatttttattttatttttatttttttgagagggagtttcgctcttattgcccaggctggagtgtaatagcatgaccttggctcactgcaacctctgcctcccgggttcaagcaattctccggcctcagccttctgagtagctgggattacaggtgcctaccaccacacctggctaattgtttgtacttttagtagagatggggtttcaccatgttggccaggctggtcttgaactcctgacttcaggtgatccacccacctctccctccaaagtgctgggattacaggcgtgagccactgtgcctggcctatttgggattttaaaataatcattcccccaatacagatttttttatctggagtgggaaaacatgataaaacaaccagtgatttttagacttttttggagtcctgggattccacagggtgcctgatatggtttggctgtgtccccacccaaatctcaacttgaattatatctcccagaattcccacatgttgtgggagggaccaagggggaggtaattgaatcatggaggccagcctttcccatgctattcttgtgatagtgaataagtctcacgagatctgatgggtttatgaggggtttccacttttgcttcttcctcattctctcttcctgctgccatatgagaagtgccttttgccctctgccatgattgtgagaccttccccagccacgtggaagtgtaagtcaaattaaacctctttcttttgtaaattgcccagtcttgggtttgtctttactagcagtgtgagaacggactaatgcagtaaattggtaccagtagagtggggtgttgctgaaaagatacccgaaaatgtggaagcgactttggaactgggtaacaagcagagattggaacagtttgaagggctagaagaagacaggaaaatgtgggaaagtttggaacttcctagacttgttgaatggctttgcccaaaatgctgatagcgatatggacaataaatccaggccgaggtggttcagatggagatgaggaactccttgggaactggagcaaaggtgacttttgtgttttagcaaagaaactggtggcattttgcccctgcgttagagatttgtggaactttgaacttgtgagagaggatttagggtatctggctgaagaaacttctttttttttttttttttcgatagagtcttgctctgtcgcccaggctggagtgcagtggcacgatctcagctcactgcagcctccgcctcccaggttcaagcaattctcctgactcagcctcctgagtagctgggattacaggcacacaccaccatgcccggttaatttttgtattttttttagtagagacgggggtttcaccatgtgggctaggctggtcttgaactcctgacctcaagtgatccacttgccttggcctcccaaagtgctgggattacaggcgtgagccactgcacccggcctggctgaataaatttcttttttcctttttcttttttttttttgtgagacggagtctcactctattgcccaggctggagtgcagtggcgcgatctcggctcactgcaacctctgcctcctgggttcatgccattctcctgcctcagcctcccgagtagctgggactacaggcacccaccaccatgtccagctaatttttttgtatttttttagtagagacggggtttcactgtgtttgccaggaaggtctcgatctcctgacctcatgatctgcctgcctcagcctcccaaaatgctgggattacaggcgtgagccaccacgcccagccagctgaagaaatttctaagcagcaaagcattcaagaggtgacttgggtactgctaaagtcgttcagttttaaagggggaacagagcattaaacttcagaaaatttgcagcctgactacgatagaaaagaaaaacccattttctggggagaagttcaagccagctgcagaaatttgcataagtagcaaggagcctgatgataatcctcaagaccatggggaaaatgtcaccaggccatgtctgagacttttatagcagcccctcccatcacaggcccggaggcccaggaggaaaaagtggttttgtgggcaaggcccagggtccccatgctatgtgcagcctaggg

SEQ ID NO: 8831 - DNA, 12723 bp, Homo sapiens
tcaactccatagacagggcttacacaccggaccaaattgaggactagctaaaacagggatagggtgggtgcacctttccatgagctgtgtccgccagtgtgtcatgtcagtttacaatttccatggcaacacctagaagttactgcccctttccatgacaatgacccaacaacctggaagttaccaccctttttctagaaatttctgcataatccaccacttaatttgcatataattaaaaatgggtgtaaatgtgatggcagaactgcctcggaattgccactgtgggtactctgcatgtggggtagccctgttttgcaaggagcagcacctctgctcctgttgtacactgtcccttcaataaaagttgctaacaccaccaccttgcccttgaattctttcctgggcaaagccaagaaccctgttggcctaagccgcagttctggggttcgcctgccctgcatcaccagcacagtggaaggccacaagctcacagcattttcatccgtaaacaaagcttggcaatatctctgatggttaagagcttacgtgtttgcgccagtgagacttgcactcagtcttctttgagtgagacttgaactcgattctgagtctcctccttcctagatggactcattatttacttatttatgtattcactcatctattcattaatttatactcttagtttgatatcaacatctgtaaaatggggatggtaatgtggtgatatggaggaaaataaaataactctggcattgttcttactatttacctctgtactgtcatcgttatcattcctttgataaccgtgagcacctgtcatgggcctggcactctagtaggctctcaggatgcacaatgaccctgtccctgcttgctggagacataagagaagcccccagccactgacatctgggtgttgtaagaaagcaagaacagtcatggacactgctaagttttgatgccaaagagccaaatttgcagtaccagaatgtcctttccatgtgtgacccaaagttttggctactgaagacgttgcatgccctccaacagtggaagtggtgccctgaatacgccagaaataatcgtggagtcaacgaagatctgggagtattgtttggagacatctcagtattcctaattcattttcccatccttaaataaaaatctttcttactgatgatctgagaacttcttgtaagccccatttccatgagtagagttggccattgcccactaagaaaatttaggtggtttttattgggattagtggatgaacttaggattagtgtggcccttccttgagatataatgacaaccttggtgaaagcaagaccacagggcctatcttcagggaagtgccttgcattttaataccaaccatgccacgtgtatgtgtttcctgggcctgccataacaaattatcgcaaactgggtagattgagaatcattcattgtttcatggttttggtggccggaagtccaaaatcaaggcgtttgtggggttcgttccttctggaagctatgagggagaaaccatgccatgcctgtctcctggtttctggtgactgctggcaattcttgatgtcccttggcttggaaacaccacattctaatctctacttcctcccttacatcaccttctcctctggctttgtgtcctttctgtctcttacaaggacaccagtcattggacttaggacccacctaattgagtatgatctcatctcattccttatcttaattacatttgcaaagaccctgtttccaaataaagtcacattcgttggttctgagtgaacatgtttctagggggacactattgaacccactgcactgcatcaaacgtatgggtgtgctttctcttggcctttctcctatttgccttctctgtgttgggaattgtggcttcacacccatctacttatccctgcatgttgagcatcgtctgttacctgaagagcagaaggatgataaaagtgaggaaactgaggcacaggcttgccccaggttacacagctagttatgatggagggtgggtcggaagccaagcgccccccagcccccaccccacaacaggtgtatgtggcctctggtttatccttctttccccctgctcaccacatggcttctcattttgaaaacccggtggctaataaagtagatgagtttcaggattgcaaaatattgtgatcctggcctttgtccattgtgtaatcttcacagtgaccagagtgtttgcagttcctaggaagttcacccattcccaacagtgtcccagggtcaagctcagatgacctgtggtatttttatacccatatatgtgtcaatgtttataacttttaaagttgttttcaggaagcactgaggcatgtggtcgttcacaggtgacaaagacagaggctcagggaactcagttggttgctgagctttaaacccaagtctatttctgaggctggactgagtctttgagaaaatgcaaagtaacctagcatagtgtcagacacaaaatagtcagcaaataccatcgtagattcaggcttctgagtccaaagctaacaattctcatctccaattcccatcttcaaatattaaaataaactttttttttaagagacagaatctcactgtgttgctcaggctagagtgctgtggcatcttagctcacagcagcctcgacctaccaggctcaagcgatccttctgcctcagtctcctgagtaggtaggactataggcatgcaccaccatgcccagctatttttaaaatttcctgtagagatggggtctcagtgcattggccagactgacctaaactcctggctacaagtgatcctcttgccttggcctcccaaagtgctgggattacaggtgtgagccaccatgcccagccttaaataaactctttagtgtcaaaaaatctacgtgaggccaggtgtggtggcttacccctgtaatcacagcactttaggaggccaaggtgggtgggtcatctgaggtcaggagttcaagcccagcctggctgacatgacgaaacgccatctctactaaaaacacaaaaattagccaggtgtggtggcatgtgcctgtaatcttagctactcaagaggctgaggcaggagaatggcttgaacccaggaggcaggggttgcagtcagctgagactgcgccagtgtactccagcctgagagacagagcgagactctgtctcaaagaaaaacaaaaacaaaaacaaacaaaaatctacttgaaccaataaaaattcccatccccacctagaattctaaatattttataaataaagtcttcagagcctagatattcactagaacccagtggtcacgtgttcctaatgggtggaatattattttgaatctttccatgatgagagttacattgatgggtgaaagctttttatgcaacatcatcattgttgaataaacagacgcttagcatatttaggttggaatgcaagggaactaaaggtaggggagattcttaaggaagtctactttctcttcaagaatgctatcaaattgaaaggtaattcctaaacaagagtcatttgtaaattagggaggaagagctaaaaaagattcctagcaagaaacatcataaaggggcttgataaagccaaaaaactaaaagaaaaaaaaaaaggaattagaaacagagaaaagaggcttcgtgttgtttgtaaatttgtgaataaatctgttaaagaaatattggattcatattcaacttggaaaacagggaaaggccttttattgcatgctttgaagtttgaatacactttcagtagctcttcgttatctcaaattaaatcttaaattgagcttgtggttctgtgaattaatactccagcctttcagccctgctgctgaggtcattcaaatctaatggtggaaacggtcacagggtcaggccttggatggtgctgtatagaaatgccttaatgatgctggcagatgtttgcattctgcagctggggcggctggcgggttgggggctgcaggaagagaggagttgatgatcacattattgtgtcagccgcctgtgtgaataaggaaggacagactcccaccccatcccatcattccaggttcaataagaggtaggtgcttcctaaagcagaaaaatgtaagggaagtcatcatcgcttatcatcacctgaatgttcaccatggtgacccacatctcaggatgctgcaaaacgagagaggtcacctgtctgtgtaatcgcatatagcattctaaagatgttccattcattcagcaaatgtttaataaaggcttcatctgaagtttaatggacattgtttgataaaacagacccagtcactggtgtcagggagtttatataaaagtatacacgtatctgtgcaaatgtgtgcatttaaggcccgccgagcctgagctgatatgcatgtcttaactttgctgtttctctaaggggatggaaggattggctaccctgagctttctagacttgttattttttttttttttaagacagaatcttgttctgtctccgagctagagtacaatggtatgatcatagctcactacaacctccaatgcctgggtttaagtgatcctgccacctcagcctcccaagtagctaggactacaggcgagagccaccatactgggctaatttttgttttttattgagatggggtcttcctatgttgcccagcctggtctcaaacttctggcctcaaagcaatcctcctgccttgatagacgtgttcattgtaggtttctagcctctgaatccaaattttatttttctagtactttattttattttactttttattgattgaaaccttgaaataaagtttttaaaaatctatttgattttaaacgatctttagaaatatatgaaggttaaaaataactctcattttgctttttataaacagtccactcctacatgtagacacatttagatgcttcattttgcctgtagaaagtttttctaacaataaactgaccaatgatgatgaaatttttattgactcaaatgtgtgattggttgatttactgtattcagtccaagctcctcccaaaggttagctcattgactctacaactctgttttcctcattcattcattcctctaatcaatatgtattgctcacttggtacatgtcagatactttcctaggtgctggggagaaacaagcaaagtacttcagggcctgtattagtttgtttttcacgctgctgataaagacacacccgagactgggaagaaaaagaggtttaattggacttacagttctgcacggctggggaggcctcagaatcatggcaggaggtgaaaggcacttcttacacggcagcggcaagagaaaatgaggaagaagcgaacgtgagaacccctggtaaacccatcagatcttgtgacacttattcactatcacgaggatagcgcaggaaagaccggcccacatgattgagttacctcgccctgggtccctcccacaacatgtgggaattctgggagatataattcaagttgagatttgggtggagacacacccaaagcatatcagggtcctaggcaactttgtgtgagaacagaacagagaggaagcgacacacctttcctttgggagcaatttttgggttgcttttgtttttatttgttgttttcattcctggtagtaatagtaacagtagaaaatggcagcgttatagccataaacaaagtgctctgtggtttctctctcaccatcccctaaaccctacaaggctaggggaaaatggtaatactcatgaacaactccacttcataaatgaggatgccggcactcggggaggtcaagtgagtttcataaggtcatagagcaaccaagtggcagggctgactcccacccaggtgtgttccatgggcagcgtcttcttactgcactgtcctgacttgctctagtgagatataagagaggcacaatctgctttccttttgatggtgtgcagcagcatgatggccgcgcgaatttccaagaagaggatgttggtcgctgatggcatcttcaaagcygaacggaatcagtttcttactccggagctggctaaagacgcttctctgaagctcaggttcaagttacacccatcacgacagtaacaaatatcttagccaacagaacaaaaaatgttcctggtgagaacagccagggattctggaattgactgctgtagttcagaagagatttggcttcccacagggcattgtagagctttatgctgaaaaggtggccccagaggtctgtgtgccattgcccaggtcgagtctgcagtacaaactcctaggagggcttactgtgcggagggcctgcgatggtgggctgtggttcatcatgaataggggggccataggctgccaagctgtggtttctrggagactctgaggacagagggtcaaatccatgagtttgtggatggcctgatgatccccagcggagaccaygttaactagtacattgatgctgttgtgtgccatgtgctgctcagatagggttttctgggcatcaaggtgaaggtcatgctgccctgggaccccgctggtaagactggccctaagaagcctctgcctgaccacgtgagcatcatggaacccaaagatgaggtagtgcccaccactcccatctcagaacagaagggtgggaagccagagccacctgctatgccccagccagtccccatagcataacgggctgtccttggcagttgtattcggagtctggatgttgctttgtaaagacatttaataaaatattgtacaaagacaaccgggaatgcctgtaatcccagcactgtgggagtcaagacaggccgatcacttgaggtcaagagttcaagaccagtctggccaacatggtgaaaccctgtctctactaaaaatacaaagattagcctggcgtgccctgtaatcacagctacttgggaggctgaggcaggtgaatcgcttgaacccgggaggtggaggttgcagtgagccaagatcgtgccattgcactccagcctgggcaaaaagagtaaaactcagtctcaaaacaacagcaacagaaatgtattctctcacagttctggaggccagacattcagaatcaaggcagggctatacttactttggaggctctagctaagaatctgttccttgcatctttcgtttctggtggctgctcgtgattgtgggctgtgaccatatcactccaatccctgcctctgcagccacatggccttctcctcttctcctgtgttcctttcctgtctgcctcaaatctccctctacctttctgctatgaagacacttgtttttggatttagggtcttcctggctgatctcatgtcaagatccgtaacttaattacatctgcaaagacctgattcccaataagcttgccttcacaagttgcagggatttggatatggaactgcctttttggaggccaccattcaacccacaataagagcacagtggtgaggtttgaggggtggtatgaggtcacagtcacagccacccctctcaccagctgtgtgacaattctggatttccttagctgtcctctgcctccatctccctttctctgtaagtggaagtggtattcattgatcacacactacatgccggacaccaagctattacattttttgaatatgtttcttctttgcctcttgaggactaaccagccgggtttagattatttcctccccgtgtcgctttcctgcccccacatgttaaagatggtgcaagggaaccagagagctttgatccctggtttctctggtcacaaacctgctctcctctccagaactccaggctgcctttctgtgggggctaaatcaaatttagctgttcccccaactgcaaagtacataggcatcaagtgaaagggtaaatgcatgaaaacctgaatggctgatcctctaagacagtgagagcagatgttaattgctcactgtccaagtgctgggctctgtgataagagcttcacgcagatgacatcaaagcaccatgtgtgggggaagcacgatgatcttgaccattttacagatgaggaaggtaaggctcggtgtcatcaactcacagaggaagtggagctggagtctctgtggctccagggtcaggtgtgtagtctcgaaggctgttttctgttctgcaagtttctccttaacacatttccagccccattttctggcagggagaccccaggactgaaaggagctggaagagtgaggtctaagagaaaaaggggctgggtgtggtagctcatgcctgtaatcccagcactttgggaggccaaggtgggtgggtcacctgaggtcaggacttcgagaccagcctggccaacatggtgaaaccgcatctctactaaaaataaaaaaaaaaaaaaaattagccaggcatggtggtgcatgtctgttatcccagctacttgggaggctaaggcaggagaatcacttgaacctgggaggcagcggttgcagtgagccgagatggcgccactgcactctagcctgggcggcaagcaagacaccatttcagagaaaaacaacaacaacaaaacatatggccagcagccagtgttgttatttcaggatgggaaccaggcactgcacctcctcattaggagtcagagtaagggggctaagctggttgacatgactggggacagagttgctgttgaaattgtcaggttatgaagggaaattagctgctgggtgtcaagaggtgcacattgctgcaggcattggcaactgggagccctggtgtgtctattagctcctcaggctgtgaggccttaatgacacccctgccaacattacaggaggcagcaagtgacagtaggaatgagagaggccagctaatctaatctgtacgccccacaggagttgggggctgaggacttcaagacctggcttctgctccctgtcacagtggcaaagacaatgacaataaaagcacagcctccagagagaagagccttcgatggacctgggtgttaaaccaggggccaggcaaaaactgggggatgcagaataggaggttgggctggaggtgagtgagaagaacggatacggttaggaccaacatttaggcaatatgaccgtgtacaggattctaccaccatcgtcaccatcagtgttactgttccctgccatctgcctatggggtgtctaccatctaaagttcagcactgcactgggcatttttaaattatcattagtatataattatatataataataatttaatttataactatatcatttattaaggtcctactatataccaaattctattggacacatgtcctaataataaacgtgatataatctatcattatttacaaaacttcacactctgacctttattaattatgtgtgtgccaattatgtgcagggaactgtattaatcgtagttagcaatatcgtctctagtcctccaaccctataaagtgggcacaattattatttctctattgcaattgccatttagcctcagctggattggaaactatgtaatggagactctcaggccactgtcttttgagcagcattttctgcattgcattcttgtatgtaatcctaaaatgtagatgtagttttcccccttttagagataaggtaatcaaaacttatagaggttaaagggacttgccaaagcgacacagccatgaatggcaaagctaggatttaaacccttggacttcttctccttgccattccaccccatcataaattctaaacatcataagcagaaccatcataagtcagggtccatctggaagatggatggatggatggatggatggatggatggatggagagagagagagacagataggcagacagatagctagacagatggacagatagagatttttaggaactggcgaattggctcacacaattatggaagcccagaagtcccaagaagtgtagccagcaatctggagatccagaagggcccatggtagaaacctcatccaaaggcagaagacaagcatcccaggttgaagacagtcaggcaaagagagaaaattatttcttactcagacttttgttttattcgggccttcaacagattagatgagatccacccctacagggcagggcaatcagttttactcagtctactgattcaaaggttagtctcatgtagaatcaccctcacagacacacactcagaaataatggttagtcagatatctgggcactgtgtggcccagtcaagttgacacctacaattttttttttgccttctttttatttttggtgttgtcatcctgtgtccaaggcacatatagtcaatcatcacacctttcccttagcctgtactaggttctgtgccaaggattttagaaagtcatgtctcattcagttcccctaacaggtctaggagtcattatcctccccaacctaaggaaactgagacccagaggttcagagtatcccaagatcctacaggaattgcagattgtagccaaaattggaactcctaattccagagctcctccctcctgctagcatttttctttgagtagttttattaatgagaaaagctgttgagcaccagagcaaccccgcctcttctaaataccatctgacatatacattcagcagaggaaaaatgatgtgaggtctggggcttgctttaaaatactttggggccagacacagtggctcacacctgtaagcccagtgctttgggagtctgaagtggtaggatcactagaggtcaggagttcaagaccagcctgggtaacatagtaacatagggagaccctcatctctataaaaaatttacatgaaaaaaaataaacaaaatacttctgcaacagcagcagcaagagctgccgcaatgaaagaagaaagaaaaggagggacaggatgaaggaaagaagcagtgttaacattctagtaatatttgcatctgaatgatatttatatggggttattgtcctccctttgtgtatgtttaaaattttcataataagcatatttatatatatatacacataaaacatatatgtacatattatcataatgcctacctgctcttgagaaagtagtgccgtatggctgggggtttctctcactggtttctatggctctcccctcccccactttttctaagaagtggtagtacctatctgactattttcttggctgcctgaagaggcctcaaaattagagtaaacaaattacccattaccagggaagcctccttcctcccagcagattcccagcatcttctttcacctctaggagatattttccaaggtcactaaattaagccttcagacaatcgaaaaattgaatctcagtacctctattttcctaacaaaatttctgcagcaccgattggggctgacaggtacggccgtgcagctttctgggctgttcaggtcgatttggccaagcaggacggcatcagcttgtattggagggaacatctgagcagctcagggccccctgggagtcagagcgttccctccctccttgccactgtaaatgactatttctgtcgtttgcagagtgtccttttctttctcctacagccccatccttaccctctatagccatcaggtcaggtgcgtcttcttcatttatttatcaaaagggccatagcaatcattgcaaacatgtttaggaggatttggaaaccatgttcttttaaagggcactaatgatgcagcagtaatcacagtgctagtggaaggggagggcagaatgtgatgttttgggagtgaattctgtaagagaagaagggactgcgttcctagccctccagagcttgcagctatcacagcctggctggtggaggggcttgcagagctgagaaccactcagaatttgggggctgaagaccctggctgtctgagcaccatctctgtgactttcgaggtcatgttttccctccagccctcatttccccctttataagctgtgtcttagctagtgctttcagcaaagaatatctttaggctcctggaggattgatatcccctgaagtagcccctgaccagcctccaagatgtatcctaaaagctcctatggaagtttacatttcactcaaaatatctgtgttcatgtaaatgtaaaaatgatgtcttaagatgcttagcagtgaataaaatgggtgctctagggagatgcagtgagtttatcctgtggctttgagtatacactggtaccctacgtgggagaccccggtgcccatgcccgggtgcacaaagccagcatcagtgacctgcacaccaggaggcaggctgcatgatgattgggtgcaagtccttaggtgggtcactcagtctttcttttcttgagttttttcatctgtgaaagagtgatcataatactatttccattgagaagaagaaataatttatgtaaagcacaaagcataatccctggtattcaataagtactcagtaaatactagtgaaaataatgattataactatgacctccagaagcttttgctgagcatctatctgtagcactgcatgtcaagccaagctagagtacagtctcttaggagacacaggggaggaaaacatccttggcaggttcgcatattggtgatctcgtcgtaattttctcaaatacccttcctctttcctcacttttggtgataactacctgtgttgctcttgtcacttttgcctggatccactaactcaccacctaggtatctgcaa

SEQ ID NO: 8832 - DNA, 18138 bp, Homo sapiens
cattaaataattaagtcagttgaggtggctcacacctgtaattccagcactttgggaggttgaggcaggaggatcgcttaagctcaggagttcaagaccagcctgagcaacatagcaagacctggtgtcatgtctacaaaaataaaaattaaaaaatttattttttgtgtgtggtggccatgtgcctatagtcccagctacctgggaggctgaggtgagaggatcacttgagcccaggagagtgaggctgcagtgagctatgattgcaccactgcactccagcctgggcaacagagcaagaccctgtctcaaaaaaaaaaaaaaaaaaaaaaagcaagagaacaaaatccacagcagtgagcattgtattgtatatgtaacttagtacacaggcaggtattcacctgtgataagatgcctacagaaggatctgccgggcccccaagcatgtgagttttccctgctggtggggcaagtgcctgagtcctaacccggccagcacgggctttcccagtctactcagttttcgccaggagcctgtacacgtgctgattcctggcaaagctgaatgtctatctccacgtgtctgttggccagcatgtggataacctatggtgccctcgcccatcttcccccgggccgatcttccagctatgttgggggctccctgcacacttgagacgccactccttggctatacatgctggacccttcggctcccaggatgtcccttgtctccactggttttgtcctgtctttggtctgtactggcatcccaaagctgagccttgagagaccagctgatggggctgcagacgcggtggggcagagcccagcctgccaccgtaggagggagtagtagtggctcctggtgcaggtgccagtcttaaaggccaggtgagctttggtctggtctggccaggcagtggaaggacagaacctgcatgaggtggggcaagtgttgggacacccccaggctctcacccggtcctagccactccgcatgctggccttgccagtcttgccacatgaaacaccttccctctgacacccaaaatccacctgacccatgtcacagataagtgactggtgctcagcccagtcccaccactggtgggtggctgattaggggggatccagcatgtctggtgccagcccctccctgaggaagctgcctgccctcctgcctgcacctgtggtgccttcctggccgcggccacctgtcccatcccagttgcgcagatggcaggctccgcaggcctggctgggtggcaggggctcaggtcagagaggatctcagtgtagtcagcaaatgaagccctctcctccagccccctccccaccatccaccccttcctattctcagcagatggccttgaaaatagaagccaccagagcagatgtctccgagcacctttacctgtgccctcctctgtgtctgtgcccaacatgctgcccccccccaagaagaactgcccatgtcgccagcccagggtacccctcacgtgtggcaggccccactccagccggcctcctccaggttatcagctggcctgcatcgtcagcgtttttgcccatcagcgcactgcacacataatggacacacaggacacacaaatgcaggctgcagcatgctgcccacgcacacgcatgcacacacagcgtgccgcccatgatgcacagatgcatgtgtgggcctacccacgtgtctgagtgcacatacatgcatgtgcacgtgtgttatctccaccgtttcattctttaagcctgccccttcctctcctgtcctcacagctctatcccgctccccgcttgctcctgaactctctccaaacaggtttctcccctaaccccatgacattctgtaaagggcactgtgacctatggaccgagttttgctcttgttgcccgggctggaatgcaatggcgcgatctcagtttaccgcaacctcccgcctcctgggttcaagcgattctcctgcctcagcctaccgagtagctgggattacaggcatgcaccaccaggcctaattttgtgtttttagtagcgacagggtttcaccatgttggtcaggctggtcttgaactcctgacctcaggtgatctgtccgcctcggactcccaaagttctgggattacaggtgtgagccaccacatctgaatctgtcccagccgaccgctcccttatttttgggacaccttggcttcgggaagccctgtgccttcttggccccaagaccctctcccacctcctttcctggaagccccggctggggcctcgggcctctcacctcccatccctggtgcctcacactccaagcgccctctttatactcatgaccccatctccagggccatggacacctcttggctctgccatcttccaggtgctcagctttcccctaatacccgggaggcctcctagattctcctcttctgctcacaccctcacctataggtcaggggcctggcaggaggcagcacttctctccagggaccgctggtgccctccgcctgctccagcacagttggcttcagtggctgcggcctctccgtctccctgcagtgcatactcaactagagttgtcgagaaaacctaagccggccataccacccctccgagggcccttcccactccccagcgtcctcacacactttccagggcctctgtgcttgcagccccagcctccccctactgcctgtggctccctgcctgggcacacacagacccctgccctggtgggacaagccctcccagaggaagaggagtgtgcctgggtcaggtcccagcaggagcatgatggggtcaaaggtcaactcctatcccaagatggcaagacccccctccgccctccacctggggcttcctaggtgtttggaagtcatgctctgcccattcccctgccccagccaccctccccgcagcccatcctccctccctgaggaacctgccccttcacagctgttcacacgtccctgggcagcctctagtgcagcagcgatgccatgaaaccaccgtggagggcaccatcagccttggcactgctgccttaggaggtgcagcatgtccacactcatgcccacaggggacagctttcatcagaagacactgcagcagagatggcggctgcaacccaaagcagggggttcccctggggctggatctaaaagtgacctcaggagaaaaaggcaagaggctgaggtgaggcagtgctgtggagccccatggcagggagtgttactatgtctgctgccacttgcacttacagtgggaaagacgcacgcggactcacactgaggctggctggggagggaggggacaggcacgcagggcttccgatctgccgtgtgttgctccttcaactgggtcccgggctcccaggcatcatgatgctctttgtatgtgtgtctaaaataattcactagtgaaaccacttcccaacccctccacttgggcctcaggggaaaatccaggatccttgccgggcattccaggccccatgggacctggccagtcaggtggcctctgcagcctttgtgtcacactccagaccttggcccctgctttgccctctgccagaaatgcctctttctgcccatctggactttgtggctatgtccatgtccacaggaagcttctaggcagcagagaaacagggtcagacttggcttttagaaaaaggtctctggggcaggcagatcacttgaggccaagagttcgagaccagcctggccaacatggcaaaaccccgtctctactaaaaatacaaaaactagctgtgagtgctggtgcatgcctgtaattgcagctacttgggaggctgcagcatgacaattgcttgaacctgggaagtggaggttgcagggagctgagattgcaccactgcactccagtctgggtgacagaatgagactttgtcttgggaaaaaaaaaaaccctctgggatccccagtgaggagggcaggtcagggcacgggggcagggaagacatcaaggggtggagagagacccgccctgaggcccagtgcacagcctggcatccactggtgccctttcaccctcattccaccagtagccatggagacggctgtatctcaactccagccttcgaagagggcaagagagcaggggagccttgagccacagacagcccacatgggcaccatctccccaagatgtcccccagggtttggggctcccaaaggccgattgttgactccaggaccttcactcactttgctctccccgccatcgtactcagaggcatccagaaccggcagatgggagaagccctagggagataggcctagatacaggaggagacatgtggagctgaggcaaaggcgggtgcggatgccaggcccagtgccctctatacccctactcctgctgacaacctggctgctgtaagcttggcagttgccatggactccctgggagagatggcgtggcctggaacgtcccccgccctgaggtggggcagggctggtggggtctggtcatccccctggtgggtccatgcatggcagcctgggcaggatacatgtgagtgcctacctgggctggggtggcctgaccctctctgggcctcacagctttgtctgcctcatggtactgtccacctggcctctcaggactgctctgtggcgtgtgtgcttaagggattgagctcgttgggctggggacagaggcctgcctaggtctgttgagagggcccaggtaagacttccacccagactgactggctggggcacacagagaagccaggacagggctgattgtgtgtgcaggggcgtgccctctggacgaggcccctcccaccggggcgaggcagaggccttgcttggttggagcggagtgggggagtgggagggtctccctggtgagatagtactggaagggcagggacagcattctagggaaggaaccagaaagagcccctgcatggaatgtggggatttcaccatgagaccccggctgcctggcctctgagaacgtgtgtggggggattccaggtggaaggtcgtgtctgggaggatgggtggggggttgagcagtcattgcccctctccagatctgcgtccacatctgtaaaatgggcctagaattcccagccgctgggggcgagtgaggccataaattagttgagatggacccaggctcctaagccccctaggtcatgaccccaaaccttggaacccccgacggagacggtgggggtggccgaggcccaatcgaatctatcccgcccagatgtgggaagaaccgcagggcaaacccccggcttccctcctggccgctcctctctttgaggccacctctctgagccctgatttgctggcgggtgaactggggatcatcgtgtccactgtggctggtggtcgtgaaacgaagtggaaacatgagtgttgaggccgagatgggcgcagtgcgcgctcctaaacagctgtccccatccgtccgcccctccctcccttgcgcgggtcagctggagcgggggcgcgccaggcacgaccctggccgggcagaaggcggtggagcccttaggggtcgcggctcctacccccggccctcccatgtgcagatggggtagcagcctggaggtttttcccaaggtcacgtaaggtcaaagaaaaggggagctggacgcgacgaggaaagtcacgcacggcggagggcgggccacctacgcgcgcgcccgagttcgcagagcagcggcgccctcccgggctagggcagctcggagctcggagcctttcttcgcccgcagctcgggttccgggagccccgcccccgcccatcaacgccccgcccctttcgccacggccccgcccctcctctccgttctccccgccggcgctccctcaagtttctccgaagttttccgcgggtccagcggtgcgccccgcccgccggccagtgacgtaacaatggtgcagcgcggcggccaatgggtggtggcgggggccggcggcgcgggccaatggcggcggcggacggtcccgctgtcctgcctggccggggccgcactgcgccgcccgccgcccgccgcccgccgcccgccgccggcgacggcaccgccgccctgcgatccggccgcggcggctcagagcgcggctgcggcgggcgcgggcggcggtggctccctcccgtgcgtccgtcgtgggacctttgcccgctcgcccgcgggggacagcgcgcgctccggtccgcggcaggggcggggacgcccggcctgtggcccccgcgccccccatggtgagtccccgtcccccgcgccgcgcccgcggccgccgccccctcctcctccggcacacgcgcacgcaggtgcagccctcgctgcgccggccacctgcgcgcggacgccccgctcggccccgcgaccctccgccgcccgacgtctggccgtgcaggccgggaggggacgggtaggaggtggcgggtggccccgggcgcggcgctgccttcratggcccaacccccttattcacgagccgcggccgtgactctgcccggtgacgtggggaggccgaactttacgtaacccgcccrgcgccccacgcgtgccggcwcagggcatatctggggcccggaggcccaggcttggggaaggggctccagtcacggtgttgcccacgggccacagcctacccgcaccgcgccgctctctttaactcagttactgccagtgatagtgacccagtcagtgtgtgtggacgcggcctgccttctgtcccaggccccttgtgaccaagggcttacccttgaaagaaggcagtagggaggttgggacggagccagaggtcagacgcctaggctcaggtcggggctggggactcagagggcagggtcagggcyyaagctcgattgcctgtgggttgggggtccccaccaattctggaatgagcccaaactgagacgcaggggacctgagttctaggcctggctctgccgtggcttgctgaccttggagaattggagaagcttgtgccctgctggaaagtgggatggcagtacccgcttcatctagtagtcggggagatcaagagaggtatgggacctgaagaggatggcagactgtgcagtgcggtgcacaccggtctccaggttgttttcaccctcctrtctcctcccaggagctaacgtgtaagcaaacatgtttggatagagggctggtgccacgccccaggctcaccccgcccgcacagccgtcgtccacccctcccctttcttacagatraagctgaggctcggccagggactgtgatatacccacatccccggaactaggtgatcgcggtgcaggaaccaggtaggtctgagtctggatcatgcctctgaacagcccaggaagaggctccaggggcctccaagtggtctggggtcggagatcagggtcagggttgcgcttgggctggagagtggatttgcctcagcttgagatgtgggcccaagctttctcatcccctccctggccttttctttatttggggtcgtatgaacctggcttaggtgggaacagaagctcttccagtgggtccctgggttggagaggggaggggagatttgagggcatgggcagcaagggcatttccagcagaggtgccagagagcaagtcagtttcaaggagggagaacaggtacagctagatcaaggatggaggcggtggttctgggcgtcggagagatggagctgtagggtgactggaagggcctggccgaggctggaggtaggtacaggcctggtgggccaggaccggaggggctgtgtgaggggcagaggggagtccccgggcctccccagtttccccgcgcctcaccgtggcctcttcctttccccgcaggtgtgccttcgcgggatccatgccttgaggcccaggaacgccccgccgccagcatgccgtgggacgcgcggcggcctgggggtggcgcggacggcgggcccgaggcctcgggcgcggcgcgctcgcgagcgcagaagcagtgccgcaagtcgtcgttcgccttctaccaggcggtgcgcgacctgctacccgtgtggctgctggaggatatgcgcgccagcgaggccttccactgggacgagcgcgggcgcgccgccgcctactcgccctctgaggcgctgctctacgcgctcgtgcacgaccaccaagcgtacgcgcattacctgctggccacgttcccgcggcgcgcgctcgcaccgcccagtgccggcttccgctgctgcgcggctcccgggccgcacgtggcgctggcagtgcgctacaaccgcgtgggcattctgcgccgcatcctgcgcaccttgcgcgacttcccggccgaggagcgggcgcgcgtgctggaccggcgtggctgcagccgcgtggagggcggtggcacgtcgctgcacgtggcctgtgagctggcgcgccccgagtgcctcttcctgctgctgggccacggcgcctcgcccggtctgcgggacggcggcggcctcacgcctctcgagctgctgctgcgccagctgggccgcgacgccggggccactccctccgccgccggagcccccgcctcagctcccggggagccgcgccagcgccgcctgctgctgctggacctcctggcgctgtacacccccgtgggtgccgccggctcggcccgccaggagctgctgggcgaccggccgcgctggcagcggctgctgggtgaggacaagttccagtggctggcgggcctggcgccgccctcgctcttcgcgcgcgccatgcaggtgctggtcaccgccatctctccaggccgcttccccgaggccctggacgagctgccgctgcccccattcctgcagccgttggacctcactggcaaaggctaggcccggagcaccctaggcgctggattttgggacaaaactatttttcagagcgttgtaccggcactttatatatattgatctctgtacggcacaatctctgcctcatctgtcgcatgcactgggggctgggcttggatggtcaggtgagttccaagtggcaggttttctgggtgcagctgggctcgggccttcagctcgctgtccagcccctgaagggagtgaggactaacctcccaccttgatctagagcctcggacaggtgtgcgtcccagatgggtgacagctgagtgccgcaggagctcggtaggtgcaggggtggggactggcatgtccaagcagcaggacagcgtataaaaaggcctggaagccaagagaacgagctctgcagcgtagggttctcacgggaggtcctgtgcggtcagccttttgcaccctgtggactccgggccagggagggcacacagggctggcaggcccgcggtggctggtgttgaggcatgaacaaattgtaccgggtatcccccaccccactctgaccaccagttcctccttggatatcactccccctgacaggcagcccacccaggcctggatttgtccctgtctcccccttttgcttttcccccatgactaatgggcaccaggtcttgctgctcctgcttctcacctctgcagtggcagcaggcccctggccccaggtgcatgccggtcagtggggttggatgtgccttcctccaggcctgccctctgtccaagcccggagtgggcttggtgggctccctggtggcccccagtgggtgccaggtggtgcccggggttattgaggggtggttgtatcactgtagggacaggcttcttgccccagcctggagagctgttttcttcaggaaggttctggagatggagacttgtttgcgaattcaccacaactccaggctgggaggctgggtctccgctctcagagccgagacaccagggaggatagccaggctgccctgcctgggaattctgctgggccgtcaaattcaacccgcaccaacgtgggcaggagggccacagtgtcctgccaggagcagagggctgaaggtctgcaggaggaagarccactatcctggtggggggcacctgctgcccaccctgcccccagcgtgcctggggggagcacacctgggcatggaggagtccagggtgctgggccacacaagagaggtgggggagaggcctggacagtaggaagatcttgcccagggtcctggatccgccactctgggggtgaccttggacaaacctctgccttggccctcagtctccccatcaaggtttttccattcaggaggttttgggccatcttcagccaccctaccagccctgaaaaggatgtgactcctgtttctgggaagtgtgtggtgtgttaggtgggcctacagccctggttgtggggagggaaggatggagagacagcacagtgacagagcccagactgcaggctggagtgagggttccacttccccgctgctgtgtgtcctggaccagtgcctctgaaccttggcacttggggcagtggatattaacatctttccaagcccaattcttggggcatcagggcctccggtcctctgggaggtggcaggtcctcagattggagatgccatgggggggggaggtgcctctcctttggagggtatggaagtggagacaggagtggcctggcgcagctgccgtggttcttaggggctgggcccggggagcccatggggcttgtgcctagaaagcctgggctcctcactggggtctagatgtgcagacttcatgtctccccagctccagctctgttctctataggtcagcctccacaatgccagaggcccagggctagccccctccacgtccctcctagatctacagctgcccctttgatgacagcgccattgagtcccctgggctgggggggtcatgcaggggtgaggcagctgcctgccgccggtactcattgcctggccaggcaggacacaggctggcgggcactgagagtgggccccacgaaatccattgtcaggttaccaggatgaagaacccaggctggtcgtggagtgcagggcggggcctgccggaagaattatgggcactgcagcaggagggcagcctgggccattagctcctgatgtcatcgatttgggtgaggggacagggaagtcagaggaagctggccagtggctctcacgmagacttacagcagyggagtggtgcctgattcctrgtacagctgctcccactgagtctccagggatctgtggttcaggaccccctgcaaccccctcccagacccctgtactggtgggaggagaggacctagaggaaaggtgctgggcagataagcagcygagggaggccctgggtttagcttatcagtcttctgggccctcctgccccaggaagggcagcgaggaccatggtgttgcccctgtcatcgttatcgtcctggccatgagcttgcaggactgggagggccggagtcagccaggcagacggcagcacagcatttgcctgttggcaggtggccttggtggcttcccaaaggcaatcgctccacgcagaacaaaactcacttttttggggggtgaagcaccttggttcatttgtttagttcgttaattccagcagtctgtttctaagggaaacatggctgcagccsgtcctgcccctccacccacccaccaggtgcccagtgttcccaagggccccgaatcccaaccttattcaggcrtcagcatctctgcaccccaaatgcctgttagggaggatagtgaaggctgagccctcctgggctcatcaaaagccagcagtgagagaacacccccatctctctgaggtgaccttgtagggcagtccgtgctgtctggctggcctgggtgaggtgggcagggaccaaggcctggcgcctgggcctcgctggccttgctctgcgtgctgacttcatcctgatagtaccttgattttcctacygtgacttccccttctgtcgacttcctcaccaactttaaaattccgtattgagagcagtttcctaagttacctcaaatcctattcagaagaaggttcttcctggaagttgggagggcggaaaacaagtttagtcacagaagactactccatgtttgagcttctgtttcaagggaagtgagtaactgccggaggagccctgcccctctgcagtgtgtggtgttgccctgatacttttcagattgaggtgttacttacatgtaataaaatgcacagacttaagtgtatactttgatgagttctgatgaatgtctacatgtgtgtaatcaccactgcaatcaagatggaaggaaaggctgggcgcggtggctcacacctgtaatcccagcactttgggaggccaaggtgggtggatcatgaggtcaggagttcgagaccagcctgaccaacatgatgaaaccccgtctctactaaaaataaaaaaattagccaggcgtggtggcaggcacctgtactcccagctactcaggaggctgaggcaggagaattgcttgaacccaggaggcggaggttgcagtgagccaagattgcgccattgcactccagcctgggcgacagagcaagactccatctcaaaaaaaaaaaaaaaaaagatggaaagacagatttctattggtgattcttaaaagtaatttatttatttatgtatttatttatttatttgagatgtagtcttgctctgtcatccagactggagtgcaatggtgtggtctcagctcactgtaacttccgcctcctgggttcaagcgattctcctgcctcagcctctggagtagctgggattacaggcgctggccaccacgcccggctaatttttgtatttgtagtagagactgggtttcagcatgttggccaggcaggtctcgaactcctgaccttgtgatccgcccgcctcagcctcccaaagtgctggggttacaagtgtgagccactgcgcctggctcttaaaagtaatttctttctgcttataaaattcatgttcactgtagaacactggggattgagtagagaggtccggccacgatgcagggaaacactgtctcaagcgccccaccgccccacatggtccccagagacagggcccctaagcgctcacgtacaagtaaaggcgctgactgagtgcgtcatctgcacgcatacaagcactgctagcattctggcatatgtttctttcagcttttttctgtgcagatatatattacatttttttctgtgtatatttatatatatatgaaaccagatcagttacacaatttagtatttttttaaccttaatgtagtataagcatttcccccattgtactttgtaaatatgatttttaagaagtcattggtgtctactttgtgatatttgactcaaccagccttgataacaaagagtagttagagacaactgaatttttaaaatgtaaatctgctttatttttggaataaataatacatttacatggctggaaattcaaaggatacaaaaaggcatatactccaggcaaccactatgaccagctgctgatcacaagtagagaacttgtttcttttcacccctcttgctcctccccggagttatgaaaaatttcaaacctgccaaaagtttgaagtttacaacaaataccctccaacgtttgggttgtctccctcccccttctctccctttctccctctgatttcttacagaaccacgctttcatgaccatgcccgggaacttcacgctggcgcggtgaggtcctgcgcctccgcttcctgcacacacgtgcttcttaatagctgcaggctatttcatgagaggaatttgctcacgttaacatggctgttcccaaatgccaggctgttttaagtgtttcctaattataaacaggctgtgctgtttcccttgacctaggacttgttcttgaggacagaagtggaggtggcgagatgcaaggcctacgtacggaccggcttccccagtagggcggcgccaatggggggctcccaagctgctcccatctcacctctgcttccggggtgctgggggtttgggccagtgttccttctgcttttgtgaagggcccttacactcgactcgaagtgctcctcctattggtttttaataaatatatttatggaaagctttatgaatttgcgagtcatccttgtgcaggggccatgctaatctctgtatcgttgcaatttttgtatacatgctgctgaagggcgcactcctcttattgttgtataggtttttaaggtaaatattcaacatcaattcccatttgttgcaattatttcccttctttgaggtttttaatttgcagcatttttacatttatttccttctatttatttatttttgagaaacaaggtcttgctctgtcgccgaggctggagtgcagtggtgtgatcatagttcattgcagcctcaaactcctgggctcaagtaatcctcctgccttggcctcccaagtagctgggactataactgcacatcactgtgcccagcagcatttctgtattttggagaaatcaaatctatgtacttattttcctctgtagcttgtcctatcacttttgagtttagaaagcctttgccatccagaaatcagacagttttcccactggttttagattctttaatccatttaatattattttgcccagagaatgaagcagtggccacattagttgtgacaccccccatgccccgcccccgccgctccttaagcgcatctgagatgccctctccattctgctccctccctgtgggccttgctagcctgttgcctggccctccgagggtctgggccatgccattcaatagagtggcccctgctggggctccacctgtcatcacttagcagttctcacccgtttcttcttcccaggagtgacgggacagtgaggaggcatcaaacagcacaggtctgcagttctacagagctggcttccagtcccagtgctgtgtgaccttgagcaagttacctaacctctctgagtctcaaggggctaatgagacttccccttgcagggctctggtgagaagcacattgggcacagtcatgggcatttgtgggtactaacattattcctccctgcctgccccaacaaaacaatcccagtggggatttgaactgaaatcaagctacacctataaattcctttggaaagaatgaggtctttccataatgtgtgtagtcctccatccaggaatgtggaacatatcttcctttattcaagtttccttttatgccttctggaaagctttgctgctcttcacacggcctgaggtttcttgctgaggtcatttcctggcacatggtgtgtcctgctgctgtgctgggcgtcatcttttgcgtgtgctggtttccagcagctctggtttgcgatatggtttcgtttgctggctgaagatacagaaccaggggctcgaacccctccaacgcctgctcacacacagctccatgaggaggcagccctggacctcaccccacagcgtcctcctcagaggctaccatggggtacagccagctctggagcggccattcccccataacagccacttgggcaaaccggtgtgtatttcaacaccagccaggccaggacaggtctgctgacgcactctccctgtggtggggctgggctggcaggttctcccttgcactgccctcgtgagtgtcggctgaggacacttctcacagctcaggcaccacactcggccaggtttggaaaaagtctagtttattgcactgactcaaagcacaactaaaaattaaaaccagaaagaaaactgtacaaagcacgaagctacaactttaaaagcatcacctagacgcgggtttaattgcactacagtcccatgggtgaggagagctttgccatccgtgaggcgccgggcaaggcacaacagacacagagagatgcagcccggcctggggctgcctctgctgccaccaacttttacaaaaggttctagaaaagggaagtgtgaagtcagatctgggatttcggcatcttgacctcatttggacatggaaaacctccacctatgtggctggctgggtcctgtcagagaacatattttatcaccctccacctgcggcctgggggctccctgacaccaaggactgggcctgggccaggggcaggctaaaaaaagcagccagcctggtgtcctgtcctgaagctgcctccgggagggggcgggatgtgtggcagggcggcctagccctcacacgcagatgccagtgggcggggtgggcactgcccattgtctgaaggggccacagcagccgtccatagaggcactggtttcaacctgtcaagtgtcaacccataccccgcagaaggcatgggctgccactcggagccagcccgcaggtcccgtgaccgccctgccagtcaagtctgtgcggggatgcctgcccctctgaggctgcaggcgaggacagtgcaggctcaggacaaacccgggaaggaacaaagggcttccactgttttcggaaaacatatctctcttctaaatttgtaagatttgatttgaaatgaggtattttatgcagatttgtaatacaacaacaaaggcaataattagtagactcgtcctctgaggatgcatctggttttaggatgtccgccagcagcattagttaaacaccattccaaagacatttctaagtgagcgacccttgctcagctcccccacgccccatgcaccctcctgtgccgtccctacctgggacacacgtgcacacatccaggttccatttgcacccatcaggctttactgtttcagctgaagtgtgctctccaggaggcgggcagcctgcgccgtgtgtgggcagtgaggtgtggtgtggtgtggtgtggtgagatgtggcgaggtacggtgcggtgcggtgcggtgcagtgcggtgtggggtgtggtgtgttgtgtggtgaggtgtgctgtggtgtggtgagatgtggtgaggtatggtgcagtgcggtgtggtgtggtgaggtgtgctgtggtgtgaggtgaggtgtgttgtgtgttgtggtgtgcatgtgcgtgggttctctcctggcatggccagcgctctcctctcaagcccggcctcagcttcctggccagagcgtctggcatggaatgtgctctgcagctttgtctctggggggacacccccctatgatgggacaaagccatcaccgagcacatcccgcgctgcagagagctgacctttggctccatctggccctggggctactaatgtggaaggaggccctgggccaaaccagctgcccggctacccttggttctgggaggcctccggagaccactcccaccaacaaaagctggagctatctgtggatgagaccaggacggcagcacgtgggtaatcggagtgcatgcagccgggcagtcgccactgtcctgagctaggaggcgccactgctgcagcaatcacgccagccacgggtggaggctgtgggttctggaacgagacagaaaccaacatagatgaaagtaagtgtgcgggtccaacctggccagaggtgtctggacaagtgttgaggcagcgcgtccaccagggagtcactccgaagcccctgtgcccgccacagacgccgggcccctccgcgtgactcggccagggctccttcagatgacctcccactcgtcctccaggtcctcagggtggggcatggcggcctggctgctcttctgggtgccgtgcgagtggctgaacgtctttgtcagccgttggaggaggtagccgggcgggcccacagcccacagctcatctgacgcagtcactgcagggacaagagccaatcacatacttgtcaatcacacagcctgtggggtgggcacagatggagctgggagcttgggcacagatggagctgggagcttgggcgcaggtctgggcttgccacattctaggtgggggacactggacaagccaccatctccatgtgaacttcgtaccctcagctgtaagtggatgtcaacagcaccttgtccttgcccaggagactctggcagagcccaggtgtccagccccttccctccctgggacacactcctggctttgccctcagttcttgctttgagagattggagcccagtggggtcggcttcttcgagagccccccgacatcgtccacaggagccctgggaaccccaaggggccttaagcccactggccccgggcacctgcctgtgaaacacgacacgctgccgggaattttcttccagtagtcccc

SEQ ID NO: 8833 - DNA, 26935 bp, Homo sapiens
ttagaaactgaactctctgtcgcttttttttttcccaggtgcagtacagaaggtttctaaaaaattagaaatgcacgtttacagcaagaggttggagatcatgctccagtaagtttttcacccattatttctcaacaagacagtgacagcggccggaaggagccctggattcggctctgactccttcaaggactggggcgtggctctggccaggccactgccatgctcggaggcctgcttctctgttaggaaagagaggggctggaaccgttccctgccagctctgcactcacctgtgacctgctaggtcagccgtttgtgtttcatttaatacagtgcttcaggatgctggcacagggctggcacagttagcaagcgttaaaacattctcatcaaggacaagttcaaaaatcttagctgaatgttactgtatcttcaagaattattttatatatttacttgttaaatgtgaattctttgtaaaatggtgttcttctagactcttcttagtctgtaagcgatgaattaactttaaactaagtatttctttttattttattttattttatttctatttttgggagatagagtcttgctccattgcccagactggaatacagtggcatgatcttggctcattgcagccttgactcccaggctcgagcaatccgcctcagcctcccaagtagctgggatcacaggctcgcaacaccatgcccagctaattttatttttctggagagacagggacttcctatgttgcccaggctggtctcaaattcctgggctcaagggatcctcctgccttggcttcccaaaatgctggaattacagatgtgagcccttgccccatgaaacggtttaacaaagtaaggtggcctgctagtttagaaggcttttatgctaacatttctgttccttcctttctttccccaaaattctacactgacctttttttttttttttttttttttttgagacggagtctcactctgtcgcccaggctggagtgcagtggcacaatctcagctcactgcaacctccacctctcgggttcaagcgattctcctgcctcaacctcccgagcaagtgggactataggcgcatgcccaccacacccagctaatttttgtatttttagtagggacagggtttcaccatattggccaggctggtcacgaactcctgacctcatgagccacctgccttggtctcccaaagtgctgggattagaggtgtgaacccccgtgcccggcccactaaagcagcagtttagtggctttaaaaaaaaatgatagactttaaatgatgactttgtttatagaagttgtcatacatcttcaaaacagtattctctgtgttgtcattttgattttaaagagcattcctcatacaaaaccagccaacagtgcaggcacagtgattaccatggccgttgaaaaggccagagattttactggttcccacccctggagcctctggttctcttaactcattttgcagagggctcaagtctgccagcgttgaagtctgagtatcttaatcatttttagatccttcacccctttggcagtcaggtaaggctgtggggcgggggcaggggacacacatatatgcagttttacctttgatttcaaggaggttagacaaccccctccccacaggctatcctgggacccccggttaaacagccctattgtagaaggtgggtgttgctgaccagggacttgactacaatagttctgttggcggccctgttccctggggctctacaagaatagaaaacccgtgtggccctggactggccccgctctcccacgtgctgcagtcggggtgcagaatggaagttcacattgctgtggctggtcctcaggagccgtggggagggcagtctgcgggaggctgcggcccttccactggactttcactctggccttcttccctgtcctcctgacaccactcctcccgcctcccctccctctccctcacctcccacaaacacaccagaactattcaactctgaggaacaggagtatgagacagcttccattcggccaggaatgggaggttcccatgtccttaaacttcaaagccaatcgtacccttaaaaatgcagctatttccccagttgtttaaacacttaggattagataggagtagatgtattggtttcttcagagaagccaacagtggatcacatgaaaatggaaccttttttcctatccttttgaatacatttctgtgtttaaaatataatttttttggctgggtgtggtgacccacacctgtaatcccagcactttgggaagccaaggcaggtggatcacttgaggttaggggttcgagaccagcctggccaacatggcaaaaccccatccaaaatacccctactaaaaatacaaaaatgagccaggtgtggtggtgggtgcttgtaatcccaactactcaggaggctgagggaggagaattgcttaaaccaggaggcagaggttgcagtgggccgagatcgggacactgcactccagcctgggcaacaagcaagactccgtctcaaaataaataaataaaataaaatataatcttttcctttgtgctagggtcccacctaagtttattcacacatatgatgagcagtaactgcctgaagatgcaaggagttgattcccactccccacttcccccgcttaatacagtgttgtcagtgcttaactgtcctaggctgaccatggtccatgggttgtttagagtcactgcctgcctttcttacctgcattcagcctgctggtggactgctgtttcctaacacctctgtaccaatggggacgatgttgaaattaaccatcaaaactgtttctctcgatgacagaggcaatgtcttagtgccttctttatccccagctactagcacagaaggaatctgccacacagaagatgctcaataaataccaagtttaattaaagtaggagtgcacagctagtgggcttgggagccatttaaacctagatacctggatttgaatgccggctcagctgtttactagctgtgaggctttaagcaaatcacttaacttctgtgtcttgttttcttcacatgtaaaaggggatccttactaaaattataggttaagataatgtatataaaccacctagcatgatgcctgctgaatagatcattcttgaataaagctgtgtattttccctgttttataaacttaataagctgtatcaaggcaaataagaagcttgtctcaaaagtaaatacaggctgggcatggtgactcctgcctgtaatcccaacactttgggaggccaaggcaggtggatcacttgaggctaggagttcaagaccagcctggccaacatggtgaaaccctgactctactaaaaatacaaaaattagctggctgtggtggtgcacacctgtaatcccagctactagggaggctgaggcaggagaatcacttgaatccgggaggcggaggttgtagtgagccaagattgtgccactgcgctccagcctgggccacagagcaagactccatctcaaaaaaaaaaagaaaaaaagtaaatacagtattctgctttagaactaggacctatcttcagttttattttttcctcaaatatataaagccgggcattttcactaatcctgcatttctgcttattttcagggacatatttggagaagactgtgtaagtgtaaaggatgactctattcttagcgtcacagtggacgggaaaactgccaaccttaacttggagacacgggtatgtagctgctctttcctacgtttcaagacatttgggaaataaagtgaaggcataaataatctgtgctctcacactcaacagtctactgttgcatattggcatttgcttccagtgtttccaacatttttttcacattgttctttttatattattatggttgaagttttccgtgtttttccgggttactgcatagtacaaggttcgcgtgtatgccactccattgctgtcctcttccataatacagcttagttcacctcatcccttctctagtttggcatctagttgactctccattttttaaagaagccgctcttctgtttgcaccagcaagatccaagtggattttccaaacagttcaaaaccagcccgggcaacacagttaaaccccatctctactaaaaaatacaaaaaaaattagccgggaatggcggcagctgcctgtagtcccagctactcaggaggctgaggcaggagaattgcttgaaacagggaggcagaggttgcagtgagccaagatcacattactgcactccagcctggatgatagagcgagactctgtctccaaaaaaaaaaaaaaaaagaactagaggccaggcgtggtggttcacgcctgtaatcccaacactttgggaggtcaaggtgggtggatcatctgaggtcaagagtttgagaccagcctggccaacatgatgaaaccccatctctactaaaaatacaaaaattacccaggcgtggtggtgtgcctgtaatcccagctacttgggaggctaaggcaggagaacccaggaatcaccttaacccaagagacagaggttgcagtgagctgagatcacatcactgcactccagcctgggcgacagagcgagattctgtctcaaaaaaaaaaaaaaaaagaagcaactagaagattattagtgagtttcagtcaaattcagtaccaaatgttgagtagatagccacatccattccttgccaagtaatttgtgtggcatagatgaacttccctggagtatcatttactagatcaaactgtgggctttgatgtaaatgtagtttactagactttccccagtctttcaccccagcctcaagtcatcactaattaggaccgtgctgctgtcaggaagcactgcacgcccacaagtgtgtagggcggccgttctgtttcatggtaatcagtcccaccatgacctctgcacacacagatgattgttcttttttttagtttgagacccggtctcgcagtgccgcccaggctggagtgcagtggtgcagtcacagctcactgcagcctcaaccttcccggctcagtgatcctcccacctcagactcttatctgggaccacaggcacacgccaccacagctggctaattttttatgagatgatggtttttttaaagagtattcatttatcttctatataatcattatagacttaattctaacagtcttgtttgtgcctcactttcagactgtagaatgtgaagagggaagtgaagacgatgaatccctccgagaaatggtggagctggctgcacagagactgtacgaggccctgacgccagttcactgagactgtgcctgtatatgaactttgaaaaaatacttgactctacttttgttacctaaaataaaatgcattcgtttctctgggggagcctgtttacttttaatgtcaaatggcctttatttcaacagcctgaatactgctaaattgctaattaatttgtccattattctagaactaactactagatcaactgcccattattttagaattttggattcttcttccaggcatgtatgtgcagctcccattgaaaccatcaagatctgccgatagcaaccgctgctggttaccctctcctctggggtaaccaatttgagttaataataaggattctaagttgcacttgaatcttttctgtcttcatctccactgctgctgttcgagtccaagtctactctcccctctgaattcctgcaaccacctccatctcctcccctatagctgattcctggaacagacctggcctcaagcctctgctgcttgaaggccttaatgaagtccttgtgataaagatgaagtccaggcacctttgcttgctctagcaggggctctcaatctgggctacccgtgggaatcacgtggggtgcatcacaagtgcacctgtgcccaagtcctgccaccaggaggtgagttagtccggctggaatgagggccctaggttggatcttagttgtaaagctcccccaggtgatccaagcgagcttgggacgagcaacctaaagaaagtcatgctctacgcccatcgccccgccccagggagcggggtcggcctctgcgccggcgcccctggcccttctgttactcatctacagctccgtgatttcaaggcatccttcccacccgttcgtttttagctcggctgccgaacttcattgcacagttgaggtaagaacgttgcattacaaccacgttttaacaggtgaatcccttggaagttagtcagtgctccgtgtccgcggggttctgcatctgcgcatccaccccacggcgggaaaaagaaaagcggccggctgcgcgcgcactgaaggtgcagctgctttcccttgtcattcgcagaaccacgaggtactgccagggtttccgcagtgcctgcgtcctcgtgggtgttacaggccctccagagtgacgctgggcgcaggaggccgcgcgcgcatcccacgacctcttccaggggggcctggagcagccctccgccccaccgagagccagctgtgcttcccgccgcgcgtcctgaggtcacactcctgccctttgccgaacgcacctgcgcccgcggagcgcggggtgggcttagaagggcccccaaccgcttttcttccgggaaccacgcagcgggacgcgggctccggactccctgggggcagccttgctgtgggtgarcaagcgcggaggccgagcttcttgcaaacggactccaaggggcaacgaccttcgcgcgtcaccaaagtgactgcgtgggtgcccacgagcccggctcccgcaacccacgggcggccactgcgcaggcgcctctcgtggctggcggccccgccccgccccgcccggctgctccatggcgctgtgcgaggccgcgggctgcgggagtgccctgctctggcctcgcttgttgctcttcggggactccatcacccaggtacggccgccccgacgctcggcctcccgccccggcctccctgcggggtcgctgccgagcaggccgaggctcctcgccgtcctcttcggcgcccgagacggctgggccggaggcctggccacgcccgtggagacaccggaggagtggcgggtcccccagtggctgcgccttccgggcccgcggcgtcccggaggtcacgacggcgtccgcgagagcccgggctccaggcacagacgcgaggggacccggccgcgctgcccgccccgcgccgcctcccacccgggtcgagatgcgcggtcttcccctcagcgccctcctgggcagcggcctttcccctccgggtccgggttagcggccgcgggcgaccgcgcgctgtgtccyaggaggccccgcggycagctccgggcagaggcgccaggagctctctcgccccattccctgcgggcacaggtggggccgttaggggttgaccttggaagtaaaacgccttcaggaattaggtagaaaaggaccatccgttcatccaagatcatctcacctcccatgaagggaacggtcttctaaatgcaggttcttacttcggggagggagtagaaattccattcctgtgtgtgtcctcttctcagacaggacttgcttcaccaggcttttgtgtatacgccagtaactggtaacattatgtttaggcatatggggcagtcagagctgccgaattccatgggaatgtgtatgaaaaagtgttcaccctcagctcggtaaccagcaaagcagtgaggcggygtggccttcatttcctcactgacctttgactttatttcctgaacttagatttctgtttagcttttttttttttttctttttttctttttttgagacggagtctcgctctgtcgcccagrctggagtgcagtagcgygatctcggctcactgcaagctccgyctcccggattcaagcgtttctcctgcctcagcctcccgagtagctgggattatagacgtgcgccaccacaccgggctaatttttgtaattttagtagagacggggtttcgccatgttgaccaggctggtctcgaactcgagacctcatgtgatccgcccgcctyggcctcccaaagtgctgggaatacaggctgtttagcttttgatagagaaaaatccccctctgctaaagtgctgccaggtgtacttacctgtaatccccaaaatgacctcctggagtgaagcaatcaaagccaagaagggagcgccgagaaaacrgaagttgccaatcagaactgccctcrctgagatgcccggttacagtcattagtagtaataatgggcttttcttcctccagttttccttccagcagggtggatggggagcatcgctggcygacaggstggtcaggtgagaatggtttccgatacttgagttcttatggatggaaaatgtcttagggatccgtcttatggatgaaggatagttctgaacagaacattcctcctttattaattttgcttgcctcccctaatcagtatataggagaaggaacagaaaacatttactcttcactcagtctgaccaattagatattttagggttgagcactgatggctgggtagactcagacaaatcaaggaaatggccaaggcctcttccctagtcaggggcagacagatccaagtccagctgctatgactgcagaacttgcagtttcactgctacaccacactggtaggaagctactttgcctttttttgaagtgctgccatgacttaagactcaccttgtcacaattctaccgcactttgttttggtttttggtggtttttgttttgcgacagggtctcttgttaggcgcgtccacgtgaagagaccaccaaacaggctttgtgtgagcaacaaggctgtttattcacttgggtgcaagtgggctgagtctgaaaagagcaaagggagatgggtakggcagtactataggatttgggtaggtagtggaaaattacagttaaaggtggttatctattgttagcaggggaagggggtcacaaggtgctctgtggggagctcctgagactcattgtccaggggaggaatgccacaaggtcgattgattagttagggtggggcaggaacaaatcacaatggtggaatgtcatcagttaaggcaggaactggctgtttcactccttttgtggttcttcagttgctccaggccacctggatgtatacgtgcaggtaacaggttatgacggcttagcttgggctcagaggcctgacaactctgtcacacaggcttgagtgcagcagtgtgatcagggctcactgcagcctccacctctggggctgaaggcatcatcacctcagcctcctgagtagctgggaccaacaggcactcgctaccacacccagcccagcacttcattaaagtattgtgatttcactctgtaaaatggctagtcgcattttataatcattacacacacaaacaatctcttagaaataaggctgagtttcggtggtggttctgcagtttataaatgccacctgagaactttgagcagtgtcagaaagtgtccccttgtgctgctttggagcygctgcctgacgctgtggcctgcagttctccgcgggtgccccagcttctctgcttggttatgcatgtatgggaatgtgaatacagcaaaatgaaccatattgatttactaatcataagttgaaccccaggcgtcattttaagaaaactttatggacaactttaaatatctacagaagcaaagagtgaaatgagcccatccatccctcctatggattattctgaagcaaatcccaaatcatatcattttaccaagactaagaaaaaaagagtccctcttatgtgactgrtattctctgaggggtttcaaacctactgcctgatgcgaatccttaactgggattctcctcactttacatgtgaggaaggagcacagcgtgcccagggtcacgcctagtcacacagggagccgagaaacaaatccaggcaacccggcttttttttttttttcccccattacacctacagtactgtgaatccaactgtttttaagaaggaaacaaaaagtattaaccggtttaagttgaaacacaacgaatgtatttactaaaactatttaatcaaaaccagaaatctcaaatattctatagactrtttaaatataaaccaaactaaactatttaagttccaggatattagtgactttttacctgagatacttgctcagattatctatctgttgtgaactccattttaaaagcacctcactataccatgcttgaagtcaggtagtctgtagacttcatcacagcccctttatatataattacttctctcacggaggagtatggtgtatttacctgtatctttgaatggcttaagattagcatgcttcagctatgttcttgctcctatcaaagtgaaacctgggggtggctcagagacacgtgacgggtttagaatcccagagagcacaccctcactaaaggccggttactgcgaccataaacacttcttgcccacaattcatctttttaaaatttttcgtttcagaaaatgtgatgttctgaatcgtggattttcaggttacaataccaggtgggccaaaattatccttccaagattaatcaggaaaggaaacagtttggacatcccagtagcagttacaattttctttggggccaatgacagtgcactaaaaggtaaaagcatttttgatgttcttctagctcacttttaatcatttttatgttacagcaaacttgcatttaatatacttttttcaactgtttactttctcccaatagatacagttttgccaaacttatgttgtttatatgtattcctggctttaacactggtggattttattcttgactcagtttctacataccttggttgctggcagtcctaatcttgcaaacagttaaatattttctagagtctgttagtgctatgctaagtttgtaatgtgttctctttagttgatgcatttggcagcagaaagcttaaggataccttgtggcttgcatcacactgatggcagctggtggcgtgtcttagggagggatatgtcagggcagcagccaccctgacctcagttaggcttgaatcctgggcaatggtgaacgtgggtttggaaaaggagatggtctctccytgactgctgaagaattgctgctgtgactagaggaaagctagccatgtaagaggcctttcttccccttctactcttgaaaaaagccttctgcgtgctatcgacgagaaaaatcagcctttgttttgggaagttaggtagtcaccttccagagatttcttttgttaccctacttgtgtcacagaagtgctgtggtctgctattcacgggcacaccgtaggagacctctgagttgaggctggacatgaargaacaccaactgcagtaagaggaattcttgctctctaggagaaagattacgtagatgacaggtatcggtggagactgcacactaaccattatatttgggaagaaattaatcttcactttctatcttgtaccaaaaaccataagaaaactcaaaacagaattttttaaaaagataaatttttatcaaatttagcataaggaaaaaacacttcctaagtataagagcagtggaggaagccacagaggaaaaacaggtttatgaaataaaataggctgcgaaaaaactgaagaagaaaatgatgtgttaaggaaaatatctgcaaaatgtggcagacaagagagtaatgtctttagtgtagaaatcaataagaaaaataccaactccaatagaaratgtaggcaaaggacaggaatagataaaaggcgaaatttaacagcaaatacatatttgaaaatgtgtgaaaacttatcaaaaaatgccaattaaaacaaggtattttgattttttgactcagaaaagcaatatgaagcagtaatacttacagctgacacgcatgaaataagattggaactsttacattcctggtgagagaatagcttgtgatcctctggaaagctgtgtggcaatatgcgccaagggacggcccacgtgtagaaattcaacctaaggaaatattcagatacgcagccagatgtgtgtgcggagatttctgtgtattgctttttttttttttttttttttgacagtttcacactcttgcctaggctggaatgaagtgatacggtctcggctcactgtaacctccacctcccaggttcaaatgattctcctgcttcagcctcccgagtagctgggattataggcgctcgccaccacgcctggctaatttttgtatttttagtagagacagggtttccccatgttggtcaggctggtcttgaactcctgacctcaggtgatccacctgcctcggcctcccaaagtgctaggatttcaggcatgagcaaccgcacctggccgtgtattgctatttatatataacagtagattacaagctgtacagtacggaaacatcatgtggtcaccctacaactaaatttcatttttttgcaaactatttatggacacagaaaagctcataatatgttatgtgagccaggcgtggtggctcatgcctgtaatcccaacactggaggccaggccaggagtttgagaccagcctgggcaacagagtgagactctgtctcaataacaacaaagtttgcctagtgtggtgttgcgtgcctgtagtcccagtacttaggaagctgaggtgtgggagggtcgcttggccccaggagttcaaggttacagtgagctgtgatcacactacactccagcctaggtgatggagcgagaacctgtctctaaaacaatttgtagagaaaagcaaaatatgaagtcttcagtgtgaatataatcttcagtgcaaactcatttttttaaaagtgtatgtatcttcatgaaaagaccggaaagatayacatccaaatgccaacagtggttttctgggtggtaggaacattggtgacttttttcctttatactgtacttacatgtggttagcaaatggtaaacaatgacccttgtaatacttcagtgagagcctatctagaaaatactcctttgcaataatagtagtattcgtgggtgccatttgtttagactgagtgcttgctttgtgaaggcacactgctctcagtgctgtaaactcttagctgttttgattttcagtcctaggagggagaccttattatcttcattttcccaatgaggtacagaaagtctaagtatttatctgcggttctgtggcgaggagtgacaaagccaggatttgaacctaggccgtctcacccaacagggtgggctctttaatttctttacaaattcaacctaattgatgtaataaccatctggatactagtgacgaaaagacaagagtacttacggtgcccctagttagagcctttgaagtcttgttttatgaagaactatacattttaattcataaggagaaaaccttctctttgtgtccttggtgttaaacaatccccccagtgacatcatgaataacaggcatttgcagaagtgtgttcacctgaattgtcacttataataaatatgcatctggtgaggactcatgtttctcttgagcagatgagaatcccaagcagcacattcccctggaggagtacgctgcgaacctaaagagcatggtgcagtacctgaagtccgtggacatccctgagaatcgagtcattctcatcacgccgaccccactttgtgaaacagcctgggaagaacagtgcatcatacaaggtaaacaaaccacagccaatctcggcaaatctggataggaatgctgagggaggaactctgataggacagtggtttcctgcctggggcttctgtttcttaggggctcrgtatgtccatttcagtctgttttcaatccaaaattattaaattatagcttccattatgttatacctgagaccttttttgacctagaaaagggattctggctttggatagtcaggagggaaccgcgggcctggcatctgctgacctttacagttaccagactccagggtgcacatgaaggccactgagatctgtgtagagctgtggtgctcggcctgcgggggctgatgctgatgtgccttgacttggaagtccacacctggggctttttactggtccacagaagctgggggtaggaatgatcagataggagtcgccagcactccatatacttgggtttcacatccctcaagtgctgtgttttcaatccacctttgactgaaaaacctctgcacataagtggaccttcacggttcaaacctgtgttgttcaagggtcagctgtatgttaatgttgaaaatgtgcattatggaagttctcttttttttttttttttggagatagagtctggctctgtcagccaggctggagtgcagtggcacgatctcggctcactgcaacctttgcctcctgggctcaagcaattctgcctcagcctcctgagtagctgggattatgggtgtgcaccaccacgcccggctaatttttgcatttttagtagagacgggtttcaccatgttggccaggctggtctcgaactcctgacctcaggtaatctgcccgactcagcctcccaaagtgctgggattacaggcgtgagccaccgttcctggactggaagttttctaagctgcccagaactcaacattctaggacaaatgactggctttgcaacacagaacagctatttctcaaagtgtggtctgactctgagttaactgggatttttaggtagatttctggacccattttcagcactccagatgtttcttacacacaccacagcacacataccacaacttcatggaaggctgttattgtccctactttaccagtggagaaatggagtcttagagaggctaagtaaccggcccaagatcacacagccagcaacacaaccaggaatcaaatccagcaagtgtgacttcacagctcaagtccttactgttgtatgagtttactgttgagtggggttgtagctatgtcccttgctctmaaagggcctgtcatccttagagaaggatccaatgcgttctcaagtcacaaacagcatatgccaaggggtgccacacaccggaggcacagacaaacggggagaaaccccagcctgcgggacgtggtgacagtaggttctgggcatcacatcagggcagaggggccctattgctgtgcatgagacaccagagtgttctgcagggaaggggaggtgtttaaggcccacaaagctcccctggagacaacttcagagccccagcttgcttctgggcctgcagccctaactgctttggggggcagtgtcatcttggctttaacaaaaggggaaaaatgttacatagcatggtccacagaagctgtttagacttctttttgtctactgtttcccaggaaaataatatatatgaaattctgaatgtttaatttcatttcccctttctagccttgaatgtagcccaatgcagactttttaaaaggtcagtgatgggcaaagcaggtagaggaggggtcacatctcaataactggtcccctagaaattcagcaggttattttttgagatggtcttgctgtgtcacccaggctgtgtagggcagtggattactcatagctcactgcagcctccacctctgggctcaggtgatcttcttgcctcagcctcccaagtagctggaaccacaggcatgtgcaaccatgctcagctaattttttaaatttttttgtagggatggggtagctagttataatctaggtgaatwttataaacaattgatcccaagtatgaatcaaagctggtgaatagtttcttcgctgtgatgtagagcctgggccagcataggtcctcctgtggcccgcatccagttgcccatatcctcatgctttctctttaataccattctgtagtccgcctctcgccagccctcactgtcctgtttgcagcctcctgagccttctcccctagccccagccccaccttccaaaccaacctagcacaatccccagatactgcactccagccttccctggtgcagctccctgggaggatgaggcagcctgcacttgtgttagatacactcaatcgttctgtgctagctgctttgctggtgtttagtctcttaatcctgccaatattcctgcaactaggtaggcactgtcatcataagaatgcagaaagcttcaggacggttaagctgttcaggcacaccgctatttagtgaaaattgtaggcatcaaaacgaaggtctctttgtctaaagccgacaaatgattttgctgtgttgcggtccagctgttacatgtaagaagccagcggtgtcagcgcagcgttcagcttccatggcctggcatttcctactagtgcagcccttaccagcccccagcccagctcctgcagccggcactctccaagcagcccagccctcctgggcctttcctgcctctctgcctctgttcaaggtgtcctctagaacatcctccctggcgcctcagaagattccggttaccactgaaggctccttcttcccactgcaccttgtcctctgctgggtagagcagcacaccagtaacctgcaaggctcatcaacatataccctaaaccccggggctggcccaagtggggtcaatatttaatggcattttgaaactgtctagatgagtggagcagaacttacacaagggccagcacttgggtttaccaactgccacctctatttcttctcktcaataggttgcaaactaaatcgcctgaactctgttgttggtgaatatgccaatgcgtgtttacaagtggcccaagactgtgggactgaygtacttgacctgtggaccctgatgcaggacagccaggtacggtggcttgctcggtcctctcggggtaaataggatcacacagaagtaaaccaggtgtgtgtgcagcagctttccctagaaaggccctgcttagctaagacagtcatccctwtagccaatgaaaacaaacaggcttgggggaggggaggaatggaggttccaggatggctcacaagcccagcagcttaattcagccaggctccttggctaggagttagtgcgcagtgacatcaatgagcaacacatggctcatatttatgaacgtccaggccaagttcttctttcatacagagaatggcagaaagctaaaacttgttaataggtaaaacaatgaatttaaatacagtattggctaataaaactgtttgagatatgtagttctaattaagttactttgttttaaagcctgaaagcacaaatataaaaggtaaaaagcaggtcccatggaatggtgcactgactcaggagacagctggtttctgacgcagtcacacatacacttagggaggacctggcagtccactcctgggttatctgccctagagaaatgaaaactatgttcacacagaacctgggtgtaactgttgacagcagcattattcctacctgctggaaacacgccagtgtccttctgtgatgaatagggaaactggtgtgtccgtggaatgggatactactcggcaataaagaggaggaactgacaagcgcagcaacgtgggtgactctcgaggcgcttcactgagggaaggaagctggtctctgaaggytacttactacatgagtccatctgttttggtgtctcaaaaaggcaagacttgggctgggtgtggtggctcacacctgtaatcccatcactttgggaggccaaggcaggtggatcacctgagttcaggagttcaagaccagcctggccaacatggcgaaaccctgtctctactaaaaatacaaaaattagctgggcatggtggagcgcgcctgtaatcccagctacccaggaggctgaggtgtgagaatcgcttgaacccgggaggcagaggtcacaccactgcactccggtctggaggatacagggagactgtctcaccctccccagcccaccccccaaaaaaaggcaagactgcagtaacagaacaggtccatggtggccagaggttagggcaaggaaaggtatggctaaattcaggttccacacagatactggtgaagaggggcagacaggcactggtcttttttaatttttctgtgaccttgtgctactcttttgtaaagagcttgttcagtagggcacattaaaggctayttcattgctatgctgggatccagagagaaagcttggacgggactgatgatatttgaagtactcaagggaaggaaggatccagtgtgcgggaagctctttggacaaacgggaagactcacagcctcaccggtttcctctattcctagctgttaggtttaggctacttggacaaagcaacatagaaaacagccaagaaactaacccaagtgccaactttttcctctcccctaaatattaatccataccaatcgttccaatgacctacacatttattatccatctgtaatagggaaaatggtcaccagtgggaaagtcatactaccacgtggatgccgagtcaccagtcacctttggaggccctgagagcctaagcagatctggaccctaggcctctagtcttcctctgaaaccctggagtactggaaccttccagaattccagattaggaggggccttggcagcttgagtgccaaaagggtcgacatctagagttctgttgtctaggaaaggaaactgcaaactattgggctagttttgctcacatgtctttttcaatttaatacaaaactgagagggtcgtccttagagatcatctcatctcaaactgcctagatgagaaaaccaaggccgaagaagaagtgctactattatatgatagcatctaaatttctggtctattaaaagtcacataaggccgggcgcggtggctcatgcctatcatcccaacatttcgggaggctgaggcaggtggatcacctgaggtcaggagttcgagaccagcctggccaacatgttgaaaccccatctctacttaaaaatacaaaaattagccaggcgtggtggcagtcacctgtaatcccagctacttgggaggctgaggcaggagaatcacctgaacccgggaggcagaggttgaattaggccgagactgtgccatcgttctctagcctgggcaacaagagtgagactctagctcaaaaaaaaaaaaaaaagtcacataagctagttggccacccagattctaacagagctcttggctagtgagattcttccccaagaaagaaatggctgtatgggtaaaattcttatagttcagggcctggtatggctgctcatgcctgtgatcccaatactttgtgaggccaaggtgggagtattgcttgagcctaggagttcaaaaccagcctgggcaacataatgagagacccatctctacaaaaagcacaaaaattagccaggtagccaggtatggtggcacgtgcctgtagtcccagctgctyagggggctgaggttagaaagatcgcttgagcccaggaggttgaggctgcagtgagccatgatcatgtcactgcactccagcctgggcagcaaagcaagaccctgtctccaaaaatatgtgtatctttttaaatatgtactcttgagttcagggcaatgggagggagactggactcctgtgtcccagcaattactgttctaggttagatggtagaagttctttctrcctaaaaacctgcctagagtcaaaaacaatattgactcatggggcccctgaacactcctaataccaaatttttcatttttgctgattacgttaataggccatatttacctgttaaggttctttcaaataacctgagaatcatgtcatatgattcagaagacctggaatgaggtcccagctcacttaatggtgagtgactttcatgaaactcaattctataatatggagacagcactatagcactagtcagggttctctgtgtgttcaaacacctacgtaaatagcacatcagtgctactgtagtccaagacacctctggtcagatgcctacaatgaaaggggctggtgatatttctgtcgcagggccacaaatgagagaatggtacacactggcatttagaaaagttataccctccctccccggcctttttgtgtgtgtgtgtgtgtgtgtgtgtgygtgtgtgtgtgygygtygygygcgcgcgcgygctgtggggggagacagtctatcacccaggctggaactcagtggtgcaatgatacctcactgtagcctccaactcctgggcttaagtgatcctcccatcttcgcctcccaagtaggtgggaatacaggtgtttgccaccacacccagctaatttttgtatttttaaaattttttgtagagacagggtctcaaactcctgtcttccagtaatcctcggccccaaagtgttggaatgacaggggtgagctaccacacgtggccagttacccacctttaaccgatttctctcccttctaggacttctcatcttatttatcagatggactacatttgtctccaaaggggaatgaatttttgttctcgcatctctggcctttgatagagaaaaaggtctcttctctacctttgctgcttccttactggcgggatgtagcagaagcaaaacctgaattaagtctgctgggagatggagaccattagccaatcacaggagacccaaatctgcttgttatctacagaactcaaagttgtcaatacgtagaggtamgcttttttcctcaggcttaaacctttgccactgatattaataataaaagtattagatgatttttcagggaagttttatacttaggtccattgtgtttcgacagtatttattaatgcagatatcagtgctacagctataaaatataccctgagcagcttgttaattctataaatgacaaagactatgtttttaaaaagtcacaattttataaaaatggtttttcttacattcttttgagaactgtttcactcatacatacacccacacaccccactcaaccttgtatcaaattccaaaagtgtaactaaagtataagaatatcatgactagttaaaagatagcaaataccataaggtacaagttcaagtattagtataacaagtatctgagtaacaaatgtccttggaaatggggggtaggaggagatatgattagtcacaggtttggttaactgccctcaaaatttacaagttaaaatgttttggctggtgagcacatttcagttcttaggggaaaaaaagcttttaatggcaatttatagaaatcagaatccaggctaatgatttttatccttcacacagtaaatgcagcccatccagaatcctggagcaataaagtaagaagtaattcaaatatctgcttgtgggtcaataaaaagggtttctgaagtatcaagtcttgtggggacagcccccaaccctaagggcaggtagtattctatctcctggctggctcatcacattcaaaacaacctgttttttttgttgttgttgttgttaagaaatatctcaccctcttattcaatagtgtttgaaaacaggcaatctttgtattttaaatattctaggtttgtagatagtgaattttttttttttttttttttttttgaggcagagtctcactctgtcacccaggctggagtgtagtggcgcaacctcagcctctccaagtgctgggattacaggcatgagccaccactcccagccaatagtgaattttctaagagcatgtatccctatcagtaacagggatacatgaagatacttataaaatacagaaaaactgcccagcaaatcagggccctaaacagttggtagattccataaattcaactggctaccatgtatagccctcactgtaaggtaggtggttaggtttttagagagcattagttttagaattatgaagagccatattaacccaaatgatttttaaatttagatatatattttccctgctacataaaaactttgggtaataactagaaatagacccacaatttagagacaatgtatactagatttatctcctttgtttttagttgaaggcaaaaaaaaaaaaaaaaaaaaaaaactattccagttgtcatcacaaataaatgccaaatgcctcatattcagcggttcattacagtgtataaaaaaaaactgatcatttccctagtcagtgctgttatcaatataaaagattaatttacaaaaacgtaaatattcataacccaatccagctgtattttctgcttttgcaccacaggtcaaaagatattttaaaaactaaaacctgaaagcctcaaaataagctagattcaccttcaccttaccttttcaaaaggagaagggccaaaccacacaagaactgtttacctgcaggaagttcaaacacatgaccagcatctgctaagtcacttcccagtcttcacaaaatacaagctgtgattgatttgtaggtcaaatctataaaaatattttgcacacttaagtcagaagagctgagaactaaattagcactctgtttctttgctgtcaacacgattctgacgctgcagtttaaaggaggcagccttttcacttctggtgaccggatggtccgtgagatcctcaaatgacttggcagctgtgctgctatttgggaaggggtccttctcaaacccatcctcgtccatatgtgagtctgtgctggggtcttcctggatggtgtccattctctggtggtccagttttggagctgctggcgccgaagggatcacaggggcaggctgcaggcggcctggagtctggggcgcaggaaagggtttgataatgcgaaccgatgcagaatccatgctgctcagcatttcgacgttctgcaaagacatgggttcaattgattgataggaataaaagatgaatcggaggtcctcacagctccacccttacccatcaaacagcctcttattctgttggcactgtgatgctaagaaaaaagtgctaggtgaggctcactcaacctaagtgactaaaaaatactaggttggtgcaaaagtaattaatgccattacttttaatggcaaaaacagtaattactagctttcaagcatcctgaaaacttacttaccatttgaagacccaaaagaggattcaaacctctcaaggtaagatcccaagagagaaattgaactcaaaatattaactaagtgttgaatggctaaatcactccttatggcttgggaaggggacagcacagctctttaaatgtccatccatgcaactaatcgaagttcaccatcactgttgtcagaagggtaaacattccaacctagacccttcctgctgcaacatgaccttccatcagccagtgaaagctcttgctgggtcaggtgaaggtctttgcctaacagggcctcagaccaggcgaagattatgtttctttcatatggtatacttacactggggtgaaacagagacagagattcatactgtttatccaatttcttatcctagaaagaaacagcaagaaggtcattccctacaaatacaattcagttagtgagtactatttcatcacaggctattcctaacactaactgaagaacttagaacctgagttgtagaaagtgatagcaggctcaacagatgacaatccatttctcacccaagctttagttatgccaccagtctagaagtgtttcctttgcactcaaaggaaatacattttggcgttaagtacagaaagaggcaaggtttaagtgctatgttttctgagaaatttatccctctgtgggcaggggaataataaaggcatcttcctgtgcatgaaatgacaaatgtcccagatgctgggtacaccaggaccgcactgactggaagggcaactggtaggaagacccaggtggctgggcctgcagcattcttcgcactgccccggcccatggcctcactctcttagctgtctccacagtttctgtggaccatgctctgctggaggaactgggcctcaatccctacatcctacttctgcagaaggctaaccacatggccatctgctgccccatccctgcctgtggctgaagcataataggtgacagagggcaaggaccaagaatccaggactaggcttcctgtctgggtgccatcaatgcattctatgaccaaaaacaagccatggccctccctcctatcggaggctttgctctgaaatcaagggtcgtgccttgtccacatgtgcaacttccctgtaaacaaaataggttccatcctccaatagaagcaatcgtgatggatggcactgtcatccagagacatctgtcaaagcttcaagcacgtcaccttcagctttcttcagcacaagtgctccctagagatcttcctatacccatcatgctcaccaccctgaggaagagctgctctgtgagatggcccctaggcaggagaagccagcaggaaaggaaaggaaggaggcagtaggaaaaactcctttgtcatcagagttgtgctggaatttttaaatgctcataggaaggccactatgaaagagtttgggaaaacaagtctggaagcctgggtgtgactttctcatctctacagcagacaaatccccattccccacagatgcaagtgaatggattcgtaagaacatttatgaaaaagggcctcaaatttataaaggaccaggagttccttagtcaaagcccaattcaacttgtagctgttactgattctgaatgagaacagaaaagactgcttactcttattttttggggaagatgtaaatactctatatgacagctgggccccagtccctacatcctatttgtgcagaaggctgaagacatagccatctgctgccaataatctacatgatatatggggaacatctgaaatgccgatgtttgatatttgctctattgcaacgaagtcagcctgaaaatgctcttcaataagggctttactcatcaaaggacctggacaaatccagttaaacagtctcctatgcttaaaagtataaaattcctaagaaatttatatattaaaacaccaacacacaaaaatagtattttttttaaaagaccattagttaagctttctacaagacatgttcccctaggaataacaacaaaaaaagctattggaaatatcaggccaaactttgctaagaacaagttttaccttttccagagattacatggttggagttgatcaaaatttaaataaaacatttaattacttaaaagttgatgacttaccacacaatggacaagaatgctgaaaggaatccaaaatatcaaggagaaaaccaggacagacccaacgatgttgtctgctaaaaactttcctgtgaacaattccaaacagttaatgtcttgaccaagtacttcacaaatctaaagtgaaatgctcttaggatattaccattgtgtcaaatgccagagctgctggctagacatactaccgagagcagaatgtctgtgctgcctgtattacaccacaccatctctccataccaagtgcttttaaagaaatagccctcatatactggctgacaggaagagattgcagaatattcaacatgttacctggagtagctgtgtcaacagattaatatggaatgctactactagtaaatgcttaagaagacaaagtttttgttacctggatattatttttgtgattaaattatggactcgtgacaacatgatataccctgcttctgcaaaatatgaggctcacttttacatcaagcaggattcagtatatagcattcagtcaaataaacactcttacatcaatcaggattcagtctatagcattaaactatgcttatgctaatcacatggatatttttgggtaaagaaggaagccagtattttgactttatttcccttgtcagaaaatctgtgcatccaagctccacggggacagactatctatgagttcattttattctagccaacaaagttgtttcataactaaagctgtgaatagttccaccttctactgcagaattaaagcacatcactctgaaagcacacttttctaatgtcatcacagaaattgactcagctctcagtaagtaatctggggaaatcacctaccaaaagtattgatgctcagctggtcaatgaaatcccaaaatcgttcaattacatcctgtactcgtttctcacatttgccctatgaagaaaaaacatacatacagcatcattcccaaacacaatgtattcagaagcaatgtagctttataaaaataactgacatgtaaagggcttcattaaaatcaaacgttttcccatctttgacacaaggcaataacttccgcgtaatgagtacccaagaaagtagaacatctgtcattaacactttcataattactccatttttacaagtgatttagaattaccaggagacaaaaatcaaggaaaccagtttgctaaagatgaggcattccagtaaggactctacacatacacagtggacagtgaacaacacagccagactccctgtgaagcctcgtaaatcttaaaaccctctcccatcattctgcatgagaaaaattatgcttctctagagaacaaaagggtctggcttaagtaagtcaagcagccttctaggtctttcctactcattcagcacctgtttcaaaatcacaccctgaataattttgcaatcttagtcagttctgtaagtaatctaggaaaacataattaggacccactgcctgaaaccaaccaactttaccataaagtccccaccccagtccttctcagtctctgggctcaaagcctcccaccacagaaggaaactacaggcagggacctgaaagcactccgtcttctcctcctaagtaatacccgtagataacaatgggccagaaggatgtagccccacttgtgttttgatttgttttcatctgcaaaatcaagtacttacaaaataaaaacttcctatctggctgttacagaaaaagct

SEQ ID NO: 8834 - DNA, 15727 bp, Homo sapiens
  misc_feature (1)...(15727): n = A,T,C or G, or insertion/deletion polymorphism (see Tables 1-2)
tggaggacaatgatcccagctgaagtgagggcagcagcttccctcccttaggctcagagtgtccaaagaagtgtcagggtgcacaaggaaactgagtcagaagagacacagaaagaaaggggaggaggcagaagagaaaattaacatctactgagaacctactgtatatgggcacagggccaagtagcttacggaattcaagtcatgtaatctccacaataaccatctcaggtgtttatttctgtccctattttgcagatgagcaaataggctcagagatgttaattgacttgctgccctgggacacacagtcactgagtggtgaagacagtgttcaaagccaggttggttggtctgtccaagaccatactgtgattcctggtaaatgactgcaagttggggaaggaaagcgttcaagctggaataaagctactgacaccctgtaattcccacccccaagtctttgctctgcctgaaccttgagaaacactgaagatgggggctttcttctatggagccaatggcacaatctcaataaggggtggctatgtcaaccccgggggagttcatcacagaaaaataagtataactacttgttcccattcaacttggaataccttccctctccttcccaaatgtgctccacacttgccttttctaagactcctttataactgatatgcccagcttcccagaactctgatctcttgttccgtaattcattcattcaataaatatttactgcatgactaccacgcaccaggcactgttctagacagtgaacaaaacactcacaagtccttgaccttacataaattatcttctggtgagtccagcactggtgtccacagccctgctgggaagatcatctaccttggtcctctggtggagcggaccatgagctggaactcccaaagagcaacatcacaacagtctcccctggttctccattcccaactgggccctgcccagccacagtgctccccaaacaacctactatctttcactcccaggcctttatatttgctgtccctcagccctgaatgttcttctttctttccccctggttcgtcttcctcctttgggtctcagctcggtgacatttcttaaggcctcctctaagccttagggtagggtcaggagctcttctctatgctcctagaggatcccatgattatccttctgatagcaatggccacattgtattctaattgccggtttacttgtcctacttccctttgacacctggaattcctgaaaagctaggcctgtcttttcatccctgtacctccagtgttcaaaactgctgaatacacgaatgaacaaatcaatgtaggacaaagtaggaaaggctgggcagggcacggctgggcaccagtgtcctccagctctccagccctctcatactcacctgcctcatgagttcagggttattgagcatgtggctgatctcagggttccgctccatcaactgctgcatctgggggttggccataatcatgtgacgcatcagatcagggttagacatcatatcctggaccagggggttctccatgatctgtgacagcatctcaggattggacatcagctgccgctgcatctgctgctgcagctccatgaagttggcagagcccaggcctaggctgcccagccccaggatgcccccaaagccagctgtgggaagggggcagggtcacagtctgccacaagaacagtgtcctcacttagccagagccactgaattcagatctccaggacacgccccaaatgcttctcacatgtccctcttcctgtcattcccacagcccggccctgatccactgctggcaaaaaaatgtgagcctactagactgaggctgtgccaaacatagaactgagcagagagaaggcaaccagcaatggtctgttgaatgagtggcccatgtggctactgctggatccaacttttccccagactcacagggtcttccattccctttacctagggttccccacatccccaaccccatttctcccctcactcctaacccttagccatggtccccacctctgagaactcctcagactagtttcttccccagcttgactcaagtatcaatgtctggaactctgtcatggggtcccctatccccatcagaccaggagcaggaactcctgtttctccctcctcttggctttccccaactccccaaccccaaacaagattgtgctctcctctctgagggcttacagagtatggacgcagtagcactgggggatccctccccagcccccggagagggccccccaccactgctcctccggcttccactgccagcatctgaagaggcactgccagaggtggagggctgggcaggggtggcgggtgaagcaggcgtggtggagggtgctgaggcagggtcaggtgtggagggggaagaagcagtggcagcagctggatcttgagccctgaggacagagaaaggagaatcctgttggagtgagcactagaagagggaaggtaccgtgacaatctctgtgcttgctatgggacaactattttaacccaagacccctcctgagcagtcctgaggctggagtggggtgatggcgggagggcagtcagtaaaccagcagagggagaaaggagctagtattatctgtcttcagggcattctgggaatggtaaatcaggttcccttcccctagagatgagatcatattcatccaggagctacctgcctgggcctcagcttaggccctctgggtacagttaagcaatgagtgagaaagtatcagatggggaggcccaatcagaagctggatctgctctgctcctgaacttacttctgaggggtcttgatgaccagatggacagtgagcccgtccttgattccgtgctggttcagtgtgtccccatccttgaggatcttgcctgcgaagatcaggaccagctgatcctgctgagccttaaacctccgggagatttcctctttgaactgtgatcaagaggcagaggtcactgtggaggctgcctggactccccctaccagggaccctgactctttttcaacaccttctgcactctcttgctctcatctctagtcatgggaagtcctttctgtagtctcgacgccattcctccagctgcaataagcatctcctttcttaacaaaggagatgaaccagtgagaggctcttctctcagctccatcccagagtctcccaccctagaaagcccttgctgctatctgcctcccagcttcagtccctccacctagttctctgtaaggcagagcagcctcccatcccaactccttcaacagctttggaccttcagccttctgagacccaattttctctcctctctattcccagtattctcttaacaactacaacaaatagatgccagttattgagcactacctattcaccagttaaagatatagtatattgttattttcattttattattatttttatcttgagatggagtctcgctctgtagcccaggctggagtgcagaggtgcgatcttggctcactgtaacctccatcttccgggttcaagtgattctcctgcttcagcctcccgagtgtctgggactacaggcacacaccaccatgcctggctaattgtatttttagtagagacggggtttcaccatgttggccaggctggtcttgaactcgtgacctcaggtgatccaccagactcagactcccaaagtgctgggattacaggtgtgagccaccacgcccagccgtatctccattttaaagatgagaaaactgaggatcagcgaggtaaggtaacttgccccaggcagaccagaactcaggtcttgacaccaaagtccaggctcttaactaaacacactgcctctcaatgagagccgttttcaaattcagctttgtagggaacatacagtatttaaattctgaaatttagtaattctatgtggttagggagggagcaaggatggagttagacttcccaaattctaccagcccctccaaaacacaacacaaaacaaaacacaacacacactttaagtaaaaacagtgcacttgttaagcagaggctgcttccagatccctctcttccaaccagatggcctatcttaagccccgcctatgtgaaattatggagcggccacagggggtggcgaacacaggcaacagtccgtcattcaacaagattttattgagcacctactgcacaccgtgtaaatctcagaagagctgagaaccaaatgtaaccacgtcgatttgaaagagtgggaaggatctgggcacagggaaatcctcccccgacagccccgtcgctcagagaacactgggcgttctctgaggcacagagtaggcgccggcgctctccgcctgcccccggcccgttctctcagttagcacctagcccgggcccccactccggcacactcccctcaaacccagggtccttcccccttcccggtgcaaggtgtcccctcctcactctccaccacgcccccaggccacaaggcaaaacccgcccctcaacacgcgccacgctcccccagatctcccctcgcagggcgccccctacccgcctctccttgccttcagctcctcggagtcccagccggcccccgccctcctctccggggccctccgggacgccggaccgtcagagaggccccccatctcttcgcagacccctcctccgcgctccccccgccccccgcctgctgtactacctccttgaccgaggctcgatcgcagatcacaatttcctccttgtccttgggggtcttgacggtgacccgaatggggggcctcgtctcggccccgcggctccgccatgccgccgccgccacccgcgccgcccgccagcccgacccgnnnnnnnnnnnnnnnnnnnnnnnnnnnnnnnnnnnnnnnnnnnnnnnnnnnnnnnnnnnnnnnnnnnnnnnnnnnnnnnnnnnnnnnnnnnnnnnnnnnnnnnnnnnnnnnnnnnnnnnnnnnnnnnnnnnnnnnnnnnnnnnnnnnnnnnnnnnnnnnnnnnnnnnnnnnnnnnnnnnnnnnnnnnnntcccctcctctctcctccccttccctccccgaggcttcaccgccccctccggaccagccgcagccacagcgccccgggcggaccgggggggccactgcagcggggtccgcccagggccaagccccaggtccggagcccggccagggtctcgccaggcgggggcccctggggggcctctgggagggggaaggggcgtgcccttcattgcgggggcgagggcggactgccccgggagaccgcgacccaacgctgcccgcccgagccgtgccgcggtcccctccagcccaaagcctccccgccccctccgcggctaactcggctccgggacaaaggactttctgtgtcgccgctttatctccgttccctgtgataacttggtctttcttggaagcccaagtcccttccaggccaggggactttcccgacttggaggttgggttttcccaccaagcacgtccacctaggttctcagctctgggactgaccctatagccccgagggtcgcggcctgaatggtctattaagaacggttccagggagctgggttttggctgcgtggcctttcagagccttggtttcctcaagataataataatagtacctctcgcctcatcgcacagaattgtgcataacggagaaaactgttttgaaagtaaccaaaggcgtgcctgacaaatatgaggatgtagtataattattgaatcgtggactgccaagcggacacgttgattcctttctccccgaaggggttaaatgtccttccagcgctgctgctgtcctttcactcccgttcttttccgccccccaacaaccgcgtggtcggcttggaaaggcgaactataattcccagggtgcctcgcgaggccacaaagaactacgattcccagagccccccgcggtggggcggggttgagtcggaaccacaatagccaggcgaagaaactacaactcccagggcgtcccggagcaggccaacgggactacgggaagcagcgggcagcggcccgcgggaggcacctcggagatctgggtgcaaaagcccagggttaggaaccgtaggcatgctgcgccccaaggctttgacccaggtgctaagccaagccaacactggaggcgtccagagcaccctgtgagtgcagaccacggacccgagcggcgagcgctgcagtggggcggcgcgcggctccctgagggaggggtggggaaggatcaccaggaagggaggaagcggcagagggggcagcggctggggataccggccgggaggtcccctgtcgaaaagggaagccggtgtgctgggtgcttagggcatgttccgggacacgctcaggccagagccttgctggatgtgcccttggtgggacttgggatggaaacccagacgttttactccccgctctgagcacatcgctatccctccccgcccctcaccaggctgctgaataacgagggatcactgctggcctactctggttayggggacactgacgcccgggtcaccgctgccatagccagtaacatctgggccgcctacgaccggaacgggaaccaagcgtttaatgaagacaatctcaaattcatcctcatggactgcatggtatggagaggggagccagacttcccctgtcccccaaaggggatcccaagggggcgacctggaccccatcctggatggttggaggggcagggacaggatctccggaagattactaagagttggtctgcagcagcatttgtaataggcaggaccctattcatcaagtggtggtgaggaaggatccctggacctgagaggtctgacttgggttctggtctcagccatccacttatcagttgtggaaccttgggtaagtcgcttaacctctctcagcttccttacctcatgtttaaggagaagacaataatttccctctccccgctcccctcatgggttgttgtgaaggtcagatgaaataatgggtataaacagtagaatgacgtgcaaacacaaagtgttgtcatcccagtttcaccgactcacagaaccatggcagtctccagaccctagtccaaccccttaagctttcaaagaaaggaaaatgaagtccagaaaggggaagtcaccattagattgtgaacttcttagtatctgttcggtcgacaagtatttaggtccttgcagtattctcaggactagggaaaaaatagcaaacagaaagacaaaacccccagccctaataaatcttacacagtgatacaatcacggctcactgcagcctcgacctccctgggctcaggtgatcctcctgccccagcctcctgagtagccgggactacagacatgcaccaccacacctcgctaatttttgcatttttccagagactgggttttgccatgttgcccaggctggtctcaaactcctggctcaagcgatctacccacgttggcctcccaaagtgctgggattacaggcgtgagtcactgtgcctggccacattttttaaaataagtaaaatatatagtatatattaggtattgaaaatgcaatggagagaaagcagggaagtgaaagagtatgagtttgttgggtgtatgtgtcagggacagtctcactgaaaaggtgacatttgatcaatgatctgaagaaaggtgggggacaagccatgtggttatctgagggaagaatattttggacagaacagcaagtaccaaggccctgaggcagaattatgcctgctcaaggatcaacagggttggttggtatggctggagttacgtgagatggaggagggtagtaggagatgaggtcagagaggcagggagtgcagtgcttggttcctggcatacaataaatacctagtaaaagtttgctgaacttacttttgtttttttcaaattggccagaaggtgaactctccaggaaggatcttcattgtaactcaactgcctactctcccctaccccctgcacaaccaatgccatttttagttcaacatatgactcctactggatgcctagagctggtgctatagggcaatagctttcaaacgttttgaccacaacccagccataagaaatacattttaaggggctgggcatggtggctcatgcctgtaatcccagcactttgggaggccgaggcgggcggatcacaaagtcaggtgttcaagaccagcctggccaacatggtgaaaccccatctctactaaaaatacaaaaattagctgggcatggtggtgcgtgcctgtaatcccagccactcaggaggctgaggcaggagaatcacttgaacccaggaggcagtggttgcagtgagccgagatcacgccactgcactccagcctgggcaacagagcaagactccatctcaaaaaaaaaaaaaaaaaaagaaatacattttaaggctgagcacagtgcctcactcctgtaatcccaacactttgggaggctgaggctggaggattatctgaggccaggagttcaagaccagccttggtgacctaataagaccccatctctacaaaaaaaattttaataaataaataaataggaaaaaattttttaagaaagacattttaagtcagagctcaacacacacatagacccactaaaacaaaagtcatgaaacaatacttttcctactacatgtaatatacttcattttttcttttttggtttttaatgctgatcaaccttcttaatttatctcctaactgtggggtcaaatctgcaatttgaaaaacattaccatgggaaaagaggagaaataccagttgggttaccactcccatgcccctctcagtgtctgtggggtgagctcacagtaataacatcactcatttggacaactgttggcagatatgaaatttcatggtattagcaccctcaccaactgggatgaggtagggattacagaaagaaaaactgaatttctgagagactaagtttccyagagtaacatggttagtaggtggctgtgctgaggctggaacctgggctcagaaccccatgttcagggctgtggccaaaagcttttcygctgaacttcctgctgtgcccagggcatgggaggaagatatagtctctctggggccagagaagcctttggggaaggagggtgctaagggtgccaagcagaacatcacatcccatcatatcacccccaccaggagggccgtgtagccatcacccgagtggccaaccttctgctgtgtatgtatgccaaggagaccgtgggctttggaatgctcaaggccaaggtgtgtatgtgcccatccctccatagccctgggcccagccttcgtgcttctacactgtgttcactcccaccaggaccctgtttctagagttctcatgtctactcagtccatttctggtgtgggccagctcccaagagcaggtgggggttgggggctggttgcttcctatggcactgggagcagacctggawttggggtccctaatgccaggctgtgtgcgggactgatctctgttctccctctgcaggcccaggctttggtgcagtacctggaggagcccctcacccaagtggcggcatcttaacggcattggtggaagctggggtcagaaaagagaaatgaccatttggaggggcggggcctcctagaagaaccttcttagacaatggggggaggatgggactttgttttttccaagaataaacttcaactcctgtcatgtgtcttggctactttcttggatgggaggaatcagagaagataggaagaagcaggcatcgcttctaggattcctcatgttctgcaaggatggacttctacccaccccttcaccatgaccttctgcgaacaatggttcttggcagttacgccaaatagtccttgtcctcaccaatggcatgacctcacctagaccctgctgctcagaacagagtcttacccacctcataggcaaaactgggagtgagctcagaggtgcaagggtctggtgggggttgtgttgcacagagaatataaaggccctgagaggttagtgtctatcatttcaggtttgggggcgtgcgtgccttttatttttttgagagggtctccctctgttgcccaggctgtaatgcagtgacacaatctcagctcactgcaggctcaagtgattccacctcagcctcccgagttgcctggattataggcacacaccatcatgcctggctaatttttgggtttttgttttttgtgttttttaggggttttttttgttgtttttgttgtttttggtagagatgaggtctcaatatgttgctcaggctgttctccaacttctgggctcaagccatcctcctgcctcccaaagtgctgggattacagatatgaaccacttcgactggccagtgagtgccttttctattcttggggttgggagggtgcccctaacagcctagaacaagctatccctttcttcttcttccaggtgtttatgtgcttacacagaccctccccagatcttgaagccctttgtagacaagaggcctttgctgtgaggcctcaggtcctgtacagggagtagaagtaacccagacctcccaaaggccttcatctccagaccctgctcctacactcagaccactcaccccagctgtctgtttctgccccaggtctctgcctacccaatatccttaaagcaggtctgtatagggagctaccagcccccttccccagtgccatataaaggaacccatcccagagaagtgggtaggtttcgagtcccagctccacccaagatgagaaacactgcccatcccaggccctgggctgtcaaggaagggcagaagttactgtggccatgatactcccacagctctgcattgcagcagggtgactggtgttctatcagcccctggtctaatatcccttactctggttcccccagtgtacccccctaccagctctgaaggaaaagcaggccaagtgggtttcttcctttttttttttttttgagatagaatctcttgctctgtcacccgggctggagtgcaatggcacaatcttggctcactgcaatctccgcctcccgagttcaagcaattctcctgcctcagcctcctgagtagctgggattacaggcgcgtgacaccatgcctagctaatttttgtatatttttagtagagacagggtttcaccatgttggtaaggctggtcttgaactcctgacctcgtgatccgctggcctcggcctcctaaagtgctgggattacaggtgggagccaccgcaccaggcctctttttttttttgagacggagtcttgctctgtcgcccaggctggagtgcagtggcgcgatctcggctcactgcaagctctgcctcctgggttcacgccattctcctgcctcagtctcccgagtagctgggactacaggcacctgccactacgcctggctaattttttgtatttttagtagagacacagtttcaccgtttctaccatagagccagagagggccccctcctgtttttttatctcttaccaagacctcctggggctcctcattccttcaggatggtctcgatctcctgaccttgtgatccgcccgcctcggcctcccaaagtgctggaattacaggtatgagccaccgcacccggccttttttttttttttttgagaagcagtctctgttgcccagactggagtgcagtggcacgatctcagcccactggaacctctgcctcccggcttcaagcaattctcctaccttggccgcccaagtagctgggattgcaggcgcccaccaccatgcccagctaattttttttttttttttttttagacggagtttcgctcttgttacccaggctggagtgcaagggcgcgatctcgactcaccacaacctccgcctcctgggttcaagcgattctcctgtctcagcctcccaagtagctgggtttacagccatgtgccaccacgcccagctaattttgtatttttttagtagaaacggggtttctccatgttggtcaggctggtctcaaactcccgacctcaggtgatccgcccacctcagcctcccaaagtgctgggattacaggcgtgagccaccgcgcctggcctcaagtgggtttctgaggggctatttcttgctcattagttgggggaccggccctcaccacagattccagaagcccagcaatgcacactcagccctcagtgggctgtctctgaaggtcctgtccctttttcgcttcccccccgctggagctgcttctcccgcttgcgggagcccaggctgagagcagacacccaacctgtcgaacctgtctgacgtcatcatctctccacccacctgggccccaggtctccagccaccccgctcttcctgttctcagcttccgtcctctctgcttccttacagcacccccacctgccagagctgatcctccctaggccctgcctaaccttgagttggcccccaatccctctggctgcagaagtccccttacccccaatgagaggaggggcaggaccagatcttttgagagctgagggttgagggcattgagccaacacacagatttgtcgcctctgtccccgaagacacctgcaccctccatgcggagccaagatggggaatggaactgaggaagattataactttgtcttcaagggtgagttgggttccctgaagcaagaggaagcctgagagacccagaaagagattgaatagagccagagagggccccctcctgtttttttatctcttaccaagacctcctggggctcctcattccttcagaaagaaagctgcagggagtgggggagggtctggttgcaggggcaaaagtcagggagcttctgagtatgctctactgtggtaaataatgatgttgattcctccttaagagtgctgagttaggctcctctgccccgttcctaatagaaacccaaatccctggtgtcagccagtgcagcacaagagatggaggtcagacttcagaaaggacttccctcttttatttttttttctgagacggagtcttgctctgtcgcccaggctggagtgcagtggtacaatctcagctcactgcaacctccacctcctgggttcaagcgattcttctgcctcggcctcccaagtagctgggactacaagcacctgccaccacgcccggcttatttttgtatttttaatagagacggggtttcaccatattggccaggatggtctggaactgacctcatgatccgcctacctcggcctcccaaagtgctgggattacaggcatgagccaccacacccggccaggacttctctcttgagaagaaagggaaaccagcaaacaagaggaagaaagtcatcttttctgggcaggtgtacagggaacgagagaaaggagagacacatcccattatagggtggggcaataaatacatagggaagacagaaaatatcatgaatttgctgcagagtctgatagaatccagaggactcctagggttgtagcctcgtctgcctggcccttggctgactcactggacctgcataccaggcactgggctcaactttgctgtccctggaagcatgcatgtatctttctagcccctgtgtttggtgcctttgctgttttccaaccccaccttcatacttcctttagggcagggtggactctccagccaccctaccccaatgcctctcccaacctcagcccggcccctcccttgagctgggactctcactccagaacccgcccttgagctggggaacctgtactactggcatcttttccaggaaggaaagggttagcaatagtctggggcaataatatgaggaactaccatttattgagcacttactatgtacctgccactacctcattaataccataacaatccccgaaagtcatattttattttgaggggcagtgtaacattgtggtcaggagccagactgggttcagatctcagccctgccacttacaagtattgcgggttggtcagccgggtgcagtggctcacgcctgtaatcctagcactttgggaggccgaggcggcgggatcacttaaggtctggagttccagaccagcctggccaacatggggaaaccctgtctctactaaaaattcaaaaattatctgggtgtggtggcacgtgcctgtaatcccagctactcgggaggctgagacaggagaatcacttgaacccaggaagcagaggttgcagtaagccgagactgtgccactgcactccagcctgggcaacagagcaagactctgtctaaaaaaaaaaaaaaaaaaaaaaaagtattgagggttgggttggggtccctagaagcagacgctgagaagaagttggggtgttcaatgtttgtttgttttttgagacggagtctcgctctgttgcccaggctggagtgcagtggagcgatcttggctcactgcaatctccgccttcctacaacctccgcctcctgggttcaagcgattctcctgcctcagcctcctgagtagctgggactacaggtgtgcaccaccacacccagctaatttttgtatttttagtagagacagggtttcatcatgttggctaggatggtctcgatctcttgaccttgtgatccgccctcctaggcctcccaaagtgctggtattacaggcgtgagccaccgcgcccagctcaatgtttttttacaaatcagcacctgtgaaaggaagggagaggaaacataattgggcagagggagaagtcaaacagcaacacaggctggacaaacctgggtcaagggcggggagctctgtgattgcctcaccttgcttgagcactgggtgtaggctgcccagaaaaggcatgacttccagtgaggccgctgtctgcaccagaggcagacgctgaaggagctgacagctggagcctgtctgcagcctgcactccctgcagcttggggcaagtccttccttgaaggctgatctggccagcacatctctgtgtttacaacactagccctgttatcttgggcaagtcatttgacctccaaagcgccttgtctgtaaaaacaggtaaaatagtaatgggattcatggcattcttatgaggattaaatgaggtaatatgtgtaaagcttttaacgacactgcctggcacatagtaagcattcagtacactgtaaacatgaaccattagtatctccactttacaactgaggcttagaggcaaagtagtttacaaaaggccacaaagtctgacttcaattcccttgccctaagcacctttgtggtatgacgctagggctgagagcccacccactgagagggatgagggagatgtgcccagtaggggagaggcaggaacacacacacacatatacacacacacacacgcatacacacacatcctcttacccacacatatccatattatttccagcttttccatactgtcctatgcaaataaggaatgtttaaatatatattttttatttttattttttgagacacaatttcactgtcacccaggctggagtgcagtgatgccatcacagttcattgcagccacaacctacggggctcaaacaatccttccacctcagcctcttgagtagctgggactacatgcatgtgccaccacacttggctaatttttttttctttttctttttttttttttgagtcggagtttcactctgtcacccaggctggagtgcagtaacacaaactcggctcactgcagcaccccca

SEQ ID NO: 8835 - DNA, 13608 bp, Homo sapiens
  misc_feature (1)...(13608): n = A,T,C or G, or insertion/deletion polymorphism (see Tables 1-2)
gaggcccctgctgttcaccacctttctgctaatctacatagtggttgtggttgggagccacatgttcacagtggactaccgacgccacactcccatgtacttcttcttgggcggccactcgctgatggatgccgcctgtatctccaacatggtgactcaggtgctggtgcatttgctggctccggtagggcccgtactttattgtgcttgtctcatccagatatgctttctccacttcctggcaccctaggagtccttcctcctcacagccgtggcctatgattctatgcagctatctgccagccattgcactactttgtcctcgtgggccgactgacccacacgggcctcacttccatctcctgcctgctggccttggccaacgcattcacctacagcatcctcacagctctacccaagttctgcaggccttgcctcatcacccacttcttctgcgacctccgtcactgctcagactctcttgcttcagcacacgtaccaatgaacttgccctgttcttcagttttctggtggctcttgcacactgcgtcctggtcgtggtctcctatggacacgttgtggctgctgttcaggattcattccacccagggctgaagaaaagccttttctacctgtgttgcccatctcgctatgatcggtcttttctacgtcacttcagtcccctgctacatccttcccaactctgcatactctggcttgggcgactgggtgctctctgtgctatgtgtggtcctcactcacatgctaaaccccatcttccccagcatgctgggatgacaggcatgagccaccgcaccggccaggaaatatttcttgaaagaaagaatgagagagtacctcgtgtctccccattatggggtttggcactggggatacagaaaagctccagacaagcttcctgcctttatggagctcacaaagtaggctgggctattaggcactaagacaattcactgtcatacaatggttactcgccattccttcacaggaaagggtcactcacccctaccaccaaacctaggaacggccacatgctgctcaaagggtcaacacagctgcctttcactgttctcaagtgatggcgggtgggcgctcagagaagaccaaaggctcaaggccaggacactaggccatccggggcttcccaacagacccccatcccgagtcccgcacaagagcctgcaatgacccccacagggcgaaacaagccgtgctcatcagccctggtaggtatggctgggccctccccctgggccatatgaggccagcctacatcatccccacttagaccgccccactcaggccaaattcctaggaaaggggccgggaatctgtgtagaccgggggagattgttctcatcatataggtgagagatgatgccgacctggcctagggagggtggagaggacacattgaaggaaactgactggacggaaggtgagatgacagagtgcgggaccatggaaacgcgtgtcgccaagacagagaatgaagcagagggaagccattccgggagtcgggggacaggcagtgaggtcagctgggggcaggttgggttggaagtacctacaggccatccaagctcacatgactgtgctggtttgaaactctggaattcaagcaaagagatccctgcttaactttaattcaatggccctctttgaatatagacatcctggccctgtcacctctgaagcttcaccattccagatgatgcctaatgtgatttcaaatacatttcatccattccaagcaagtcttctctgattcggaaacacaaagactgtctgccagcgtgtgtggaccaggaccggccctctggaggggaggggctgttatgggcctcggtaggttttgtgtttaagcacacatgtgttcttcatgagtacctccaaggtgcagaagaaaaaaaaaatctcactgtgtaatagtgacaaaatgctgatgaagcaaactatcaacagccctctggaggaataactttcaaggtaggatgaactgtgtgtgtggaatttggaaacaattgttttttggaagcggctgaaagccacagagatgaccgggagagccgggcgacatctgccccgtggtgtctagcgtgggccccgaggctcggtgacttcagagacttcatcacggcaccgtccgcctcattacatcaagaaaaggtgccaattagaacaagtttcagaggaaaaatatggcctccaatgaattgaacaggctaatttaaactttggcaaactggctcactccagagctaattagaaattttcctcaacagcaagtaatgaataactttcttaatcgctttctgcttataaatgtaatacatgttcactgcaaaagaagaggaaatatgggcaagttcggaagagaaaataaaaaaccaaccgttatctcaccgccaaggataacgacaatgaaaatgtggtgtatttctggataaatgagccaattcttgtctagtgcttacaacagtggcttgggacgtggtgaccacccaacaaatgttattggttattattattctcattgctagtaggcttagaaaagtcttttccaatgctatccctcccccagccccccacccccaacaggccccggtgtgtgatgttcccctccctgtgtccacattgttcaactcccacttacgagtgagaacatgcggtgtttggttttctgttcctgtgttaatttgctgaaaatgatggtttccagcttcatccatgtctctgcaaacgacatgaactcattctctttcatggctgcatatatttcatggtgtatatgtgccacagttttaaaatccagtctaacattgatgggcatttgggttggttccaagtctttgctattgtgaagagtgctgcaataaacatacatgtgcatgtgtctttatagtagaatgatttacaatcctttgggtatatacccagtaatgggattgctaggtcaacaagttgatgggtgcagcaaaccagcatggcacatgtatacctatgtaacaaacctgcacgttgtgcacatgtaccccagcacttaaggtataataatgaaaaaaaggaaagaaaagaaagaaagaaagaaaaggagagaaagaaagaaagaaagagagaaaagtcttttccattccaacaatcaaataaagttcatctaaattttcttccaatgtttttacttttattgtgtatatattaggtcaatacattctaaacacttcagatactatagaaatatttctctatatagcattcccccgtgcttctactgagatatgtatcggcagcctgagaagtcggcattcctttgtccacacccatccccgtgcatccgtttcatttcattcgctccacagtcagccgcacctcagagttgtccttcaaagggtgagagactaagacttttatccagtgactcttggccccatcggtggggggctgtgtccaagggtacaacttccccagagcttccaggcccaccctgtgcagggcgcaggagaaaaagcagatgtgttgtgagctgcaggagaggcgctggcacagggcacagaggtccccaccccagcagccgagaggcagaaggcacgtgcagggggcccagaggctcagcaggatctgagatgtgagaagatgtctacgaacacagaggcgcaggaggaggccggagatgacggtcactggaggggctctgagacgtgcacagaaaacaggacagagcttggcagcagcactcatttgtcgccctgccacacacagcctgtgttttctccttgacagcatctcagtaggacccaataatgccaacgcctggagatccctctggacaaccgtcttcatcctccacatctggtcctcccctacacctggggcctggacctgctaaggagctctttccagttttctagacacctgtggaatcccttcacccacccttacccatcggtgtggctgctctccagctcactctcgtcctgctctccccaactgcctcggctccagggggacgaggctttccctgggctgctgccttccctgcccccttcccagtccccagaagggtgccagcctcagaggcctccagagcagagccttgctcaccgcagcagctccagctggaggaggttccccctgcctcctgcaccctgaccccttcttagagcagcagaggcagaagcaggagcctgctttggaaaatgacatgtttttattgctatgtctgcagtggctttttagcacagtagaatgtccccgcaggcccgccaccctcacccagccccagccctgcagcctctgtctgggtgtcggggaagcctttcttggggtcactcagccgtctgaggactggatgtggcacagacatacataggttaaagctgctacacggaagactggagatgcgggaagtgcattcgctttaagcctagaggtggtagccgtgtccggggtcccttcctgggggtgtgcctgttaccgaaataccaagggtttggtctacgtcctgctgctggccgcacagaaagccaatgactgactgagacgaagagcattaccagggaagacggctttaattgggtgctgcagccggggagatgggagttaagtctcaaatccatccccctgactaaaactaggggtttatatagccaggaagaaatgcaccaatgtgtaggaaaacaggaactcgggagggcccagaaagcaatcctgatgaatttggggggtccagcatctcattgtctggatgtggttatctggtgagtttcagttctttgatattttgagaggcccgaaggtcatttcctgaggaaggaattcagataaaacaactgtaaggttcaagcttgaagaccagaagggtcagtttctatgtgtatcaaaaagaacagcctatgggacgattggatcggtttcatgcccaacccagggtacaggatgtgggaagcctgagccggcctggtgagcagcccagacacccgggatggagtattgcagcctctcgccccacagacttgtgaacagggcgtggggacagacacccagctcctagggccatgccacccccacccctgcccgcctctcgcagcacctttcctgtggatctgacccccttccagacacagaagtaagccagcacccagcagacacagggtcacctcccagctccctaccaggcaagagcgaccagggcagggactgatactgccgaacccaggagccaggcccgacccagcctcaggtccagcaggtcccgcctgtccacctgggccaggcctagagcccgggagcccctggctggtgggaggccacccgcaacccaccccacacgcagctccagctcccccaccaggcggggcgactaggacagggacagaacccgttgaacccaggagtgagatccggccccgggtcccgctgggccctcccgtccaccttggctggacctggcgcctgggagaccttggctggcgcgaggccacgcccaccagacatgcagttccagctaccccaccagctgggcgaccaggacagggacggaggctgctgagcccagttagaggcctgccccccggggtctgtcctgggcgctcccccaaggacggacagggcaggcagggtccgggacgatggccgcacagtcccggccccgtgttcccaggcccgtcttgctcctcgatgtgagggagacccgggggatgggacaggctgggccccgcagtgcctgactccctgcagggctcccgggacaggggtccggcggacagccggctgctcaggggtgaggggtccaagctggcattgcggccaccttccggcccgggctctcttggggaggggcggggttggtgagaaccggtcacgtgctccggggctcactcggggtctcccagggccggaagtagggcccctgtgcgcaggcgccctgaggatcccgggctgcccatctcacgccagggggcggaacttcctgcagcctctctgcctccgcatcctcgtgggccctgaccttctctctgagagccgggcagaggctccggagccatgcaggccgaaggccrgggcacagggggttcgacgggcgatgctgatggcccaggaggccctggcattcctgatggcccagggggcaatgctggcggcccaggagaggcgggtgccacgggcggcagaggtccccggggcgcaggrgcagcaagggcctcggggccgagaggaggcgccccgcggggtccgcatggcggtgccgcttctgcgcaggatggaaggtgcccctgcgggrccaggrggccggacagccgcctgcttsagttgtatcctgttctgttctgttctaggaggttctggtggcgaggtgggggccgtgagacggagacaacagggtcaagaggtggggggcagggccaggaggtgggtgagggcagggccaggtgcggaaggtggggtttgggagatgggggtaaggcgccgggtggggtgggggtgggggctgggagttggaggtcgaggggtggctcagaggaagggagtaggtaggggatgggaggtggagcgtgtgcacagttgggtgctgggcgatggggtgaggggcagggggacaggagacaggggttcttgggtgtgtgaagggatcaggagttggggggaagcgtgcaaggtgggagccggtggctggggtgtgggctggatgggggtggtgtcaagcgatggggagaggtcccggctgatgcggcagggggcatggtggggagggccttggaagggcacgcaggagtcagcttgaggtgcaacagaggaaagtggggaatcaagacagctgggtggggttgctgcaggacctgggccagtgcgtggggagacagcctgaggggatgagatgggcaccggccaaatcctaggagatggcaccttaactgggtccccaccaggcacatcacgatgcctttctcgtcgsccatggaagcggagctggtccgcaggatcctgtcycgggatgccgcacckctcccccgaccaggggcggttctgaaggacttcaccgtgtccggcaacctactgtttatgtcagttcgggaccaggacagggaaggcgctgggcggatgagggtggtgggttgggggctgggatccgcctccccggaggggcagaaagctagagatctcagaacacccaaacacaaggtctcagaacagagacctggtacaccaggcccgccgccacccgagggagcccagggagatgggtgcagaggtgtcgcctttaaygtgatgttctctgcccctcacatttagccgactgactgctgcagaccaccgccaactgcagctctccatcagctcctgtctccagcagctttccctgttgatgtggatcacgcagtgctttctgcccgtgtttttggctcaggctccctcagggcagaggcgctaagcccagcctggcgccccttcctaggtcatgcctcctcccctagggaatggtcccagcacgagtggccagttcattgtgggggcctgattgtttgtcgctggaggaggacggcttacatgtttgtttctgtagaaaataaagctgagctacgattccgtgtctgagtctcttttcggcgagcgaaggcaccttcggacttgcatgcccttgtcctcgggttgcaggggaggctctgggattcacagattgaagtagcacaaggtaacgggaggcaatttgggaaatgggggaaaatgaaaagccactgggtcccgccattcagcattaactactgtggacattttagaatattttcctcaatatacttgcatttatatgttaaatatatgacagtagcatatataatgtttttccaggtcagcattaaattttttcccaaattgttttcattgaacatatgagcttttgtgctttctaaaaatgcttcaaaaacatgtacttgaatagatgcataaaaccagcattatttcactgttaaacatgtgatatgggccgggcatggtggcccacacctgtattcccattgttctgggaggctcaggtgggaggatggcttgagacctgcagttggaggccaccctgggcaatgtagtgagattctatctctataagaatcatttaaaaattaggggtggagggagtggtggcaggaacctgtagtcccaggtactcaggaggctgacgtgggaaagtggcttgagtccaggatctcgaggctgcagtgagctatgaatgcatccctgagctccagccttggcgacagagcgagaccctgactctaaagtaataataatagtaaatgtgaacagcgtaaaatgtttgtaaacacgtaatgttaacacagattctcttactgcttgcagagtctaatgaacaagagcaaggtttcctgtaaagaaactgactttctgccatgcttggtttaggggaagacgtacaggctcctgcctttaagagcactgcttcccattgggggcagaaagcagggccttttaaaggaggacttggcgtgaatggtaggcaggggagggagcaggcagctgtggggtctgcatgacatgctgaggtgtcttgtctgccgggaggtcacgctggcaccatcttgggcagagctaggttggaaaggggctgtttgtcaaagcaaaacagacatatgcttgagctgtgttctgggatgctcttaagttgctcggagacaacttgatccctttgagttttgttttagcatttgctcggtgggaacatagcagattttaatgtaagattaataatattagttgacaatctccaatgcttggcaaggctgtagttggaaacgaggactcatacactgtcagtaggagtggtagtaacatctatctggacatttatttggcattttctattaagggaaagatgtacattcccttccacccaccttgaggaatccatctgagaaactcctggatatgcaaatgaggtagaatccaccagcatcttaatgacaccaccacgtaaatagtttttagaatgtaaatgtccaccagctgcggaaaggctgaacaaatcactgcacaactgaggaaggcgaggggggttggtacatccaggctgtgccaaagccggttctgtctcagagcagaggagtttttccaagagacgtgggcacgctgtgaggaagtcccagcaggaagccaggcgaatgccacctccgcatgcctgccccggagggtgtgagcggcttccttctcctctggatcggtggtgtgttaggagaggcccggctctctgtcaaggccagggacggatggaagctgagagaggacgctgagacctggggagcttcctggaatgcagggacgcagtgaactcgctctgtttcagcccgaggtgcgcaaaggaaaactgaaagaccagcagcaatgtcagagagaccttcctgtcatgccagcgggattccttgggagccagtgagcgctccagcccttgagggctctgtcacagctggtgggagcatgggtcagggctgtggcagaacacaccccagcctcaggtgaagaggtccctaatgcttccctctagccctcatattccagaattccaagtcaagtctgaagagtccacttaacttccgtcctctcaaacatgcagagtggtcgtcacacgcggttagaggagtttgactcctggtgaaacggggaggcccgggcaaacctggccacgagtccagcatgtgcccgccccagcaaggtcaccgtgccccaggggaagcagcaccgggagaggtcaccatgccccagggccgcgaccctggccgggctgactcagaagtccagctgcattgcagctgtaactgcatccaaacaactttgaccaggtgctgagccactggcccctgcagccaacatcacgggcacaaaagcagaagcccagggagcaaagatgaagatccaggagcacagtaactgtcaggtagggacctgctggcccactgagtctgggagcaacaccacaggcgctgcagggagacccccggagtgacccggggcctgtctccagagggcggcccttccttaattggagctgcctcttcccctcctgccctaggatgtaaaccctgcttggctgaggtattgaattcacggggaatctgaccccgctctgcccatgatgctcatctgtcctctggggcctcattccctgagcttcccagagcggcctcctttgtttggctcagctctgtgtcttccttcctgaagctgtgtctccagtgtgttaggcttcccctctcttccctcaagtggcctcaagggcccaggaggaaacgcaagagggcaggagggctccctgaggtggagagcagacagagagcaggttctccttctgccctgtcttgaaagatgcccccaatttacacccacacgggcgccggagtggccaggttggtgaggagggggaatgggcgaggctcccatgcagacacccagagaggtgagtccctgagatggagagaaaggagtatccgcgagcgcactgccctgtgggagagggagaatctcgctgtttgcagagtcagccgtgtggaaggctgcggccatctgtttttgcgtgtgtacctaccgaggcaagaagatcgcttggggtcgagagtttgagaccagcctgggccacagagcaagaccctgtctctacaaaaataaaaaaaatttttttgtttttgagacggagtctcactctgtcgcccaggctggagtgcagtggcactatctcagctcactgcaggctctgccccccggggttcatgccattctcctgcctcagcctcccgagtagctgggactataggtgcccgccaccacgcccggctaattttttatatttttagtagagacggggtttcaccatgttagccaggatggtctcaatctcctgacctcatgatccgcccacctcggcctcccaaagtgttgggattacaggcgtgagccaccccacccagccaaaaataaaaaattttttaaagtgacatttgagacgtacttttaagtgaagctgatgtgtttggtgttattttcttgcagaaagtgaggggcattagtgtaaaggattttggaagtgtttaaagaaacaaaagggagtgttgagacgccatccacccctgagagaagctgcgtggtattatggcgggtgggggcaccaggatgggtggccccacttctggcctctgacttcctgagcctcaggcccatgtgggcccaggcagggcccggcaggccgggctgcccagctcccctccactgtcccctctgccaccagatgccatccggcagagcaaccagattctgcgggagcgctgcgaggagcttctgcatttccaagccagccagagggaggagaaggagttcctcatgtgcaagttccaggaggccaggaaactggtggagagactcggcctggagaagctcgatctgaagaggcagaaggagcaggctctgcgggaggtggagcacctgaagagatgccagcaggtagtcggggcagggccaggttctgaaaacccgcggtgacgccagtgttccacaagggaacccgtggtcggggtcccccaaagcaccctggggctcagtgctgtgccgggagggctcggaactcagaaaagccgtcacactcccagttccggtttattacaaggaaaggacacaggttacggtgagcgaaggctcagggcgcacagggcgggctccaggagagaccaggcgtgagcttcagcggctcctcgcccaggggagttgtgcagacggcacctgtttctttcggcaacagtgtgggacagcgagcacggagtcacaaccgggaagctcaccccagccgtggcggccggggttttcacggggggtgggccgcgtgggcaccgagcgcctgcgtggccaaccctggtcactcggctgtagccaccagaggtccagctgtgtggcccaaggctccccccataaatcgtgtcattagcacagaccgcctggtttcagggtctttgtgtgtgggcttggctgatcgcaggatcctggcgatggtagtcaggaaggggccgtgctccctttgaggggcaaggtggagagaagtgctggagaggagacttgctggcgggtacctggcacttgccacagccaggctccactcccctggggaaaggcgtggatggtgggctgtgcacgccgctccactcagggcttagagcgcctggcttaaggcgttgatttcctgtgtgggaagtggatgagttttctacagctgccgtgaccaagcaccacagactgcggggccgaagccacagaaacgcgtggcctcccgcttctggaggcctggaggctgagctagcggtggtgtcggcagggtgggctccccgccagggccgcgagggagctgccttccaggcctctccacggcgccgggggccgccggctgcacctctccagcctccatctccgtcatcctgtggccttgtccccgcgggcctctgtgcctgtcctcctcttttgacaagaacaccggagatacacaaaggtacacaaaagcgggcctttgttcaagctggcaaaagagatcttcttcagaaacccctgcttgcgggggagagagctgagctccgttcccgccccagcagaggcggcctggccttgcgaagggagaaggagggagtcgggagggggcgagtgcaggctcaggtgaaagatgacggggcagccagcgtccttgccgcgaggccagccgtgtgtgggagctgccggtgcttaccaaggttgggatgcttccgtcccgtggagactgggagactgggccccgcgcctcctgaggtttccgtttccaaggagtggctgcggggccctcgggaaagcccctgggttgtgggtgctacacagatgtctcaaagggacagggtaagccctttgtagtaaatgctgtcagaaagggaggtcaggtgttggccggaacagacagtacatgctctgggcagccctgagcgtttccagacgggaactcactcaaaagggggctggggcgtcccaggggcgcggccttaggctcccagaggccccgcgaggtggtggccgggtgtcttcgggcaggggtttgagtgcagtgtgcctgnnnnnnnnnnnnnnnnnnnnnnnnnnnnnnnnnnnnnnnnnnnnnnnnnnnnnnnnnnnnnnnnnnnnnnnnnnnnnnnnnnnnnnnnnnnnnnnnnnnnnnnnnnnnnnnnnnnnnnnnnnnnnnnnnnnnnnnnnnnnnnnnnnnnnnnnnnnnnnnnnnnnnnnnnnnnnnnnnnnnnnnnnnnnnnnnnnnnnnnnnnnnnnnnnnnnnnnnnnnnnnnnnnnnnnnnnnnnnnnnnnnnnnnnnnnnnnnnnnnnnnnnnnnnnnnnnnnnnnnnnnnnnnnnnnnnnnnnnnnnnnnnnnnnnnnnnnnnnnnnnnnnnnnnnnnnnnnnnnnnnnnnnnnnnnnnnnnnnnnnnnnnnnnnnnnnnnnnnnnnnnnnnnnnnnnnnnnnnnnnnnnnnnnnnnnnnnnnnnnnnnnnnnnnnnnnnnnnnnnnnnnnnnnnnnnnnnnnnnnnnnnnnnnnnnnnn

SEQ ID NO: 8836 - DNA, 16175 bp, Homo sapiens
gcagactcagttcctctcacattgctttcagtccagctttcctggcacccttactgattctccatcttcatggaacaccctgtccctgtggtccatgttcccaggttgctcaacattaacctccatactctctgggtcttcttttctagcttctccccacaatctgtctttaagaatttgatccccaacccgttctgagtcattttcctcttcctcgtatttctttagcatccaaggggcatagctgtgtctctttctcttttctccttttcctctgtctcttctcacctttaatttccaaataggtaactcaggtattagtgtccctgatggtttgccaacccgtgtgacatctcttgtccatgtatccacagttgctggaagtgcaggtgcgggaatctctggcaaagtccagccaggtggccattgaggctctgtcggccatgcctacagttcgaagctttgccaacgaggagggcgaagcccagaagtttagggaaaagctgcaagaaataaagacactcaaccagaaggaggctgtggcctatgcagtcaactcctggaccactagtgtgagcacctgaagatgaatacccattcccttgtccttaagatgccgtgactccattcccattcctatgaccctgctcccactcctcctttactgggaaatggttggttcagtattttcgtcctagcaacctgaggctcaatgactctactcagtgtccctagccccctccctctctttaaagatgctaggtggcttcctttcagtatggtacataaaatccacccaaccatgtggattggagagatgcgtgtcttccagtcctagggccttcctttgcctctcaggggaagtgcagggcgccataaattcttgcacctgggactgcttcatgctggtaccttgtagatttgttagtgagagtgatgggaatagtggaagccagggatgagggacatctgtgatgcactggaaagagagctacgccagtgatccgaagatcctggcttgatgatgcaatttacttgtcttgtgatcatgacaacaaatttaccttctctgagactgtttcctctttatttatttatttgtttgtttgtttgtttatttttacttattattattatttttgagctggagtctcgctttgtcgcccaggctggagtgcagtggcgcgatctgggctcactgcaagctccgcctcccgggttcacgccgttctcccgcctcagcctcctgagtagctgggactacaggcacccgccaccacgcccggctaattttttttttttttttgtatttttagtagagacgaggtttctccgtgttagccaggatggtctcaatctcctgaccttgtgatccgcccacttcggcctcccaaagtgctggaattgcaggcatgagccactgcgcccgactggttgtttcctcatttttcaaaaatggagtgatataaccttctttataaggctcttcatgtattagctgacatcacatgaatgaaagccttttgtgaagagtaaaatgctccccagacaaggtgatagtggtgatggtggtgaagataactgtgacttgcatgatgtgcattgagtcagactccatggggtctctggttcattctcctgtctgcctattgagcctgccgatgtcacttaggagacagggacttgatatttccttcaggttaatgactgtggttctttgtgtcccctccagatttctctacctcagtccctttttttgtggtctctttatagatttcaggtatgctgctgaaagtgggaatcctctacattggtgggcagctggtgaccagtggggctgtaagcagtgggaaccttgtcacatttgttctctaccagatgcagttcacccaggctgtggaggtgaggtccctccaccttcactccccagtgtgattccttcctctggcccagcaccatctgtgtgatgtccttccattctttacccttcttgcttcacataatgctggcaagcagactacctcactttcactattcttacctccctctaggtactgctctccatctaccccagagtacagaaggctgtgggctcctcagagaaaatatttgagtacctggaccgcacccctcgctgcccacccagtggtctgttgactcccttacacttggagggccttgtccagttccaagatgtctcctttgcctacccaaaccgcccagatgtcttagtgctacaggtacaacctaccactccctgtattccactggccccaactgcaattctgccatcctaaattttcttcctgccttcagcctgcttactgccaagcatatatcctccctaaccctttaaaggcaatggtaggcatcatctgttccataaatcttccccaaactcaagaacccagtttgggcttccaaagagaatgagagaagaggtttcgaagagagtgctctcacgttccaaggaattgctgcagcaaaatctgtgtcttcggtcttccatctttccttttcctttgtaatttggaatgtgatttttccctttcctggtggtatctgacatcaagtgtgtggcatagtggtgctgggtctctgcccttgtctttgccgcttcttctatctctactccttggggaggcatcacccagaaatctgtgcatgtgggagggtaggagtttctatatttccctgtttttcttctggggtaagacatcatgctatgtaacaaggcaatgacactctcaaggttagaggccttggtagcctcttatcgtgtgcttctctggcctctaggggctgacattcaccctacgccctggcgaggtgacggcgctggtgggacccaatgggtctgggaagagcacagtggctgccctgctgcagaatctgtaccagcccaccgggggacagctgctgttggatgggaagccccttccccaatatgagcaccgctacctgcacaggcaggtatggaagcaggtggcttgaaggagggcagggagcatcaaatacgaagagcattcttactgagcactctgaaagaggggttagggaatgataagagaccttgggtggagatggtggtgtagtcaggagggaggtagtatgattttgtgacatgttctcaataaagattttgagtcttcgatctctagataaccatactcccatgtgccttgttctatgactcttcatcatatttcatctcaggtggctgcagtgggacaagagccacaggtatttggaagaagtcttcaagaaaatattgcctatggcctgacccagaagccaactatggaggaaatcacagctgctgcagtaaagtctggggcccatagtttcatctctggactccctcagggctatgacacaggtactctctccactcatctcaccacccagccatctttacctttgctgaaaccccagtagtcttgcctttatccttcagttcctccttactcatggacatcaatttgaagttgtaagatcatgctcctatggcttcttcatcctgacatcctcaggattctgttcatcttcccagaatctcccctatccagctacaaccgtcagatcttggtgtgtgtgagtgcgtgaatgcatgagtgtgtctgtgtgcatgtacatgcgtgcacacatgtggctataccgttctcatcttggccctttgctctgcagaggtagacgaggctgggagccagctgtcagggggtcagcgacaggcagtggcgttggcccgagcattgatccggaaaccgtgtgtacttatcctggatgatgccaccagtgccctggatgcaaacagccagttacaggtgaggcagtcatcttcttaatggctatatcccacccaatcttgcttcttttatacatcttctgttagttttactaacatcataattatacaaaccagtccttgcagttctcagttcccaaatccagttccattggatgcctccccaaggagtagagatagaagacgaggcaaagacacctagaatcagttaaaagagactatctacaaactacagactgaatttctttctttctttccttttttttttttaagacagtgtctcactcagttgcccaggctggagcgcagtggcacaatcttggctcactgcagcttcaacctgctgggctcaagcgattctcccctcagcctcccgagtagctgggactacaggtgtacaccactatgcctggttgacttttatatttttagtagagatgggtttcaccatgttgcccaggctggccttgaattcctgagctcaggtaatctgcccccctcagcctcccaaagggctggggttataggtgtgagccactgcgcccagtcctatagactgaatttctaaagcgaaacataaggaaaagaccatcctcataatatcgtttatttaaaaaaattattttttgtacagacagcgtcccgctatgttgcccaggctggccttgaactcctgggcccaagtgatcctccctccttgacctcccaaagtgctaggattataggcatgagccaccgggcccagcccatcctaatcatattaatattaattaagctagtctgtttacatgcactgtcactcatttattcattaggaatccttctgagctaggcatttatcatcattctacagatgacaaaatggaggttaaaagaggttgaataagctgctcatatagaggtcatatagcttttgagtggcgcagccttgacccaaattcaggtctgcctgacttgaatgctcatctctttactactaagttatatttccttaaaatcgaatataaaaatgccaagtccatgggtagagaagaggactattcaatagtctttattcttctgtcacgtgtttcaccctagggttctcatttttatcctacttttgcacccttcatgtaaaacagtccttaatgaaacaaagggtttgcggagaagtactcagaatgggaaacgttggtgtccttggggttgttagcagagccagcagtgatcctgtgaggtcagtcccagccctggaaacacaggtgtctccctgggctgagggtagtccccggctctgacggtccgatgtctttcctcaggtggagcagctcctgtacgaaagccctgagcggtactcccgctcagtgcttctcatcacccagcacctcagcctggtggagcaggctgaccacatcctctttctggaaggaggcgctatccgggaggggggaacccaccagcagctcatggagaaaaaggggtgctactgggccatggtgcaggctcctgcagatgctccagaatgaaagccttctcagacctgcgcactccatctccctcccttttcttctctctgtggtggagaaccacagctgcagagtaggcagctgcctccaggatgagttacttgaaatttgccttgagtgtgttacctcctttccaagctcctcgtgataatgcagacttcctggagtacaaacacaggatttgtaattccttactgtaacggagtttagagccagggctgatgctttggtgtggccagcactctgaaactgagaaatgttcagaatgtacggaaagatgatcagctattttcaacataactgaaggcatatgctggcccataaacaccctgtaggttcttgatatttataataaaattggtgttttgtactgtggtttcttatgtttccggcacaccaaacggcccactgccttttgcagcgcacttttcagctgcggatgtctcctcttttatcatcctcaatgttttaccccctaactgcatcaccttttcccttaagctttttaattcctatgaggccccttccacttcccctatccccttaggcccacccccaagaatgtgcaagaccccagccacagggcccatcagggcactagcggccgcagctcagagccgtggcctctccgaagtggcagatggggcgggcgcggccagagcaagtgccaggcgggaacagagggactgggcgcgcctcacaactcaccacctcgcccgctggtccttcctggctcgcctggctctgaagctgcacctggaggggaaacctcararcagtaggcgggattgcctagtaaatatctcccattcagggaggcccaggtcrtgtgacgtcgacagttgctgggtagatgaggccaacacaggttgcaagaagaggcggggtttagaggcgtgaaactccgcagtgctcagccaagcagggagcaacgctaggaagggcgggcagaaagggcacgctcttgtgggtgactacaggttaggagaccgttgaacctggaggggccctaggatggaccccgtggaaagattcagagactgcgccctctccctggcgccgccttcccctacacgcggcgggtatattctgttgcagttggcccaggacctgtttccaagactctgccccctcgcacttccgtccctcctggttttgtaaagtgatgctcataggaacccccaccccgcgtgacactactcccagctcctggctgacttctagtcttctggttgaagctgcgcctttagatgacacgaccctacccacccctgtttccagcggatgcccgggcctggaggtacctcttactgtaacccatcgccaagtgggcttttgaaggcgcctgttcctttctcgctttcttcggaagacccttgacccatcattcccccgacccccataacgggagagcagagaagccggtccccagtgtgatggtcctggtccaggcactaactgtccttttctcggaaaaggcagggggatgtggaaaagagtcttgttccctccccttcgatctgtggctttcgctttcacttcctcctccgagagcggacagatctctgggtgctgggcggtcatggcgctactagatgtatgcggagccccccgagggcagcggccggaatcggctctcccggttgcgggaagcgggcgtcgctcggacccaggacactacagtttctctatgcgatctccagagctcgcyttaccccggggaatgmaggtcggggcagtagggaagcccctagggatgcagggaggcgggcgctgaggagtggagggtcgcctgagaggaggaggcgagagcgggagcgcggggkacagggtcgggggtagccttcagtcccggagagcgccagacccaaagaagaggccacatggggatggggcctgagaggaggaagtgcaagttaggacaaagagttacaggtgaggtgggggctcccaaaggaagacaagagaacttycctgcccttgtccacacacaaatggtggagcctttttcatggggttatcacatgatataggaggtgtgtggtgtcttgggaaacctatgaaatttgcctgctggcctcctctcagcaactcactgttgcgcgacttagaacaagtcacttagtctaggtcccaagcccctcttctgtaaagtgaggatactgttactaaacgtgttttgtgagggttgaatgctttatgcatggaagaaaccctttaagtcactctcaaaattttttagtaatggtaacatgtgcttgctttcatttctgttgtgctggaaaatggaaaaggttgatactggcatgcctcttcttttccttctcccaagccatttccttctagagattggttattaactgtttcatttattgatggttagatcatttctgcatatctcctcaccctcatactccctaaaaccttttcctggagcctcttactacagaatttttcattgcctttctcaacctcttttctcttatcagcccacagaattcttccagtccctgggtggggacggagaaaggaacgttcagattgagatggcccatggcaccaccacgctcgccttcaagttccagcatggagtgattgcagcagtggattctcgggcctcagctgggtcctacattagtgagtgtatacgctccagcaggcagaatctggggagctgggctctcctttccacaggaggccaactctgcaacaaagtggaagtggatattgatttaggacacactgggggatctatggggtcatcccttctctcccaaagctccatcttcttccaggtgccttacgggtgaacaaggtgattgagattaacccttacctgcttggcaccatgtctggctgtgcagcagactgtcagtactgggagcgcctgctggccaaggaatgcaggtaagygaggcctctcatcttcctttcttagcctagtggttaatccctggatctctcagatcattgctccttactcttgtcctatgtggtccatcttagtgctaatagtatatttcacaaaacagctttytggtgataagacccttctcccaaatctcagcctgtgctccactcataagccagatagtacgtcaggtatttagcactgacacatccaccctggcgggacagtatcatttactaggctgcctttgtatgtttcagatactttaaattccaaatctttctctgatctttagatmctacaaaataattcctttccaaygcttatctctttaatcatttcctgccccatcaagttggaaagagctaacctctctttcctcactccaccttgtcctcacccaggctgtactatctgcgaaatggagaacgtatttcagtgtcggcagcctccaagctgctgtccaacatgatgtgccagtaccggggcatgggcctctctatgggcagtatgatctgtggctgggataagaaggtgggtgctctccattcttcatgytcccccaccatgttccctatggatgacagatctgtttcycatcatatactcctactccctccctgacaagatgcatggcatatagagtgcttggttatagaactgtttcagtatatccatggactatttattggcccagatatgaatcattgcatgtgttttgtaagcttgtcccttttgttaaacagttgatttcaagtttgtttttcctttttcatttctaaagttcgatgactttaccaaagtggtttcctaattccaatgttcttgtggtaatattaattcttttgttcactttttatgtmtcatatttgaaccyccatgttaccaacatcttcctctccaatttcagcctgaaatctttcatcttatagggtcctggactctactacgtggatgaacatgggactcggctctcaggaaatatgttctccacgggtagtgggaacacttatgcctacggggtcatggacagtggctatcggcctaatcttagccctgaagaggcctatgaccttggccgcagggctattgcttatgccactcacagagacagctattctggaggcgttgtcaatagtaagagaccaatgctcccaccaccatgcctgggaggagtcggcgggtggtggggggggtgatttaagattgagaaaccagcctkgccaacatggcgaaaccccgtctctactaaaactacaaaaattagccggacgtggtgacgggtgcctgtagtcccagctacttgggaggctgaggcaggagaatcacttgaacctgggaggtggagcttgcagtgagccaagatggcgccactgcattccagtctgggccacagagtgagactccttctcaaaagaaaaaaaagaaaatgattgagagactcaaaggagggagagtagtagggaggaaattttcagagtcagaagaagggcattaaaggcccagtcatatggttttaagcttgcgcatgtgtcttgttgctgccttcaacataacatcagtgacaggaacttgctgaggtgaaaggtgactccatgttcttttctcatttgtccacagtgtaccacatgaaggaagatggttgggtgaaagtagaaagtacagatgtcagtgacctgctgcaccagtaccgggaagccaatcaataatggtggtggtggcagctgggcaggtctcctctgggaggtyttggccgactcagggacctaagccacgttaagtccaaggagaagaagaggcctagcctgagccaaagagagagtacgggctcagcagccagaggaggccggtgaagtgcatcttctgcgtgttctctatttgaacaagcatttcccccagggaagtttctgggtgccccactaagtagaataaagaaaaacggttataaatacctctgtcttgtggctgaatggggttgggcctgtggttgttgggtggggcagaaagtaaagagacgctttttctggagaaggggctcagacccctatctaagaaatgtggcctcaccacatagttcttcctggggtttccttccacactcatctctccaagacctcaggaaggctgctcattgctgtccatggacacttgtttgcaatttcacataggttagggtcctttccatagagaggcacctggggactcctgtgtgttccattgttaatggtttgaggaacagggagtagggcacctaggataactgtttttgactttatagagtaggatgaaaaagcttccacttcactttaatatggtaatcatataaacaccataccatttatcccaaataacactttggagatattggatattgaatataaagacagacattaagggtctaatttcatgatgtgtcatgctgaattgcaagatggcaggactataattttagaggaagaagagatcaggaggactcccctaagtgaggagtgtggggaaaatgtaaaagatccaggttagaagaaagagacacacatcatgagattttcggaatcatgctggaactatggaccatgtcactttccagaaaataaaggaaacaaatgcttgaaagtaggagcatgagcttgagcatggagcttttttcattagagagagattcttaaaatgccagaatgaatagagttgtaaaactttagcgagcccctacttaaaatccctcctccccaccaccactattttaaactttaagtgactccttggtagtcacacaggtaacatttcaaaatggtgatctggaatccaagcgacccttcctttggggaatttgtttgtttgtttgtttttagtttgggaggtggtttcaatctgaagagtcctttctggaataaacgaatctttctgttgcataggaaggctctgggtcaggaaggatatttaaaaacctaattactgttctaaacagtgttaaaatagaacaagaaccaaagctcagtacggggcatttccctcataggctgaaggtgcgcccaacataatttggagtacagactcagaggcacctgaacacgcgccagctcaaggtgctccggctgagaaggacggatgaagatgaacgctcagggcctactaaattcaaagtctgtacgtgaaaatcccctttggcctggtgagattggttggaaccttctatttaggagagcccggctcgctcgcctaaaactggagcttgcatggaagagggcactttttttttttttagacgaagtctcactcttgtcgcccaggctggagtgcaatgacccgatctcggctcactgaaacctctgcctcctgagttcaagcgattcccctgcctcagcctcccgagtagctgggattacaggcgtccgccaccacgccctggctaatttttgtatttttagtagagacagggtttcaccatgttggccaggctggtctcgaacccctgacctcaggcgatccgcccgcctcggcctcccaaagtgctgtgattacaggcgtgagccaccgcgccggaccagaaagaaggcacttcttaatagtaggctcagagcttgaagtagtaactttgagaaaattcagtgattctccaattacaaagcattctccaattacaaagcaaggacaacagataaagttgcccttgagacaactgtattttacttaatgataaagaaacatttttgcagttttatatcccagagtaaccgccactaaaggcgagtgagactcattgcaggcctgtacagtgcgaaccagagttcgggctccagttccgctgtctgcgggtctcgcgcgccccctcccggcggcccagcccagaatgaaggccttggctggggaagcgaaagcgaaagctgcccgagccctgacgcccgccctggccgagcgtagctggcggaccagagccggtagcgaggttgggagagacggagcggacctcagcgctgaagcagaagtccccggagctgcggtctccccgccgcggctggtgagttggtgcggaggggaacctggagcgccaacagggacgcagcccaagtgactacccactccacgctcctgcttcccagtccctctgcacccggcgataggagggagcggagcccggaccacttagctcgccgcggcaggcgggggtgggggtgggggtccggggattttttttttttttttttttaagcacgaggctcctgatggtcatgcttccagctccccagaaggccgaaagctgtctgtcgtaggaggggtgtacggatgagcaccggttactcaggagagctctcagggttgaataggataaaatgagaagccgatggacgggttaggcggagccgggcgggtaggagggcagggacaaggattgggactccacccccatgatttctcatctcgtatccgttgacagagccatgcggctccctgacctgagaccctggacctccctgctgctggtggacgcggctttactgtggctgcttcagggccctctggggactttgcttcctcaagggctgccaggactatggctggaggggaccctgcggctgggagggctgtgggggctgctaaagctaagagggctgctgggatttgtggggacactgctgctcccgctctgtctggccacccccctgactgtctccctgagagccctggtcgcgggggcctcacgtgctcccccagccagagtcgcttcagccccttggagctggctgctggtggggtacggggctgcggggctcagctggtcactgtgggctgttctgagccctcctggagcccaggagaaggagcaggaccaggtgaacaacaaagtcttgatgtggaggctgctgaagctctccaggccggacctgcctctcctcgttgccgccttcttcttccttgtccttgctgttttgggtgagtcaggagaggacgttgtgagttggaggtggtaaaagggcctgggcaccagcacattcttgtgttatttttcatgcctctttcaggtgagacattaatccctcactattctggtcgtgtgattgacatcctgggaggtgattttgacccccatgcctttgccagtgccatcttcttcatgtgcctcttctcctttggcaggtaggtggtgggcagctgggtccatttgctagccccaaatctttataggggtcttcacttccctaactccatttctaggccctttcaggcgcaaaacacaaaaatacttaaactaaaatatggtgaatgtagtcaccattctgtttcatctatccattcatttcttccttcgttcatattcatccaatatcttcaaagtttatctgatcttattataggaacaagttatgagtgaaggtagtacaaaaggaatttaagtctcagatggaatgtctctcagttgtctctcaacattcctaggtccatgaaattccatttctttctgcctcctacctcctacccctaagtctgtctccaaagtatctctccagggtcactctctcaggatgggtatgcttctccctctcactcttctttcccagctcatcttgctaatccctgaagatcttactctgaggcttatcacctttctttccagaatcattactcttttcccttcacttgctttcctttctctttctagacatactcaaacaaacaaactgtttgataaggctgggactgggatgaggtgagcgaggcacctggggtgcaaagtttaaggaggtgtgcactcaccttacccaaatcccagccggcctgattgtctctatttttatggtcatacttaatttagagtaccctcgaaaaccatttcattgtgccttcattccatcctggctgctttctgctgaaactacagtcgtgcactgcataacgatgtttaggtcaatgatgggccacatataagatggtggacccacaagattataataccatatttttactgtaccttttctatgtttagatacacaaatacttacttctgtgttacagtcgcccacagtgttaggtgcagtcatatgttgtacagatttgtagcctaggagcaataggctaaactacatggcctaggtgtgcagtaggctatgacatctaggtttgtgtaagtacactctatgatgttcatacaacgatgaaaccatctaacgacacatttctcagaacacatccctgtcattaaagtacaaaccctcattatatcatgtctgactattccaaacgcctcttcaatatggtaactaaatttgtattagaaacatatattttgtaaaatacatgcttttatgctttatattttttcctctaagtgttactgtagcatgtagttggtctaagagggattttccaactcgaaggatgacagatgggaatcacatgactctggggctccagagaattgtgggggcagggaatttattattgcagttcccatgatgaagtatctatgatgacagagaagggctttgggtatggggcaggaaggagaccaaggcggaggagacgcacagagggacaagcctgagggacgctgggacagaagcaagcactgggatacttgttttcacaatatcttttcccttctattgtagtcttctattgtgtctagtacagagtgcactccataaatacttgtaaatttgtacatgttatgattttgttctcacatctagctcaccatgtctcctctttcttcttcctctgtgtattccttacctcttctctctctgtgtgtctgtctctcatttctttctcttttgcccctcctggcatgctttcccctgactttgcgcttctctgcactcctggcttgctcctctgtttcacccgctggcttgctccttctctgcatctccctcccctcttattctcctaccccacagctcactgtctgcaggctgccgaggaggctgcttcacctacaccatgtctcgaatcaacttgcggatccgggagcagcttttctcctccctgctgcgccaggacctcggtttcttccaggagactaagacaggtggggcctggagtccaggtctgagattcccatggacatcccttgcccctcagtgaccttccacccacagcctctcctcctgccttcacccgtatgccaggacctggggatgcttttctcttgtttgggacagggtggagaagcagcctccactgtccctctgcaagtgaaggaggatgttcagaggagggggctgtgtcagagggaacggtcaggagggagtttctgggggccctgcagtacacatggtttcctttttcctcacctgctctgtccttcttaggggagctgaactcacggctgagctcggataccaccctgatgagtaactggcttcctttaaatgccaatgtgctcttgcgaagcctggtgaaagtggtggggctgtatggcttcatgctcagcatatcgcctcgactcaccctcctttctctgctgcacatgcccttcacaatagcagcggagaaggtgtacaacacccgccatcaggtgagcgtgcatgtaagggaaccccaaagggagaataaaactgacaggtgaggaggcttccacatttgtggctagaggatcccctagagagagatgttctcttctcagccattaggggagaaggtatattgtagtatatactacattttgtttgtccagccatccaacaatggatatttgacttcagaagattcatgattctccagaactgtaaacaaaaatgtaaagtgtatgtgaaggtatgggggagggaataggaaggggagatgataggcgatgataacttttcattagcttctcaaaggagtctgtacatcccccgcccccactgcgaagattaaaaatggtttcttagaggcttttaggcagggagattttccctttaaaatcagcagaagaagtctggatgcagcatagggaaaggaggcgtcatca

SEQ ID NO: 8837 - DNA, 19876 bp, Homo sapiens
ctctttcagagtgctcagtaagaatgctcttcgtatttgatgctccctgccctccttcaagccacctgcttccatacctgcctgtgcaggtagcggtgctcatattggggaaggggcttcccatccaacagcagctgtcccccggtgggctggtacagattctgcagcagggcagccactgtgctcttcccagacccattgggtcccaccagcgccgtcacctcgccagggcgtagggtgaatgtcagcccctagaggccagagaagcacacgataagaggctaccaaggcctctaaccttgagagtgtcattgccttgttacatagcatgatgtcttaccccagaagaaaaacagggaaatatagaaactcctaccctcccacatgcacagatttctgggtgatgcctccccaaggagtagagatagaagaagcggcaaagacaagggcagagacccagcaccactatgccacacacttgatgtcagataccaccaggaaagggaaaaatcacattccaaattacaaaggaaaaggaaagatggaagaccgaagacacagattttgctgcagcaattccttggaacgtgagagcactctcttcgaaacctcttctctcattctctttggaagcccaaactgggttcttgagtttggggaagatttatggaacagatgatgcctaccattgcctttaaagggttagggaggatatatgcttggcagtaagcaggctgaaggcaggaagaaaatttaggatggcagaattgcagttggggccagtggaatacagggagtggtaggttgtacctgtagcactaagacatctgggcggtttgggtaggcaaaggagacatcttggaactggacaaggccctccaagtgtaagggagtcaacagaccactgggtgggcagcgaggggtgcggtccaggtactcaaatattttctctgaggagcccacagccttctgtactctggggtagatggagagcagtacctagagggaggtaagaatagtgaaagtgaggtagtctgcttgccagcattatgtgaagcaagaagggtaaagaatggaaggacatcacacagatggtgctgggccagaggaaggaatcacactggggagtgaaggtggagggacctcacctccacagcctgggtgaactgcatctggtagagaacaaatgtgacaaggttcccactgcttacagccccactggtcaccagctgcccaccaatgtagaggattcccactttcagcagcatacctgaaatctataaagagaccacaaaaaaagggactgaggtagagaaatctggaggggacacaaagaaccacagtcattaacctgaaggaaatatcaagtccctgtctcctaagtgacatcggcaggctcaataggcagacaggagaatgaaccagagaccccatggagtctgactcaatgcacatcatgcaagtcacagttatcttcaccaccatcaccactatcaccttgtctggggagcattttactcttcacaaaaggctttcattcatgtgatgtcagctaatacatgaagagccttataaagaaggttatatcactccatttttgaaaaatgaggaaacaaccagtcgggcgcagtggctcatgcctgcaattccagcactttgggaggccgaagtgggcggatcacaaggtcaggagattgagaccatcctggctaacacggagaaacctcgtctctactaaaaatacaaaaaaaaaaaaaaaattagccgggcgtggtggcgggtgcctgtagtcccagctactcaggaggctgaggcgggagaacggcgtgaacccgggaggcggagcttgcagtgagcccagatcgcgccactgcactccagcctgggcgacaaagcgagactccagctcaaaaataataataataagtaaaaataaacaaacaaacaaacaaataaataaataaagaggaaacagtctcagagaaggtaaatttgttgtcatgatcacaagacaagtaaattgcatcatcaagccaggatcttcggatcactggcgtagctctctttccagtgcatcacagatgtccctcatccctggcttccactattcccatcactctcactaacaaatctacaaggtaccagcatgaagcagtcccaggtgcaagaatttatggcgccctgcacttcccctgagaggcaaaggaaggccctaggactggaagacacgcatctctccaatccacatggttgggtggattttatgtaccatactgaaaggaagccacctagcatctttaaagagagggagggggctagggacactgagtagagtcattgagcctcaggttgctaggacgaaaatactgaaccaaccatttcccagtaaaggaggagtgggagcagggtcataggaatgggaatggagtcacggcatcttaaggacaagggaatgggtattcatcttcaggtgctcacactagtggtccaggagttgactgcataggccacagcctccttctggttgagtgtctttatttcttgcagcttttccctaaacttctgggcttcgccctcctcgttggcaaagcttcgaactgtaggcatggccgacagagcctcaatggccacctggctggactttgccagagattcccgcacctgcacttccagcaactgtggatacatggacaagagatgtcacacgggttggcaaaccatcagggacactaatacctgagttacctatttggaaattaaaggtgagaagagacagaggaaaaggagaaaagagaaagagacacagctatgccccttggatgctaaagaaatacgaggaagaggaaaatgactcagaacgggttggggatcaaattcttaaagacagattgtggggagaagctagaaaagaagacccagagagtatggaggttaatgttgagcaacctgggaacatggaccacagggacagggtgttccatgaagatggagaatcagtaagggtgccaggaaagctggactgaaagcaatgtgagaggaactgagtctgccaagtctgggagatgagggtctgtgtagagcgggccaactccatgaacatacctggtaccattttcccaccttcttgggcagaaggaaaagcagaggcagggtgatcagggtgaccatggtgagggacactgatccccagagcatgatccccaagagacataggcctcgcaccaggtaccacagaaataagctcagattctcactcagagaatcactcagggtggacgtgtcctctgttacccgagacatgatgttacctgcagggttggggagaagagagtgaggtgaatcagacaggttccaagtgatgagacgaactaacaatgagccaggatgccagggtcaggggtgtcaacatggggttctaaggaggctgcaggaaacaaggttagggttctccagaggtctgcaaatctcagtgcagggaagatgagtgttaaagaggaaaggcctgaccttcattttaattataaagtcattaatgcacatgtgaatttccattttcctgaaagctttctgttccctagagaacctgtatgtcccatgctatacacacaggcaggaagagcttaaactggtcacataacagagatggaggaggagggtgctgctaggaagcatgccaaagtctgtggagcactcactgggactagggttctaaccccaggtctatctctagccatatgtaactgtacagcttctagtgctgctagaaagcatgccgaagtctgtggagcactcaagagaccagggttctaaccccaagtgtgtctctagccatatgtaactgtgcagtttcagcatttagggtcttggcctcagtttccttctctgtcagatgaggcagttggtctctatgagctcaaaatttccaggtttgaaattctatggtttctatctaaggatacataggaatagatttataagaaaatgctagatgaaaactctaggtttttcttaaggtaaggaggacaatattttgctcctgaggtatatcaagaatgagaaaaacaattgtgtgtgtgtgtgtgtgagagagagagagagagagacagagacagagagagagagacagggagagggtatatcaagaatgagaaggaacaatgtgtgtatgtgtgtgtgagagagagagagcggggaggggggagatcaaagcagatgtatgaggatatgaacagtacatggcgtataatgaaagagtttcaggagaaacctgtctggttctgttggaaaaactccgtctcctggcgcaggacagccccaaacacctctccctgcaagtggctgtgcacgtggcccatggtgttgttatagatcccgtcacccacgaactccagcactgcactataaagaacccggaaaaaaaggggatcagggtgtgttcagggaacagactgaaggtcccaggtatccccatataagtgcatttcggacagcagccccaacttccaactccctcatttgcagggtgccccattttcagcccccagacctggctatggtgagaatggacatgagagttaagtttcgagtgaaggtatcggctgagccatcttgtagaatccagtcagtgaggcggcccgtaaagaatggaatggccatctcccctggagaaagagaagagaggtcacgcacaaatattaagtctaagtaggtcagttccagtcagactggccccaccacgcctcctccccctcaccattatcctggagggcatcagcagaaaggaaacactgacgtctcaatcccgaacctaaataggctgccctggaactcactaccctgtggttgctctaccagaactttcaggattttattaggaaggctggagatcatgaagtagaaaagcctcctgttagagatgaggatgccccgcccttcggccccagagcaaaggatttccccgcttccggcgtggcccaaagaatcaagacccggtcagcaatggagcccagaacctctggcccccgccagtccagtgccgtttcttctacaccgaagtggtgttccaagacccacgctaggagtccttctcctgctccacatttcccagaacccacgctactctaccttactgacaattacctttgattcctgtcccagtccccttgtgtcctcccctcttgccctgcgttccccttaccaagagaggagaggaccaccaggaccaggaacagcgagaggcggcgcgtctccgagcccaggcagcctagaagccgacgcacagggtttccagagccgccctgaccgccgggcacccagaggctcccgagtttgtgccacagggctgctgcgggcagtgccgctgcataactgacaacgaaggcggtagggtgacttccccagtgcagtagcctggtgctatccgcggacccgggggctccccatgagatcagctctcggaacaaggcaagtcccggcagggccaagcccagtgccgcagctaatggcttcaaagcagccagccagccctgggcacctgcgttttcgctcttggagccaaccgttgccctgaggaccccgcaggcccccagccagagcacggcccagcggctcaggcccaccgcccagacccggagcagtggcagcgcggtgggcaccagcagggagaatatgcggggcagcgcggtccggagcagcacccagtcggcgagaagtagcagtactgtccccagccatgcgagagaagctccggggaggcagcggcacccgcggggagcgggacacctagagctagccattggcactcggacgccgtcccggtcccggccgggcctgggactctccgcgccccggtggggcctgaagctccgggtaccgccgagtcctcccctactggcggctgggggagggaacgagggcggggctctcggaaagtcccaggaacaggctgatcctgcgctggcgagaagctcagccatttaggggaaagcgaaatcgaaagcggccgcctgctcactagataacgcctacttccaaaagtggcctgcccagactattttggtagcaagcgtggaaatcagatctgagaatctcgggagcagccctggtgcccaattttctccatcacgcacacccttctcgcctctccctgcctcctgcctttccacttgcaccagttttcccaccccagcctcagggcggggctgcctcgtcacttgtctcggggcagatctgccctacacamgttagcgcmgcgcgcaaagcagccccgcagcacccaggcgcctcctggcggcgccgcgaaggggcggggctgtcggctgcgcgttgtgcgctgtcccaggttggaaaccagtgccccaggcggcgaggagagcggtgccttgcagggatgctgcgggcgggagcaccaaccgrggacttaccccgggcgggagaagtccacaccggggtaatgggtctgggcttgagggttggcagaggggtggaggagatgcagcggccaggggaccctggaagcgcgcgcggagaagtgaatgcagagaccaacgggagcgcagggaggtcgcckgtagcagccagcgcttgcaacccgcaatgagcatagagtatttcttttctgagggggktcgtctagagtgtccgtgaagggamcaggcacgcgaggctggtggaaaaagsgggtgctttgactcttagctggaagcgtcaacgggaagctactctaaagcgctttcgctttcactctggtcccggacagtgggggctggttaaatcaagaaagggggttggggatggtgcaaagagatgaggaaatggtgccctgggtgaagtagaacagcacttgggagaaggaaatataggcacttattgagaaggaccaactcatcacacagacttttgataaacttgccactgggcaactcttagcccaagcactgataatgggcgttctgtgttaactagtgatgcccttccctagcttgacccaggaaggcctctccttggcccagatgctgccttactcccttccctgtgtcttccctgcccactcccatgtgcccactggggggactttgcttaggatgggcgcctggggcagatggcagccccaagactggctggctggcttctgctctggactactgccaccactcgtggcttgggggcggctttgttagagaggaatagcctctaacttgaagttaaccctgttctttgaccctctattcatgataagtckgtccgtcggaaagcatactcagaggagcgtcctttggggccagagtaayttacggcctggtaagaaagacacagtgaaaccacttataatttgggaaatctcccctcactgccaaawgagcagtggcaagtaggaagtagaagtggaaacaagggataagagttagacctgaattttagtcccaggtctactattaactctgtgtgactttgcataagtcgtttgcattttctgtgacttggtttcctcatttgaaccgaggatctttaaggctccttccaactcaatagtagaataaatgtagctttatcttccctcacttcttcttgattcttttcttgacctggaaaagtcagcttaaacttctcagtcaaattatctcttggtacaaatttaccyccctggctgctgagatatgtatttacctcttgatcggaaattccataactgaaacttttattttcaaccatctgtatgtgttccttgctgcttctctcctgccttgcccctggccatgctaaccactgccctcctygattttttccaatgttcagtaaattggaagagctcacttctgatgaaatggggggtgagagtggaggattgtggaccaaaaaaaaaaaaatagactgaccttgtttcccaagatcatagtcaattactctgtgttgggtctacaccacatctgcacatactatgagcccttccrttggagataattttcacttgcggagctgcttcacttctacctgtaggagcctcatctccacctctctacagtggagaggattccactaggcaagttggaacttagggacacagttctttctgtgttgtatcacagctgggctgtggcattcccctgcagccggatgaagcaatagagaaagtggaaagatgaagggaaaaaaagcctgtactgacagtcagctctggcctgttactgtgtaatctttgagccagtcacttcgcctctctgggaatgtttcttcttctctaacatgagggcatcaaggctgttcttgccctgacattccatattctgtgtctctgcagaccaccatcatggcagtggagtttgacgggggcrttgtgatgggttctgattcccgagtgtctgcagggtgagtaaaagtgaagatgtatgcatttggaaagaagctaatggcctcaaatacacactttccttacccattcatgaaaagactggcaaactggagccttggaggaatggagttgaccttccccaaaagccactatgataagctatttggtgggtgcttgggtctctgaatttgtggaggaggatctggggtctgaatgtgtatrtgacctgtcccagtagtgtacagggatgagtaaaggaatagggtctgagagggggacaggagatagatttttgagggtcttctttccatctgtgcttagggatcaaaaagatgattctgtcaagcagatayctggtttctcatttaccatatattgaactattttgtctcttctcccactcctaaccaatttcctcacatgcaaaatgagtatatggggttaggtcaatattactgacattatgttccatagaacataactctctcaagattgttaatagcaaagaaaattgatgaggcatatttttcttaccttagcattttttgctttgttataaaatctaagcctgaaaaataagcctaattttgattaacatctgcagtgattaataatatctgagatgattatttgcctcctgctttaatccaagcattaaacttcatgctattctcttgtcaaagaaatttgagagacattgaatgatcaccctcaaaaattcctgagttctggttgggtgcagtggctcacatctataatctcagcactttgggatgccgaggtgggcagatatttgaggtcaggagtttgagaccagcctggccaacatgttgggaccttgtctctactgaaaatacaaacattagctgggcttggtggtgggtgcctgtaatcccagctattcgggaggctgaggcaggagaatcacttgaaccagggaggcgaagtttgcagtgagcccaagattgatccactgcactccagcctgggtgacagagtgagactgtctcaaaaaaaaaaaaaaaaaaaaaaacctgagttttaacttggtgactgttgactccctcctgacagcgaggcggtggtgaaccgagtgtttgacaagctgtccccgctgcacgagcrcatctactgtgcactctctggttcagctgctgatgcccaagccgtggccgacatggccgcctaccagctggagctccatgggtatgaagctctggagttctgactccccacccactagagctcccccaacctgcatgaatccctgtacagtgtgctgttccaggagctggacactgggaaatggaaaagtcttgtttcggctcttgctggcacttgaatctgtcagtttctgcatctgtaaagtggagataatatagyacctcatgagacggttattttgagaaccacrttctatatgtgaacacagtttaaaagctgtaaatcactatcctgatataaataatcaggaagaaggtgatattgtgacccaccataatatcaggcagttaccatacgagaaatcaaggtcgttgggayggaagtaaccttatctgcttttccccataagagcagggtccttgcagccaaaagaaagttatgtgggtggggctgagcaaaagagtgagcaattgaaagcttcttaccagttggtggtgtgggactctggttcccctgtacatgtgggagggaggctgcagtttgagctattgcagttacagttttcaggggtcgtttagcagggatgatggtaacagtataggagaatgagacttaaaattctatcaacctttattcctaatatttccctcaggatagaactggaggaacctccacttgttttggctgctgcaaatgtggtgagaaatatcagctataaatatcgagaggacttgtctgcacatctcatggtagctggctgggaccaacgtgaaggaggtcaggtgagtttctcccaaagcactctctcctctgggcttccccactctcctgcagaggaagatggaagtcctatgtcattctagcaatgagttccaaggacactacctctgaaagcatagtactttggggatatgagataccagggcttcattgcagggtgcagagaccacttaatgtctcagtgggaaggaagggcttgatgawtctttaacctgaggatccctttcccaggtatatggaaccctgggaggaatgctgactcgacagccttttgccattggtggctccggcagcacctttatctatggttatgtggatgcagcrtataagccaggcatgtctcccgaggagtgcaggcgcttcaccacagacggtaaccagccaagtggaagggtacctggggagggctttgaaacatgggaaggaagtagattatgaggaacaggaagagaaatacaggggtggccatttaagttaatgccgggcctggtacacttttaagagtgaaaaggggcaggacaaatgcaaagctcaatggggytcttgggcaatacggataaaccagggctgttctgagtaaatcaaatgaggatacacagtcactgtgagaaccagtggtgtgctaagcacagtggctcacacckgtaatgccaacaatttgggaggctgaggcaggaggattacttgagcccaggagtttgaggccagcctaggcaagatggtgaaaccctgtctccacaaaaaacaataaaaaaaagtaaaaaaaaaaatgaactgggcatagtggtgcacacctgtagtcccagctactcaggaggctgaggtggaaagatcatctgagccggggagatcaaggctgtagtgagcggtgattgcaccactgcgctgcagcctaggtgacagagagagaccctgtctggagaaaaaaaaaaaaaaaaagaaccagtggtgtgctgaggtgtgctgaggctggcttgggaccactcatgagagcggactgttaaatagtcaaggatttgtgaactgcttagctatttgtaacttgcaattcatcatagcgggagcatttacaccacggacatcagcagatgccacatatggaagcctttttgtaaaaaaactgatttaccagcacaccactaaatatgccttcctggaagatgagttttgaggtgaaagtggtagtaggcatatggatggagggggagtaaaaagatttttgaagctaagccatcctctctctccctctctccaacttgaaaccctctgcagctattgctctggccatgagccgggatggctcaagcgggggtgtcatctacctggtcactattacagctgccggtgtggaccatcgagtcatcttgggcaatgaactgccaaaattctatgatgagtgaaccttccccagacttctctttcttattttgtaataaactctctaggrccaaaacctggtatggtcattgggaaatgagtgctcagggagatggagcttaggggaggtgggtgcttccctcctagatgtcagcatacactctttcttcttttgtcccaggtctaaaacatctttcctagagaaaacaaaagggactaaactagaaatataaagagccctatacatgacaggtgatcacgtactgaatgattttgaagtagtacaaacaataaaaattctcattccgcatcatcatgcggtccatgatgatgaggccgcaagtgaggtgatgggactctttcctttaaggctaagactgacagataggcaagacacctacacacatgagaattagctaagactatcagcaaactcgcatgtaaaagaattcctttcataatgcattcattcatattaaagggcaatacatgaaaaatgcttaaatattttggggcacttgtgaatttcaaagaataatgacaataaccaaaagaagctacatttgtggcattggctaaatgttttataaattttatctcttaaaattcaaaccaaaaaaccccctgtaytcacacctgtaatcccagcactttgggaggtcaaggcgggaggattgcttgagcccaggagttagtgaccagcctgggcaacatagtgagaaccccatctctacaaaaaaatttaaaaattagtcgggtgcggtggtgcatgcctgtagtcccagctgcctgggaggctgagtgggaggatcgcttaggcctgggagtttgaggctacagtgagctgtgattgcgccactgcactctagygtgggtgacagagaaagamcctatcttaagaaaaaaaaaagaaaagaaaaagaaaaaacaaacaaaaaaaacacccaaccctatataggtaktattattacttctataggacacatagaggtttggaaagattaaatcacttgaccaaggtcacaaaataagttctgaggctgggatctgggattcagtcttattatatgcccttcctctaccactccctaaaacttctcattccctcaatccccatatatcatcttaaaatctgcaataaatagccccatacattcgttggcacttaggaaactgttaccagatggctgagtaactgtattaaaacaaatttaattctgcttctatctttgccttgcacttcctgagtgacaggagtgaactctcatatccttttctgtcaaaagatggtgctgaatgatttctaaggtagtttacagttccaacattcaatgccattttgctaacaagtgggcagtcaacaggcatattcaacagaaatactagtaggatctcaggctaaacataygaattcaaaactctaaaacaatcacatccccctggagtgtaaagaaaaaaatctaaaattacaaatgcctggagttgtttctagccatgatatttaacttatttgagattttaaatagcccatttttcccactgatcacaagtagaaattctgggcagtatacaaaaagcaagtactcaaggactccaaaaagtaaacaaaagcaggtggattgtgaagagggtcaaaactgggagaggggcccctcctggggagtgggttttcaatgttttccccttttttcctcccagctctgccctgacgtcaggcctcaggtgcagagctgcactgcgtggtagcacaagccctgagttaacaagagaaataccggctttctggccagaggaatgaagaaaaagggcccctgcrggcaggaatgtgtaggggaatctccaaactgagagtacaggcggaaattccctaattctgagtctgaaccctcaggagtaccaggttacccctgagctgcacatgcgtgtgacatgccttaagggcacagcaaagactttgagaactgaatgaagattagatcttttaaaattrgaagacttcggccaggcgcggtggctcrtgcctgtaattccagcactttgggaggccaaggcgggtggttcacctgaggtcaggagttcgtgaccagtctggccaacatggtgaaacctcatctctacttaaaatacaaaaattagctgggcrtggtgcctgtaatcccagctactcgggaggctgaggcagggagaatcgcttgaacccgggaggcaaaggtggcagtgagccaagattgcgccattgcactccacctggacgacaagagagaaattccatctcaaaaaaaaaaaaaaaaaaaaaattagaagacttcatttttctgtattggccaaataactgttctaatgcccttcattccaataaaaggtttgtagcagcttacagagataatttaaaacaatttttaaaagaagaaaacaacactgggtcagagagaaaatatggttaagaaaagtaagtgaagccaaggagtgaaactaatggaaactaatggacaacgtgaatatcttaaaaaaaaaaaaaagtggtgcgctgtcttatactggctagcaagagcagattgcaaagtattcaggatttttgaagacagttgttaactattggtaacttgatattgaccactatggaagtatttatactatagaaatcagcaatgctacaagtcagaagcattgtttttcttcagagagccggtttaacaggacacatatttatcagccaactataaatggataaaaaataattggctccaggccataggatagtgaaagcaaagaaggaaataaaatgaggtacaagattcataaaattcattttttaaaagttgccagaaaaccaaaaattatatataatagttcaagccacacagaacatttactcaaataggacatgcatcattccataaaggtaacgccaataaattccagagtatcggtatcttagaaactatctatattctaggccaggagcagtggctcatgcctgtaatcccaacattttgggaggtcaaggtgggcagatccctagagcccaggagtttgagaccagcctgggcaacatggcaaaaccccgtctctacaaaaaatttagctggatggggtgcacctgtaatcccaactagtcagaaggctagacgggaggatcgcttgaacccaggaggcagaggttgcagtgagctgagattgtgccactgccctccagcctgggcaacagagtaagacactgtcttaaaaaaaaaaaaaaaaaaagaaaaagaaagaaagaaactatattctgcaaccatactgtaataaaattagaacttgataactaaaatatacttaaaattgtaagtgaacaaatatatttatcagtaacatggatttaaaaggcagtcgtggatgggagcatcgctggagtccagaagatggaggctgcagtgaggcatgattgcgtcactgcactccagcctcagcaatagagtgggaccctgtgtcaaataaataaacagcagttataaagaaaattaactcttttagaaccaggtgttaaaaatgttacacataaaatatacatataaaataatattataatttcaaatacatttattagaacaagaaaagttaaaataaaggacctagaaattctactcaaaaatttggaaaaagagaagttgagcaaacctaaagaaatacgaagaaaaggagttataaagataagaatagaaagcaatgaaacagaaatagagaacaaaaaactaggtagtgaaaattaacatacttttgattccaaaagctgcttacttaaaaatatttgtaagatattcagagttacaacaaggccgattatggataaagggagaaaaaatgaataaacaaatacataatgaaaaagggggaacagctacagatatgacacagatataaagcatagagtgttatgaacaagtatatgctaataaatttgaaaacctaggtgagataagcaaattcctagaaacatttaatctatcaaaattagcacaaaaagaaatacaaaacttgactataccaatgagtattaaagcaatttttaaagttatcaatggcatctaataaaaaaatatatttttgaaaatgcccagatggtttcacagatgagttctatcaaacattcaaggaacatgaaacttctatattatatactttttccagaaaacagaaaaaaactaaacctgattagctaattttatcagccgagtgtaatcttgactccaaattgagttgtggaaaactcaaggaaaaaaaaataatagacccatttcaccttgaacacagatgggagaaaaaaataattatttatgaaccgaattcaacaatattacaaataataatactgggaggccgaggtgggaggatcgcctgaggccaggagttcaagaccagcattgtcaacatactgagatcctgtgagatcctgtctctacaaaaaattaaaaaattagccaggtgtgatggtgagcacctgtagtctcagctactagggaggctgaggcaggaagatcatttgagcccaggagtttgaggctgcagtaagctatgattgcaccactgcatttcggcctgtgcaacagagcaaggccctgtctctaaaaatatgtataataataacaataataataatgattatgctaataatgatacatcaagatcaaatagggaatccttggaatactagggtggttcaatataataaaacatattgttgctataatttaccatattcatagaaaagtcatttcctttgctcagtctattaataaaagacatttggtaaagtatatccatttgtgatttttgaaaaacagttaaggaagcaggaatcaaaactttcctattttggcaaaggttataatccaaaaaatctgtaaccactagtatacataacggaaaaaccttgggtatccaagacaagaatgttcactataattactagcttatcatagcactaaagcctatgggcaacataacaagaccccatttaccaaaaataaatttaaaacattttaattagctggcatggtggcatgcacctgtagtcctacctacttgggaggccaaggcaggaagattgcttgagcccaggagtttgagcttactgtgagctgtgatcacaccactgcactccagcctgggtgacaaaggaagaccgtatttctaaaaaataaaaaatacaaatacaactacaaactagcactagaccaacagtgactatgtaccatgaactgaggaatattattaattccaccatttgcatctgaggttaacaatatgtcaatgacttaaataacatcatatctctgagagtaatttctcctatatttccatgacaaatgttagataattttccattttttccattcaataaaataaacaggaaatataattaaagagttcaattgaggattgggatttagaaaggaaggcaggaattaagaataatccttagttctcttcctaatttgcacctctctcactgatacatatgtattattttctttttatgtcttttagaatctaataaacatgttttatattatataacaaactagaatatatggattatctttggtcttccttaccaagttcttaactctgctggctctggggcactggacataccatgtaagaagaaaaatgttttaactccattgaacttattcagaagcatcggaaattggttcagcaatattcaactttgcccagcaatgtttatgaaagtttcatatatagtatagtataagtatgtgtaatacagaatttatgttctcaaaaatgaagagataaagtatggagattctaaactctgttgacatagaagagggtggatttctcgaagaaacagccttctatagaaagtggcttgtatgagtcgggattctccagagaagcagaaccaataggatgttggcagagagagatttattttaagtaattggctcatactactgtgggagctggcacggtcgaaatctgcaggtaggctggagacccaggaagagctgatgttgcggcttgagtctgaaggtggtccagaggcagaattccctcttccttggaggacctcagtctttgcccctaagaccttcaactgattggaagggccacttacattatggagggtaatctgctttacccaaaatctattgatttaaatgtaaatctcatctaaaaaataccttcactgcaatatctagactggtattcaaatgtctagaaaccatagcctagccaagttaacacataaaattaactatcacttggctcaaggtgaaacttccagatcaatgtggcaggagtgttgaggaaggaagtgaactcggttctaaccaagtaggacagccgaatcatcactgaagtgtggcactggcctttcgccaaggtaacatgtggcaaggttttaggttaggataggtaccaggcaaaagctgggtgactcgatggaggcttttgtgccaaccttcagagactggctgcgtcagactgccctcaagagcatacaaaggaaaaaaagacaaattaaaagcctttaatccaaactcaagacatgaatgaaaaactgtaaatgcctctatagcagttttaaaggctatcttttctcctgcaacccagcacagatatggctgagggtcaagcccgggggcttatgataaaggttatgaagttgtagaaatgtttgttgcatcatccaacagcagctgttgtgataaggcaagacccctggttgggatagaccggaccctgagatatgaaatagggacatatgagcagacacagagaagtctgagtgagaactatgaatcaccgcaccccctgagggtccttgctggaagaagcagactcaccgtattagttacctattgccatgtaatgaatgacacccgcttaaaataacagacatttactataaggtgttactgggacaataggggattttttaatatggattgtgtgtttgataatatggtatcaattttaagtatcttgggggtgatgacagtattagggttttgcaggagaaatgtccttattcttaaattatacatgacaaaatatttaggggtcaagtggcataatttccacagattactctcaaattgtttaacaaaatggttcttcaacagtaaatggataaacaaaacgtagtctattcgtgcaacacagtactatgtaaacaatgaaacttcatcaactactgaaaatgtaacaacatggacgaatctcatagaaacaatattaagtgaagaagccagacttgcagaaatacatactgtatgtttccattatctattgctgggcagcacaccaactccaaacttaatggcttaaaacaaaaataatcattttattatctctcatgaatctgtgaattactggactttaagagccactgatgtagtccatgaaccaaaacacatattcacggcagccactccacccagcacctcacacctgtgatgtttactggctgcccatgggatttgaacacctttagagtactgtgaaatttcccctaccttttgagtcctgcctccctaaagtggaaaccagaaagctcacttcccctagccttctttgaagctagagcacctaagttccaccaattaaattcatccacctaagacttcagttacaaaggggccacaggaggaaccagggtgtgggggttgcagagcaccttttactgtatttatttctctggcaaaggtgacagaagaagcaactgtcttttggggaagcggtgggttttttccttttttttttttttttttaagtgaagttcctgaaacagaagtggtttaggaggtgtcttcagtggtggctgcagcaacctccaggtcctaacaacagaaccaacagcagcgtctagaagccatggggcagcagcagtggtgtggctcatcagacctgctctctgcgtggtctgaccctgtacatacatgtgcctctcatccgtagttccagcatttcctctctaaagtctagttctgagagaaatttctttggtagacttttcaaagttttatcaaactcaaagagggaaccagcaagaatacaagagccttgatccaaagagtatttgaaaaacagagctgtatctctctgtgaggaaataatttctaggctagagattcaaaatggctaacgtgctagagggcaataaaatcataaccttggtgttatcttctttaccgg

SEQ ID NO: 8838 - DNA, 12894 bp, Homo sapiens
tgcagtggcgcgatttcagctcactgcaacctccgcctcccgggttcaagcaattctctgcctcagcctcccgagtagctgggattacaggcacccaccaccatgcccggctaatttttgtatttttagtagagatggggtttcaccatcttggccaggctggtcttgaactcttgaccttgtgatccacctgcctcggcctcccaaagtgctaggattacaggcgtgagccaccgtgcccggccgacatttctaaaacataatttgagagtatcttagattctaatgtcttcaatctgtcctcagaaataacgttctgcagttaaaacacttataaaattagctttcagaaactttaaaaatactctcacatgtccggtgttattaactttcaaagtttccaggaaagcattaattctgtgaggttttatggttttttcctcagtatgttagtagaaacacaattatttactattcatatttaaattatatatatttaaatatatgtatctatgaaaagactgataggatgtgccttaatttgctaatagtggttttctctaattgctgggattatgagtgatctttatatacttttctatgtaatttttctgaacataaaatacttaaccactcattttcaaaaatacctaaaggataaatttactgagaaacctacctttttgagctttagctgttatttcaaagtacttgacagtaagatcttgaatagacagtacagccatgtgagctttccgctgccaatcagcatcttctttttgtagactctcaattcttcgaggtcccagataatcattctccatggaaatcttcagagagaaaaagaaaaaattaagaagttcaagtctttcttctactcattcctcaaacatttaaagtttatataccacaaagaatacttgttcttccctgctcaagaggataagctattagtttacaaaacaagtgaattaacaataatactgaagatatttgacatagaaacctattccccattttgccctttcttccatccccctctcactccatacgtaggcaaagaatatataccaatatgttaagactgattgtttttaggtgtctcgatgaggaatttatttcctcctctatgataaaatatcttttttggttaagacttatttatgcccccccccaaattacttaaattgtttatttccttaacagccactatataaaacaattgaaaacctggattttcacaatgacaatataaaaaccagcctataggcatactgaaaagactttagataacaataacagaggaaggccaggcacggtggctcagatagctgaaaatcaaaggatggacaggaatgaaccaggtgaatgctaaaacaaaatttaaagaagtgataatattaaaagtatatttcaaaacactacataagtatgttttaacatggaagaaaggtacaatcaagaactgcaatggatcacttatacatacaatcttgctttaccatatacagagaaatagctatcagcaagttatatatgaagccaatgacaactttattaggataaattaaaaaaaaaacaggcaaaatgttaacccacccatgacacacttaaaaaaacactgatcaagtataattaagccactaaaaagctagtaatgaattctgaaggtagaaataatacaacccatattctcctttttttttttttttttttgagacggcgtctcgctttgttgtccaggttggagtacagtagtgcgatcttggcttgctgcaacctccgcctcccaggttcaagtgattctcctgcctcagcctcctgagtagctgggattacagatgcccgccaccacactcggctaatttttgtatttttattatagatggggttttgtcatgttggccagcctggtctcgaactcctgacctcaaatgatccgaccgccacagcctcccaaagtgctgggattacaggcttgagccaccacacctggcctacaacccatagtctctaaacaatgctgtgaaaggaaaataaaatctcaagaccccaaactcactatatcaaagggcaagataagcttgggagctgagtcacgcaaaaactgctttccttttgctcccagacagacagggaggattgcttgtgaccaggagttgggagaccagcgtgggtaccatagcaagaccccatctctactaaaaacaaacaaacaaacaaacaaaaaaaaacaaaacaaaacaaaaagaattagaataccaaaaaaacaaaaaaaaaagtcatgagtgagcatgcctaagacatcaaggggagcatcaggtgtagaaatctgggtgcaaagtctgggcagactttcgaaagggaataatgagtaatatctggaaatattaagagtagaattttatattaacagaattttagccagatactaaagatggttaagtgtgtctctgggtaaaacacctatgagaaaaataaaaggtattgtggggaaagagtatcatttgtgtagatgaggacaaacttcattgaggttcattaactgcagatggctttgaagaaggggtaggattttgacgggtacataaagagagaaaaaccactgaaaaggcatgcgagaggtgaggagcaatctgagcaaaagcctaaaaatttttgtgcctgctaagggatggaaagcagtccagcctgcttgctttcaggagagaaaaatgaaagtaatgagagatactaggaaagtaggttgttatcatatgaggttgtcttaaaagacatttaaaatgtcaggctaaggaccgtgtatttaatttgacaggaaaccactgtgggattctatgcactaagtgacatatttagacttcatcttagatttaaggattctggtggagttgtttgctataagaaaattggtatgtgtgctttcttttattgcaattacctctgaatttaaaacatacaggtttaaaagcatacaattagtatttacaagtatgggatagaaatttaataatgatacaagtcaaaacttaaatcccttactcaggatattataatagaagttcttctcaatgacatgattacactttatttaacaatacaaagaaaagacaaatggaaattagtgaagttataccttttttgaaaagtctaaatcctttgacaattatgtgaagataacatagtttgctaccttaatatattcaaatatacagaaggtgaaatactcgaatgcccagtatgcttttcttttaagctgctgtttaactgactttaaatttttcttttctttagagatgggggtctcactatgttgcccaggctggagtgcaggggctagtcacaggcacaatcattagcgcactgcagcctcaaactctcagcctcaagtgtcctcctgcctcagtctcccagcaagctgacactacaagtgcacaccaccatgcccagcctttaactgacttttaaaactcagcagctgtaacatctgtccaaaggttaaagatccgtaattagtcgattgtacctaaaaccttaagctagttccccctaactttgaaagtctgaagatgtgtgtacattcttgtctattcatctccaagttcatccttctgtcttgtgatgctaggtttgagagtgcaaatcacatttagcctttgccaatagaagagtttggaagagggaggagatatgcttctatctgcatcccttgacttcaactggtggctgttcctgtcagcatcacccaagccttatttcaccccagcatcggcagttcctttctgaagcagtaacggaatctaatttgcagttttttcaaccctaggctcatagtacaacccccaagacaaaccaacccctcagtactgaatcctctgagaactaggtctctccattgagcaccaggcaagcaatgccctctttttcaggtcagctccacagggttcctcctctatgcttcagttttaataattccaatcccttctctttgtttctccaaccctaggagtggtagctgtttttacaattgcttcctctggaagtaccttagagttactttcttgccttctcaattatctggttaacaactttatacctaattaacaaattctttatattagattctctctgttgaaataactagtttttctgattagctctcaacagatacaactatggaacagaaatttaatagtgttcagaattcaaaaatcttaatacaaaaatcattcttacttgcatggttaagtccatgtaccatttatcgaaagaaaagtgtaaaacttgcattatggatttttttttttttttatggagtcttgctctgtcacccacactggagtgcagtggtgcaatctcagctcactgcaacctccaactcccggtctcaagcaagtctcctgcctcagcttcctgagtagttgggattgcacgagcacgccaccacacccggctaatttatttttatttttagtagagatggggtttcacgacgttggccaggctggtcttgaactcctgacctcaggtgatttgcccacctcggcctctcgaagtgctgggattacaggtgtgagccactgcgcccagccttgaggctttttgaagaggcaaaaaaaatttttttttaacctgtggcaagttatttgaaagtaacttgtactttgttgtggattaatgtctttacctttatgagtacagctacaaatacaaagaacataaacatgctttctatgctttttaatgctgtcttttaactgatttttgaagtttcgtagctttaatgttgcagccaactcgtaagcaacttgtttaatagtttattgtacctaagacattaaacaagggtactaagtacttttcctaacttggcaaatttgaagatgtgcagcactggttagatggatcatgtgctaaaaacaatgacacctctgttttcaatttcagtgctagaaagaaaacagtgcctgtttttaacacggaaaaaagcgcgtgtcagctaggatagcgaaactagtttataaatacaaattacctgacgtggaattattatgaagcacagcacttggatactggcttttatgtaagaaacacagtaggggggaaatccaccttagattctttggtaaaacaatgccaagataaatctgtgaatgtaccatcatgaagaagatgagggggaaaaaactgtgaatatactaatgtaacagcacccacaatgcaaatattccagaccctggagttgcctgaagatgactcttgaatgatctaacaacatgattagcttagtatctattcatgggtttttatattcagagcaaatattgttgagagattcttatagctaagccaagtgtgagaaactatgcttaaaaaaaaaaaaagagaaatcgaaactcaagtgaactaaaggaaagtatagctcaggtgagatatgagtatcttaatgtataatggtggcactacctagttcacagtgtgcatgcggtggatgcatacagtggtaaaaactgcaccctgcacaataaatagcacccagccaaggggatggagtagatactgaaatgcagcccatgctttgccaggccatgtgtatttctacacttgatgaaaaagggctctttcctaatttgtttgatgggtgactggcagtgggcgggtggggggcagggggtgcagttttctatttcacagaaaggcacctacagacttgccctgggggttgggataagaatgaaatgcacattcaagaatttactaggagacaactggcaaaatgaggtgactggctacaacagaaagaaatgcaagtgccttccagtttctagcttatttactttcaggaagtatttaaaaataagttggacaatctgtctgaagtgcttatggttgatcaagatgatgagtatagtccagctggctctgactcattaaagacactggatttaaaaatctagaggttcgtctagtttcaacttcattttactttcatttgaaagtaacttccttttggctctctgaccagcaccatggcggttggcaagaacaagcaccttacgaaaggcagcaaaaagggggccaagaagaaagtggttgatccattttctaagaaagattggtatgatgtgaaagcacctgctatgttcaatataagaaatattggaaagatgctcatcaccaggacccaaggaaccaaaattgcatctgatggtctcaagggtcgtgtgtttgaagtgagtcttgctgatttgcagaatgatgaagttgcacttagaaaattcaagctgattactgaagatgttcagggtaaaaactgcctaacttccatggcatggatcttacctgtgacaaaatgtgttccatggtcaaaaaatggcagacaatgattgaagctcacgttgatgtcaggactattgatggttacttgcttcgtctgttctgtgttggttttactaaaaaacgcaacaatcagatacagaagacctcttatgcccagcaccaacgggtccgccaaatccggaagaagatgatggaaatcatgacccgagaggtgcagacaaatgccttgaaagaagtggtcaataaattgattccagacagcattggaaaagacayagaaaaggcttgccaatctatcctctccatgatgtcttcgttagaaaagtaaaaatgctgaagaagcccaagtttgaattgggaaagctcatggagcttcatggtgaaggcagtagttctggaaaagccactggggacgagagaggtgctaaagttgaacgagctgatggttttgaaccaccagtccaagaatctgtttaaagttcagacttcaaatagtggcaaataaaaagtgctatttgtgaaaaaaaataaaaataaaataaaaaaataaaaaaaagaaagaaagtaatttgtaccttgctgttggattaatatctttaccttcaaaatgtgtttatagctacaaatacaaagaatacaaacacgctttttgcactttttaatgctgtttctaactgacttttgaagttttgtagatttaatactgcagtcaatttggtaagacccagaaaaactcagacccagaaaaattgtaaccttcagttcagtatgtgaaatccctaagctgtttcaagtcctgttttattaggctagtggttctcaaacttaagtgtgtatcataatcacctggaaagcttgtcaaaacaaagattgctgaggtccattcctagagtttcagtagagaagatctgaggtgaagcccaagaatctgtatttctacaggattccaggttatactgatactactagtcaggtgatcacatttttgagacccaatgtagtagacttagaatctgtgagctccctaaaggggtgtctatctcagaaagacttcctggcctaaaataatgctgggtaggcaggagctgcttaatacttaacaggtgagatattatgttaatatcataaatattaaatgtaaaaacaaatataaatacattatacatttgggatgccaagttctcttctttcctatcatactttaatacctaggttaatgaaaccattggaaatcaagctcttcataaagagaaaaggtcaattatttggttaactactttatacctagttaacaaattctttatattaaattctctctgttgacggctgggtgcagtggctcacacctgtaatcccagcactttgggaggcagaggcgggtggatcacctgaggtcgggagttcaagaccagcctaacatggaggaaacccccctctactaaaaaatacaaaattagccaggcattgcggcacatgcctgtaatcccagctactccgggaggctgaggcaggagaattgcttgaacccgggaagcagaggttgcggtgagactgcaccactgcactccagcctgggcaacaagagtgaaactccgtctcaaaataataataattattattattattatcattctctgttgaaataaccggtttgatattttgattagaacccaacagacacaactgtccatagaatataataacattccaaccatctttcctctcatcttctataaatccttagactaaaagcataccaaacaattcacaccctgtggataacagcaggttttgctatcaaacacgtgttcaatcccaaccacgctactttctggcaaccatcaatggtgctggattggtgtgaagattcaattaagttagtgccaataccacattacctggttaaagcacaagcactaagtataagcactaaaccattcctctttgtacatctcttcatcaggaatattctctattccaatctctgacagagattgtaacgtacccacttcctactgaaaattcttattcattcttcaatagtgaagcactagatagtccctcttttcacatatatctttaggcactgatcaccccattttgtgtgcttcttatataagtgtgtacattcttcacatttaactttttttaaaaaatcacgtttattgagatataacttgcctacaaaaggcaacattttgaatgtaaattgtgattgattttgacaaatgtgtacattcatttttatcactaaaatctagatttaaagaatcactccaaagttgtctgtggtgcttgctccctgtcaatttcccctaagccacccaaggcaacaattatttagctttctgttagtacagatcaaaatcatcatttctagaatttcttattttttttttattttttgagacagtgtctcgctctgtcacccaggttggaatgcagtggcatgatctcggctcactgcaagctccacctcccaggttcatgtcattctcccacctcagcctcccaagtagctgggactacaggtggccaccaccatgcccggccaattttttttgtatttttagtagagacagggtttcaccgtgttagccagtgtggtctccatctcctgaccttgtgatccgcccgcctcggcctcccaaagtgctgggattacaggcatgagccactacacctggcctagaatttcaaataaaggtatcacaaagtttatgctctttgtgttagatgtcttttcctcagcatatttcctgtaagcaattttactatggcttaatttatatacaaccaagtgaatccatttagagtggtcaactcaatgagttttgacagctgtatacacctctgaaacaacattaatcaaatactgaccatttccatcaactccaaaagattcttcgtgccccttttaagtccatccccctttatgcattatatattcttttgtatttggcttctttgacttagcatgattttaagatttacccatgctgtgtccatcagttcattcctttgcattgccaaaaattattctattatagtcacgtgctgcgtaatgatgtttcagtcaacaatgaaacacatatacaataggggtttgataaaattatattggagctgaaaaatctgtttgattggcctagtgacatctcgatgatcctgatcctgggtaggccctagatgtgtgattgtgctccagtttttaacaaaaaggttttaaaagtaaaaaaaaaaaaaaaaaaaaaaaaattaatttcttggctgggcacagtgactcacgcctgtaatcccagcactttgggaggccgaggtgggtggatcacgaggtcaggagatcgagaccatcctggccaacacagtgaaaccccgtctctactaaaaatacaaaaaattagccgggtgtggtggcaggtgcctgtagtcccagctactcgggaagctgaggcaggagaatggcacgaacccgggaggcggagcttgcagtgagccaaaatcgcgccactgcactccagcctgggcaacagagcgagactctgtctcaaaaaaataaataaataaaaataaaaataaaaataaattattttctttttttctattactaatacatcttagtaatacttaaaacaactactttgctaatcaattatacttgcttttttttttttagctcctccagatttaaaaagtctgagtagattttttaacttagaagtaacaagtaaccagtaatgcagttaaaaaaaaaaaatctttggaatcagaaatgcctgatttgagtactgtatcagttctaccacttacaaattagctgtgaacaagtacataattatcccaatattagttttcttatctatgaagtaggaaaatacaaataataagagtacccaacttacaaggttgtgtgataattaaattagcggatctttttaaagcaatacaacacactcaatctaatgtaatgtatgagttgctaactaaatctagttgttggctaacaaaaacttatatctgcaaattcacaagtaggatcaagaataaaagaatagtcatgattgatggggcattttctcaatgtcttagaaaaagaaatgcagtgaaataccatttttactgtcagaaaagacacaaattttcaaaatatgttttctgttcctcttcacctacattctacttcccaggaaaaatgtagcagttaagtgatgctagtggacaatataggctgacaagtagggtcaaccaatttgctaatattaatacccaatacaaatcatgatataattatgtaaaagaatgtgtacagattctggatagtcagtgctgtgctatagagattatgtctgctaaacaatgcagcagtctaaagtaggtgggtatccaggtcgtccagtttattcctggccttctagtcaagttcttagcagacaaatatccatgattcatttaaagaaacaggaatttccaggctgggcagtggctcatgcctataatcccagcactttgggcaatcaaggtgggcagattgctggagttcaagagttctggaccagcctgggcaacagatggagacctccgcacaaaaactacgacaaaaaacagctgggcgtggtggcatgcgcccatagtcccagctacttgtggggctgaggtgggaagactgcttgaacccaggacatcgagactgcagtgagctgagatcatgccactgtactccagcccaggtgacaaagacgctgtctcaaaaaaacaaaacaaaacaaaacaaaaaaaaccaggaatttccaacatctaaaaattatttgttccatgttgctgttttaacccaaatgccaaatttatgataaaactgactgaccaaaacaaatccccccctcaaaaagctgacagcacagctattttccaaaagtattgataaaggagtatgtctaagtcgtgtgactgtcctactctccaccctgatacgttagtaaagagaaaataagacacacagacaaccttactttctcataccttttcaaatatactcacccctgtccccacgcataaggttctcaaagtaattgctaattttctcaaatactcaatcttacataatgatattccaacttaacctattaggtaaaaagacaattttaatgttctagttcagcaacatttatatatgaattacacataacatttaaggtcagctataaaatcaaacccttaaatgcttgcctcaaaaaatgctttttcacccatgttgtgggggaaaaaatttaattttatttttgagacagagtcttgctgtgtcgcccaggctggagtgcagtggtgcaatctcggctcactgcaacctccacctcccaggttaaagtgattctcctgcctcagcccttcgagtagctgggactacaggcatgcactaccatgctcagctaatttttgtatttttagtagagatgggttttcaccatgttgactaggctggtcttgaactcctgacctcaggtgatccacctgcctcagcctcccaaagtgctgggattacaggcatgatccatgcctggctgaaaaaaattttttgtaatatactttgtcacacactaataaaaaatttcatgtatttaaagttctgtcattaaaaacttaaaactttcctaacaagttcttctaaaacaaatgttcccaaaactggctgggcatggtggttcacacacctgtagtcccagaacttcgggaggccgaggtgggcaaatcgcttgagcccaggagttccagaccagcctgggcaacatggcgagatcccatctcgaaaaaaaaaaaaaaaaaagaaatgttcccaaaactttttcttcttcttggagacaaggtgttgcctaggctggagtgcagtggcacaatcatggctcattgcagccatgacctcctgggttcaagcaatcttccgcctacctcagcctcctaagtagctgagactataggcatgtgccaccacatccagctagtttgatttttttttttttttttttttttttttttttgtagagacgggttctccgtgttgcccaggctggtctcaagctcggagctcaagtgatcctcttgcctcagcatcccaaaatgttgagactacgggtgtgaggcaccacgctcagcctgcccaaaatttctggtaatgaagtctaagagtacacagtctccaaaacattaaagaggagacatgactagaggaggaaggaaagtgcaggaaagggagaaaataggaatcctcccaatgtatttacaactttgtgctaacttgaacacattactttctgggctatcctcaaccctggctactcagcagaattgccttttgaggtgctttagaatggatactcaggctacaaccctattctaccaaacaagaaactttgcagaaataggaccaggtaccttctttttttttttttttttaaagttcctcttgtggataacgcatggcctttcaggctgagaactatgaaacaggcaggctactagttaggattaataaaaaaataccttgatctgctgtcttcgtagcat

SEQ ID NO: 8839 - DNA, 18228 bp, Homo sapiens
cggggctgggggagggatagcattaggagaaatacctaatgtaaatgacgagttgatgggtgcagcaaaccaacatggcacaagtatacctatgtatcaaacttgcacgttgtgcacatgtactctagaacttaaggtataataaaaataaataaataagtaaaaatgccttcagcagcctgaagttctaagagctttccaagtttgggaaggtgtccgggttttctgcgattacttctctgagcatgaacggaagtcaccctttgtgccttatgcggtgattttaatgataggtgtcatatataggacggagtaatctgtttacattctgttcttctcgatgcactcacaagcgggtaactaggtgacaagaaaacaaagatcttattcaaaagaggtcttacagcaacccaacgtctcatcttcccatagtaaagatgacggcgccttgaggtaagctacaggcaacaccacttccgcgtttctcttgcgccctggtccaagatggcggatgaagccacgcgacgtgttgtgtctgagatcccggtgctgaagactaacgccggaccccgagatcgtgagttgtgggtgcagcgactgaaggaggaatatcagtcccttatccgggttagttgtgtttctacagtctaacgcgtagcataagggttgggagaaatcaggtgtcctcaataataggctccgtgtggaagccgcttccggtttttaagtttaacgcccaaattcatagaaatgggactattgtggggctcggggactaaggagggatggtggggagagggcaaaaaagactcgggtgaggtgcacagtggggccagaccttgcggctaaaagcagcagttattttagggatacgcttccccagaaggtgacgtgtctccctggctacaggtgtttgttcacctggatgtgaacaaaaatcctcagggcgccaactcccagtccgcatctctctgcccccttcttcactcttcactgttttgtttgtttgtttgacggagtctcgctctgttgctaggctggagtgcagtggcgcgatctcggctcactgcaacctccgactcccgggttcaagcgagtctcctgcctcagcctcctgagtagctgggactacaggcgcgcgccaccacacccagctaatttttgtattttcagtagagacggggtttcaccgtgttggccaggatggtctcgatcccctgacctcgtgatcctgatccacccgcctcggcctcccaaagtgctgagattacaggcgtgagccaccgcgcctggcctcactcttcactctttcaagccacattagggctgaaaattcaagtaggtgttaactacagagagttggggagtttagctcatagttagaaacgggctgtcttctcagttatctctactgtggaaggtgagaaaagtttgtcttccttgtagtttctgcctgcttcaaagaccagcagttctagttctcctacctcatgtattcattcactaaaaaaaaaaaattactgtgcatatagaacctagggaggagataccaagccgaataaggaggaacttactgaggtagacaaaaccagatcattataatacagtgtttaagtggagagagactgagacagatatggacagatataaagcgagaaatggctaggatgttttgagagcataagaggagacatccagtttgcattcggtcacggaaggtttcctggaagaggtaatgcttgagctgaaacttaaagagtaaacataagctagcctgataaaacataagagtagaaggacattcaagccaaaagggacagcatgagcaaaggcatagaatctagaaacggcacaggcaccagcatgatgtgtttgaagaaacaaagtagctcagagttgttagagcatcaaatgtgaggcagggaatggtagacaaagctaggagacatatttgagcacttgaattttctcttggaggctttgggataccgttaaaagttattaagctgaggaattacatggccgatttgggtttagatcagtcacattggcaataaggggaaaatacaattgacagggacaagactgaaggtaagagacaagttaggctgtcattaatctcagcgaaacaaaaggcaatctaaactaggcagttgtgaggatagagaggagaggtagatttgtagaatattcagaaggtaaaattagcataacatggattagtgtagtaagggatagggagggtcaaagatgattcccaggtttttgccttgggtgaatgctcatactgccacctgaaattgataattcaggaggataattcaggaagtgtatccaaaggaatataaaaaattccagatggaaatgctgagtttgaagtacctgtgaaatgaaggtcaaaacgtcaacatacagttggatactaaaggctgaagttctgaggaaagatctggaccaaagatgaaaatctgggagtcattagcctgtgggtgttagttgaaaccaggactatatgaggctagaagggagttacccagggaaggagtctatcattaaatgagttgtgggctgagggcagacactatcagagaagtgagaggagaatccagatggtatcttcaggtcttttgtgcttgctaaattgagtggagcccattctattctctgttctgggcagacccccacttaccagtatagccttgtcttcagctttgctaatgttagaaaaattaggtaaacatattaagaaaaagtaggctgggcgtggtggctcacgcctctaatcccagcactttgggaggccaaggtgggcggatcacgaggtcaggagatcgagaccatcctggctaatatggtgaaaccccatctctactaaaaaaaaaaaaaatacaaaaaattagccgggcatggtggcgggcacctgtagttccagctacttgagaggctgaggcaggagaatggcgtgaacccaggcaatggagcttgcagtgagccgagattgcgccactgcactccagtctgggtgacagagcgagactgtctcaaaaaaaaaaaaaaaaaaaaaccggctgggtgtagtggctcacgcctgtaatcctagcactttgggaggccaaggcaggttgatcacctggggtcaggagttcgagaccagcctggccaacatggcaaaaccccgtctctactaaaaatacaaaaattatccgggcatggtggtgcacgcctgtaatcccagctactcaggagactgaggaaggagaatcgcttgaacctgggaggtggaagttgcagtgaacccagattgcgccactgcactccagcctgtgcgacgggagcgagattccatctcaataaaaataaaaaataaaaaaaataaccacatacttttcttttgaggagagggggactgcccttggccccaactactctctcaaagacctcattctctgctttcagtatgtggagaacaacaagaatgctgacaacgattggttccgactggagtccaacaaggaaggaactcggtaggtagaccctcttgggaggtgtggggtgggagtcttatatgagttaggcaatttggtatcctagcgcccactaccaaagctgccctgtcacatgttagctgtctccactcccacagcgccagagttccccagttcccatcctatgagtctcccaggctggtggcctaagccaagatatcatttgagtactggaagaataggcaaattggactgaggtttggtctttgttacaggtggtttggaaaatgctggtatatccatgacctcctgaaatatgagtttgacatcgagtttgacgtgagtgtgatagagtgggaaatatgaaggttagtagaaggggagggattagatgatgggtaacaagctatcctttcttgaagggaccaaagaaaactttaaaaatgggagagaaaagctgaggtttgaggcaagcataagttatatttactcatctccacatccagaatcctggtatggatgtgctccttggggagttttacttaacatttcagtttaaccaagaaatatgtatgtctgattatattagttcctttctatcctgattctgttttattaaggttttataatttctccagattcctatcacatatcctactactgccccagaaattgcagttcctgagctggatggaaagacagcaaagatgtacaggtaggactgaataggagatggcaaagagtcaaagaaagccttaaggaagaacttcgtggcgggagggagagcatcaggaagaatagctaatggatgcttggcttgatgtctgggtgatgggatgatctatgtgtaaatcaccatggcacgtttacctatgtaacaaacctatacatcctgcatgtgtacctctgaacttaaaagatgtaaggaaaaaaaaaaaaaggaagaactttggaggcagagattttcccagggtctgctggcctagtggggtgccaggccctcctttgctgagcctaagcaaagtacttagctgaacttgttctcaattctgatcactagtagtcttcctatgcccccaagaggctgctgtgctttatggtaaactttgcatgtcaacaccttcttcatgtccctctcataggggtggcaaaatatgcctgacggatcatttcaaacctttgtgggccaggaatgtgcccaaatttggactagctcatctcatggctctgggggtaagttttgtgtatttggcataaaaggagaaagagggacttaggccctgagcagtacaagaaaagcagctaagaataaaaggaataacagtgatgtcccttaagcatgttcccccagaatctgtctccaggaaggagcttctaatggaacaagaagcattgactggtagtaatctcacaggattttccttgtattgcagctgggtccatggctggcagtggaaatccctgatctgattcagaagggcgtcatccaacacaaagagaaatgcaaccaatgaagaatcaagccactgaggcagggcagagggacctttgataggctacgatactattttcctgtgcatcacacttaactcatctaactgcttccccggacaccctccacctctagttgttactaagtagctgcagtaggcattgctggggaagaaacaaacacacaccaaacagtactgctacttagtttctaaggctgcacagggaagggaaagactgggctttggacaatctagaggtaatttatatccgcccccaggtggagcaacatgcgattctggaggcacgggggtaactgaaagtgagtacatatagtctttctggtttctggagataacccatcaataaaagctgcttcctctggtagcctgtggttctcattgggagctgttaacagagggcaagtgggctgaaacctgaggcacatgaacagctacgccgggttgggttgggaaagagtcggaaataggggatgctctggtcaggagtgggaatgaaatgttgactgttccccctgctgctcagatctacctttgtcctttagtggtgagccatgctttgccctaccgtgttagcctgcaagaagtggttttgccggaccagcacttcccgccctccagggatcttcccagccctctgtgaagtgctagatgcttctccactggtctgcgggctggacccaggcctgcagtttgccatacttgcgcccctgctgtttgggaaggatctgtgctgtaagcctcgcggccatactacgactgtcagatctccatccctatgggctataggatggggcgacggcaccctatacctcagggacttgctttggagtcatggattaaagacctctctgggcagcgttgagaaccagcgaccctaaacttggctgcgtttccatggtgtcgatcgcggagccgtgggggcgggctcacgcaagcgccaagggaccggtgggaggagttcgggtgtggatgcgcaggcgctttgagagacggtgaagccggtggccggtggccgggcgggaccaacaaagatggcggcggcccctgcggcgggagcgatctgggcaacggctgcggctaaagctgcagccgggcccacgggggggctgcacgggggtagtagggggtggccctgaactggggcctggccctggctggcctctcccgccgcctcactgggggacaggtacgggccggggcgttatggcatggcggggtgtgggggggcgcagagggaagactgctccagacccgagaggacactctccacaaaggcgcgtggggcccggcggggcctgggagaactgggctggagggacagcatccctggaccgcggggaatacgccgccggattccgtagccaatcagcggtctcggcctttctgccctcgaggggggcggacccggctaaagccctgctgtggtgggagaagtgcagagattaagggtcaaggagttgttcgtcctcyatccccgactactgctttctgaacctcgacaccatgtcggaggtcggaggtgggggagggaatggatcgtaagtcacccatatagtctgcttcatttgcagcccagagaggcagggattcgaggatggagggctgtcttttgggctgttattcttgcatctacactaccatttggctagggtcttaagtgacccgaggcacatcctactttactagccgggtatggggtcccatgttacgttagagccgagataggagttatcactggcttttcagtaaagatgtgttctgcagggaggggtcgggagtatagaaagggtcaaagccatgggctgcttatctttcattcatttgtttacccaatagatactaagtatttactttgtaccaaacacgatgccaggtactggggatacgatggctgattcgatagatctggttcctgccctcagtgcgtatactgctccccactttcgttgatgtggtagtggtgatgactgagccaaccacctaatgtggaaatgagaggacagcaagattgtgggtatggaatggggcaaagcaataagggaaaattagtgtggcagggttcagtacagcagcctgggttcccatttccccccatattcaaatgctgacactctcttctcctcccaggtccagcctgtggtgtccacaatgccccaggcctctgagcaccgcctgggccgtacccgagagccacctgttaatatccagccccgagtgggatccaagctaccatttgcccccagggcccgcagcaaggagcgcagaaacccagcctctgggccaaaccccatgttacgacctctgcctccccggccaggtctgcctgatgaacggctcaagaaactggagctgggacggggacggacctcaggccctcgtcccagaggcccccttcgagcagatcatggggttcccctgyctggctcaccacccccaacagtggctttgcctctcccatctcggaccaacttagcccgttccaagtctgtgagcagtggggacttgcgtccaatggggattgccttgggagggcaccrtggcaccggagagcttggggctgcactgagccgcttggccctccggcctgagccacccactttgagacgtagcacttctctccgccgcctagggggctttcctggaccccctaccctgttcagcatacggacagagccccctgcttcccatggctccttccacatgatatccgcccggtcctctgagcctttctactctgatgacaagatggtgaggacttgccacacacatggccttcatgcccatgttcctctgtgctttcctgccatcctctgccttttctgtcccccatttccctgaagttcctttctcagcccttcattacagcagtttggacatgcctctcccttgcttaaatacccttgagcctcctagacccttttttgggttgttggtgactcttcagcatggtgtgccatttcggtccccaggggattaccccaactatttagaattcttctttgggtccccaggcccttcctttcccttgcttgcaccttctctactgggactctgcctaggcctaattaatctctggagctaaagagaggcaggcacagaacatcttagcaaacgtggttgcacattttctgagctaagtaagctaggctgattgcaattggagccagcaggagaagggcaagaaggggccacgggggcaggagggggttttgggggcagaaaggtgggagtggtgagcagctgggcaaccatgccggtgctgggggagttgccccaggagctgcaacgtcarctagctgagcagaggagtaagtgggcaacaggtgggacagccatggctgagtcygtggtacattcagctgtgatgggcttactgctcatgaccagtgaggtagggagactagaatacctagtgaggggaatagggtagagtttggggatgaaacatgcatgggatgggggaggcagtgggcagcatgctgttgaaaggttaaagtgccaggtaggatatataggaacttgccgattgtactctgaccttccaggctcatcacacactccttctgggctctggtcatgttggccttcgaaacctgggaaacacggtgagagctattctcctatctttcctctctaaaaggaatgtgaaatggtgctgggggtggggaaaacccacgagcttggggaaggcatgtggaaggagagctctgaagctcttctaaggcttcctgggcagtggtctggagagataacagcagtgtccctactgctccccagtgcttcctgaatgctgtgctgcagtgtctgagcagcactcgacctcttcgggacttctgtctgagaagggacttccggcaagaggtgcctggaggaggccgagcccaagagctcactgaaggtggggcaacaactcctgctccctctgttcaagtccctttttccccaaccacttgcaggtccatctgccactggtggtggcccccaacccttaaatctggcagttgtatctacttttcccagtgcctactttcctaaaggttattttctaccctctgagccaccttttgcttgcctcttccagacattaacctttgtttgccttccccactcccatcccaacagcctttgcagatgtgattggtgccctctggcaccctgactcctgcgaagctgtgaatcctactcgattccgagctgtcttccagaaatatgttccctccttctctggatacaggtgggagagctggaggctatgggatttctctctggccatgtctgggggtagggccaagcaagggccctggcagcattgttctgagccttgagatgttcttcatccaggaagtggggaccaatatctgggcagggaatagtgtctgtggactaggagaggagtcagttgcccatactctttgtctggctgtagccagcaggatgcccaagagttcctgaagctcctcatggagcggctacaccttgaaatcaaccgccgagrccgccgggctccaccgatacttgccaatggtccagttccctctmcaccccgccgaggaggggctctgctagaagaacctgagttaaggtaagggtcgttccctctacctcctttccccgtagtttatcagcatcattcacacttcatagaactaaactagtaaagattgaagatgtagggtccagggaaaccctttagtatagaaaatagtatgagaagcaacatagaagtagaaggaaggaaggaagagggggagtctaagggagcagatggaggcagaagatcatgctagggatgtcaccaaattgaagaaggggataattcatttacaggtagaggaagacagcatattcttcccttatgtacattcctttcttttcctctcacctcggatttccctagaaagttcattgaggcattattcttttgacttttccttgaaatttagggaaggagcaggggtgtggatggggagtagggctctgtaggttgtttcagtgggtgttgggggtgcccagtgttcctgctgtctcatgggtgctccccacttcctttgatctgtggtagtgatgatgaccgagccaacctaatgtggaaacgttacctggagcgagaggacagcaagattgtgggtatggaatggggcaaagcaatgagggaaaattagtgtgtgaggggggtacaggcttggggggaaaaatcgatactatcaaggggtatgggaacaagactggatgatgcaaatgtgaagctgtgtgaagagttgattaggagtgttggtagtgggaaaggaagggtcaagcaaaggggcaggaagagatggaaatccaagaaatcatctcataacatccaacaatgaccttttctcctgtccctgtgcttctgtctagacctgtttgtgggccagttgaaaagttgtctcaagtgccaggcctgtgggtatcgctccacgaccttcgaggttttttgtgacctgtccctgcccatccccaaggtgggattccagaggattccggggtggacaggacaggggctctgtgacccaagcctacccacccccagagtgtgggcgggaaccctgtgggtttctggagcagaactgaagcctggattgattgagaagagttggaaaaggaaattcagaacatgttgacctttcttccccttttcccccagaaaggatttgctgggggcaaggtgtctctgcgggattgtttcaaccttttcactaaggaagaagagctagagtcggagaatgccccagtatgtggaggttcacargggatacagtaagggtgggagacctggggggactccatgtggataaaagggattgcatgatgtcttcatatggggaataatatttatgtatctgggtttgtgttggagtctcagatctgttctagtactcctagagcaaaggggagaagccaagaggatccagctgtaatgaagagcatactaaatttgtatgtggatcggggtgtcagaaaagccaattgaggttaggagcatattaacctaacactgtttgccatttattcaggtgtgtgaccgatgtcggcagaaaactcgaagtaccaaaaagttgacagtacaaagattccctcgaatcctcgtgctccatatcctaatcttcagattcttacttctcttaggatacctcccatacattctctttcctccatgtttccagagaattgaattttccttaggaaaagtctgccacccacttttccacaagatgctcccagtgtgtcgggagtggggagaggacagctttcaggatagaagaagttcccctcagaggcccactgcctcccaaatgctccttaaccagggcttagatctgaatcgattttctgcctcccgaggctccatcaaaaaaagttcagtaggtgtagactttccactgcagcgactgagcctaggggactttgccagtgacaaagccggtgagtctggtggggaaagtcctaaggagccaaaggagtgggggcacagctctgattatagaacttgatcatctccaaccccgcaggaagtcctgtataccagctgtatgccctttgcaaccactcaggcagcgtccactatggccactacacagccctgtgccggtgccagactggttggcatgtctacaatgactctcggtgagaatagcctcctatttacatcctgccccattcccactcagccctgacaccctccccttctatgaagctccaggagagcagagtgccaggtgaaaggagaggtggaggtcttgcctgatcatttcctggatgctctgaggttcggtcttgtagggagaagggagtaaacaggaatgaccacaaccctttcccgatctccttttttcctagtgtctcccctgtcagtgaaaaccaggtggcatccagcgagggctacgtgctgttctaccaaytgatgcaggagccaccccggtgcctgtgacacctytaagctctggcacctgtgaagccctttaaacacccttaagccccaggctccccgtttacctcagagacgtctatttttgtgtctttttaatcggggaggggggarggggtggttgtagctccattattttttttattaaaaaatacccttccacctggaggctcccttgtctcccagycccatgtacaaagctcaccaagcccctgcccatgtacagcccccagaccctctgcaatatcactttttgtgaataaatttattaagaaaaaatgatgtgcttatttgtatttttgcttagggggtgatagagaactgggccaaattggagtcttcttgggacccaagttccctctctaacaggtgggggcgctctcagagccgagggggaaggtttcggggatggtgctggacccggacctgtgtcccccagcagtgaaggttatgtactgggaggaaaagaggaaaggcatacttgagtgaggctgcgtgcaggctctggggcgactggtttggtcggcgatgggggagtgccactgttgacaaacactgggtacgttgccgggcggccctagctcccgtaggcccggtctgttgctaacatcaaggagctgtttatggagccgcctccccgtggactggccttaagtgtccctatctattctccctacgaccaaagctcctgcggccttccctctagggttgtcaccctagctggacctggtaagcttgtgctggggaacgctaactccagcattaagcgctcgccgcctcggtcctgaggagggcagtgacgggtacggccgctcactcccagctcggcgctaacacggttaacctccagctcttacagctgccgtcgctccgcctctgccagttcaatgttttattggtgaacgtgatccggggccttccaagtcccgccaatccagatgtaggagaggtagggttaggcgcgtgccgcgagaacagagtggacggagagtaggagagaccgaaaaggctgggggtgggagtagcggatttgaagcacttgttggcctacagaggtgtggcaagcagagcacctcagaactcaggcgtactgcccgccgcccgagccctgcgagggccgatagcgagggtgtggcccttatctgcacccagcagagcgccggcggggtacggtcttaggacctcgatctccttctccctcattttctctcatccctacctattgtgggtgagtcctggcccctggacggggacctcgctgttccaccagcccatccgtgcacacttagtttcccctaaagcagtgagtggccgggatagaactcaaaaccggcggggcttctggagcgcaggttgtccccggtctgcctgtccatatcgccccctttcccccaggtttccgcatgggccggaccgtggtcgtgctgggcggaggcatcagcggcttggccgccagttaccacctgagccgggccccctgcccccctaaggtgagtgctccacttgtgccagagggagcttcatttaatgctcttcccatttccatcaaaagctagatggatcctggccctctgaatatgcctcttcccctcccctcctgacctctcgccggcggctacaggcggtgctgcagtgtctctccctcttgtcgccaggtggtcctagtggagagcagtgagcgtctgggaggctggattcgctccgttcgaggccctaatggtgctatctttgagcttggacctcggggaattaggccagcgggagccctaggggcccggaccttgctcctggtgagaggcttgtgggatgtctaggagaggttgtggagggggcttccattggggaatagagtttaggggaggaagtatgtttggtgggtcagatcttcccttagtttctcctcttctgagggcatgtggagagcaggtttctgagcttggcttggattcagaagtgctgcctgtccggggagaccacccagctgcccagaacaggttcctctacgtgggcggtgccctgcatgccctacccactggcctcaggtaacaccagcacctccgctccttttactgtgccctcatcctcatatgccttccatttctttcttcttttctttttttttttttttttttttttttttgagacggagtatcgctctcgcccaggatggagtgcaatggcgcgatcttggctcactgcaacttccgcctttcgggttcaagcgattctcctgcctcagcctcccgagtagctgggactacaggtgcctaccaccacgtctggctagtttttgtatttttagtagagatggggtttcaccatattggccaggctggtcttgaactcctgaccttgtgatccgcccgcctcggcctgccaaagtgctgggattacaggcgtgagccaccacgcccgacctgccttccatttcttcatctccctgtcagccttcccagcaaaaggaagccaaatgagtggaaatgaccccagcgcctggagctggggaggtatgtcaggagcttccccctcactatgcctttctccatgcagggggctactccgcccttcaccccccttctccaaacctctgttttgggctgggctgagggagctgaccaagccccggggcaaagagcctgatgagactgtgcacagttttgcccagcgccgccttggacctgaggtgacacttgcccagaggccccaaacctcttccctcctaaaccagctgcagagctccctgttcaaatctaccacctaggggctcttctgtatcatttggggatgccctcttctcttcataccccaccccctcataattcccaaaactcattattgggagtgaaggccttcatttccatccgtcacagtgggaatgtcccccaacccaaaccctatcccaccctcattccctaccaaataggggctgtggaaatcagtcagtgtagattattttttcgctccttagtcctagtctcacccttaaggtggcgtctctagccatggacagtctctgccgtggagtgtttgcaggcaacagccgtgagctcagcatcaggtcctgctttcccagtctcttccaagctgagcaaacccatcgttccatattactgggcctgctgctgggggcaggtgaggggggattgattcagagggtgaaaatattaagtactgccaaagtgagggagtggggacaaggggtgctattcaatgattctttttttcttttttgagacggagtcttgctctgctgcctaggctggagtgcagtggtgcaatctcagatcggctcgctgcaacctccgcctcccagattcaagcaattctcctgcctcagcctcttaagtagctgggattacaaacatgtgccaccactcccagctaatctttgtatttttttgtagagatgcagtttcactatgttggccaggctggtctcaaactcctgacctcaagtgatccacccgcctcggcctcctaaagtgctgggattacaggtgtgagccactgcatccagcctcaatgattcttctttgcttcctctgcagggcggaccccacagccagactcagcactcattcgccaggccttggctgagcgctggagccagtggtcacttcgtggaggtctagagatgttgcctcaggcccttgaaacccacctgactagtaggggggtcagtgttctcagaggccagccggtctgtgggctcagcctccaggcagaagggcgctggaaggtaggggaacccctggagtgtaatgaacctgtcagtgtttccatctttatccaagtggcttaactaggccagggccgataggactggagttcctcattgtttttgtgccttagaagctacttagacatgggctaccccagaatcctaggccctatttgtgaaccttcctcaaagagcctatgcaagtctgtggatagaagtagtacttataagtggcttagagataggggaaagaacccagcttcactgaacatttcagaacagccacactggcctgtctggtccacttcctggagtacacagaggaatgattttttgtgaagtctacatagtcacccaatctcttcatcctgggtcagtacacagtctccccggccacatgggtgcctgggaaactgagagtgaggcaccagaagtctcttttcactcatcaaattctcattttctgggtctctcaaatgttttcatgctctcaggtatctctaagggacagcagtctggaggctgaccacgttattagtgccattccagcttcaggtaatggaatagccaccttccccttccccaacccctaccagtgagaagcaaaagctataccttcctgggtcagcaggaccacaccatgcccctgaactggtcatctctatgggagtctaatcccaaagaggactgacaactgtaatgggaatgccttctgagtcaggcctctgcctgatctctagtgctcagtgagctgctccctgctgaggctgcccctctggctcgtgccctgagtgccatcactgcagtgtctgtagctgtggtgaatctgcagtaccaaggagcccatctgcctgtccaggtatgataaagggacggagaggctgggcatggtggctcacacctgtaatcccagcattttgggaggccgaggtgggcagataacaaggtcaggagttcgagaccagcctggccaacatggtgaaaccccatctctacgaaaaatacaaaaattagccaggtgtggtggcttgcacctgtaatctcagctactcgggaggctaaggcaggagaatcgcttgaacccaggaggtggaggttgcagtgagctgagatctcgccattacactccagcctgggtgacagagtgagactctgtcccccccacccccccaaaaaaatgggaaggagagacagcctcagctagagccctttccttctgacgcatgaatgtccttctctccagggatttggacatttggtgccatcttcagaagatccaggagtcctgggaatcgtgtatgactcagttgctttccctgagcaggacgggagcccccctggcctcagagtgactgtgaggaggaggaaactttgcctagtggcatttccagagggctcctctgtgctccattgtaggcaaggccagactgatcagtgctatattccctccttaggtgatgctgggaggttcctggttacagacactggaggctagtggctgtgtcttatctcaggagctgtttcaacagcgggcccaggaagcagctgctacacaattaggactgaaggagatgccgagccactgcttggtccatctacacaaggtaagttgggataaacttccctcagctctccactgaaggccttgaagacagagactggaacatttgtcactgtatgtcagccaaggcctaggacatcaataataaacttttccctgcatcctctcctctcttctcagaactgcattccccagtatacactaggtcactggcaaaaactaggtaagttgggaaaacagctgggctgaggagggccaaggacatcagacccccagctaaaacattcctttcatcctttccttccagagtcagctaggcaattcctgactgctcacaggttgcccctgactctggctggagcctcctatgagggagttgctgttaatgactgtatagagagtgggcgccaggcagcagtcagtgtcctgggcacagaacctaacagctgatccccaactctcattcatgaaaataaaaattgctggagcttggcttggtctggctgttctatcacctataggcataagaatgcggggcagcaaagaggcaaagtgtgcctgggatgcagaaagcaggagcagatgcgagacaaagtcctttattagaaaatatatcaaaatcccagccccctgagccaggaccagaagagggagctattccagcataggcagaaaatgcccagggaggggcttccttcaccaaacaacttcccgggaaccataaatagaataaatattcacagaggtccgaggagaagccagatcactcttctctccatggaagagggaggggcttggggtccagccctgctcctactctaggggcagggactcctaggaatcgtcacataaaatcatgacatcaaggattcacagtcataagccctacaggagaccctagagagagggacccctcaggtctacaggagcccagctccagtccagcagtgagggagaggcccctaccccctagcacggcaccagagttcagttcc

SEQ ID NO: 8840 - DNA, 18705 bp, Homo sapiens
ggaggaggtgcctgtctctccttctagaagtgagcagtaaggctgggcacagtgacccatacctgtagtcccagcactttgggaggccaaggtgggaggatcacttgaggccagaagttcaagaccagcctgggggacatgatgaaacctggtctctacaaaaaatacaaaaaaaggcagggtgcagtggctcatgcctgtaatcccagcactttgggaggccaaggcaggtggatcatgaggtcagagttcaagatcagcctggtttgagaatctggtctctggttcgagaccagaccaggagttcgagaccagcctagtagatagaagatgaaaccccatagctactaaaaatacaaaatttagccagcacggtggtgggcacctgtaatcccagctacttgggaggctgaggcagaagaattgcttgaacctgggagacagaggtggcagtgagccaagatcatgccactgcactctagcctgggcatcagagcaagactccatctcaaaaaaaaaaaaaaaaaaaaaaaaaaaaaaaaaattagccaggtgtgcttgtgcacgcctgtagtcctagctactcagggaatggggtgggggctgaggtgggaggatcacttaaactcaggaggtggaggctgcagtgagctgtgattgtgccactgcactccagcctgggtgacagaatgagaacttgtttccaaaaaaaaaaaagaaagctgtaagactgcagggaacccatggatggtgggagggtgtcaggggggcatgatttctgtttgctaggtcaggttcaggttcttctatgttatacaaaaccaaagtgaggtaaagaggtaaagagaacagaccagaaaaccagaaactggaggataatatggtaagagaaagagctgagtgggagagagatctggaacaacagtgtaggctgaggggagttggaagggatagttttgggaagaaataacatccaagtagaaaatgttgaatggaagagggagaggaatatttttttttttgcaacagagtctccctctgttttccaggctggagtgcagtggcgccatctccacctcccaggtttaagcaattctcttgtctcagcctcccgagtagctggaattacaagcgtgtgctgccacacccggctaatttttgtatttttagtagagacagggtttcaccatgttggtcaggctggtctcgaactcctgacctcaggtgatccacctgcctcggcctcccaaagcgctgggattacaggcatgagtctctgcgctcggccgagacagaggattttaaagacattgggctgtccattaaaatgtgctcctaatccactgcccctttcccctgtctctgatatttccttgagaaattaagtagagatttaaattagtttttgattactaaactgggtttcttctattgtgttatgtgccatgactgggccagtgtgggccccaggatttattcagaatattgaaagacaggatgttgtggtggaaaccagcatgttaaaatttaagttttcagaaacataacagttctaggtgatgactaagtccagggtgtggccagggtgagacagagcagaagggaaggttcttgaaaacagggagcttacaaattaatgtaaaggaatggccagaagatagtagataggcctttgtggtggctcacaggaggctcacttgaggccaggaattcaagaccagcctgggcaacagagtgagactccgtctccacaaaaaactaaattagctaggtacacacctgtagtcctagctacttgagaggttgaggcaggaggatcaccttaacccaggagttcaaggctgcagtgggctataatcatgccattgcactccagcctgggtgacagagtgagtctctgactctaaaaaagaagatggttagatacagaaggagacagaaagtgaaggctgggcgcggtggctcaagcctgtaatcccaccactttgggaggccgaggtgggcagatcacctgaggttagcagtttgagaccaccctgaccaacatggagaaaccccgtctctactaaaaatacaaaattagccgggcgtggtagcacatgcctgtaatcccagctacttgggaggctgaggcaggagagttacttgaacccaggaggcggaggttgcggtgagctgcagatcatgctgttgcactccagcctgggcaacaagagagaaactccatcccaaaaaaaaaaaagaaagtgagggtcagtcctgtaagacagaacgcgatggaggaacagaggctcaaaggaagggtcctctgggagaaccacattttctctctttctctctttctttcttctttgagacagaatctggctctatcactcaggctggagtagtgcagtggtgcaatcagctcactgcagccttgaactcctgggttcaagtgatcctcccacctcagccctgtgagtagctggaactacagctgtgagccaccatgcccagctaatttttgtatttttcttggaagggaattttgccatattgcccaggctgatcttaaactcctgaactcaactgatccacctaactgggcctcccaaagtgttgggattacaggcgtgagccatgatgccaggccaagaaccacatttcaatgatctgtttaagtctgtcttttccactacacagtgatattcttaaaaaatcaaggctttttgagttatactatatcagaagctaaaaataataataaaaaataataaaagtaaaacaaacaaaaaatcaagtttgggaggccatagcgggaggatcacttcaacccaggagtttgagaccagcctgggcaacatagtgagactgtctcttcaaaaaaaaaaaattataataaaaaaaatcaaggctttgtcttggcttctatttgtgctcaaaagttttccatagttctaatgatcacaaaaccccttaaggctagagttcattttacagatgaaatccagagtgtattgctcagtacacagccaatgggtttcaaagttggtattgtatttaaacccagcattatctcattttgagccttcacaggcacctcaaactcattatgtctaaagtttgtcatctctaccccttccccaaaatgtgcttcttcctaagttttgtttctcattaaatggcaccacccagtggtccaaattagaaatctgggtgtcctcttggagtccaattccctaacttggcacatccagtcaatcttcaagtcctgtttgcctcctgaaagttcccaaagttactttcttccctccagtcccacgggtattacctattctgcatgagcttcatcttattcctggatttctgcagtaactttctaaatagtctccctgcctctggtcttgactacttcaattagtgctccacatttcctaaagttctgatcatagcactctctatttacagcactttaatgccttcttcttgccctctggataagacccaaactcttttagcatggtttgtggagtccttcattatttggcatttgcttacctctccagtctcatatctcaacattcccttcactctactgtccagccttgcgggcccagttttaatttcccaaactccctaatttcttcctcatttccagaattttgcacttatggtttcctctgcttggaacactattcatctgttaaaagttaattttctagctgggtgtggtggcgcatgcctgtaatcccagctactcgggaggctgaggcaggagaattggctgaacccaggaggcggaggttgcggtgagccaagatggtgccattgcactccagcctgggcaacaagagcaaaactctgtctcaaaaaaaaaaaaaaaaggtaattttcagaagaaggtaaaattatgacccttaaactgttgaagaaaaaattattctgacacttgttaaaacagtaaggaagactattgcaatagtcaatgagcagaatcagagtcagtggatggaaggaaaattacattaaggctaggaggattcttgctaaactgacctaacaggatctttcctgaaggcaggtgagggtgatcagatagatcagctatcaagggtggagaagcgggcagggaattatccctaaactgacttggcaggattcttgctataactggctaggcaggcccaagacagcgcataaggacaagacctagccaaaaagaggccttagaggagcctgttgaaagtctggttaaggagatggtctttgtcaataccaacataaaaatgaacacataggccgggtgcagtggctcatgcctataatcccagcactttgggaggctaaggtaggtggatcatgaggtcaggagttcaagaccagcctggccaagatggtgaaatcccgtctccactaaaatacaaaaattagccgggtttggtggcgggagcctgtaatcccaactactcggtaggctgaggcaggagaatcgcttgaatccgggaggcggaggttgcagtgagctcagatcgcaccactgcactctagcttgggtgacaaagcaagactccgactcaaaaaaaaaaaaattctccttgaagactgggtatttgggaaaaaaaaaaaggaaaggaaaggaaaaaaaagaaggaagggaagggaagggacgaagggagggagggaggaagaagggaaggaaggaaggaaggaaggaaggaaggaaggaaggaaggaaggaaggaaggaaaaagagaaataaaattaagaggcctgatgctgtggctgacgcctgtaatcccagcgctttgggaagccaaggtgggcagatagtttgagcccaggagttggagaccaacctggacaacatggtaaaactctgtgtcttcaaaaaatacaattagctggatgtgctgttgtcccagctactcagctactcacgggtctgaggtgggaggatcccttgagcctaggaggttgaggctgcagtgagctgtgatcttgccactgcactccagcctgggtgacagagtgagaccctgtcacaaatttttaaattaaaaaaaaaaaagtaaacaaaaaggccgggcgtggtggctcacacctgtaatcccagcactttgggaggccgaggcgggtggatcacctgaggtcgggagttccagaccagcctgaccaacacagagaaaccctgtctctactaaacatacaaaattagccgggtgtggtggcgcatgcctgtaatcccagctactgaggaaggctgaggcagaggtcgcggtgagccgagatagcgccattgcactccagcctgggcaacaggagggagactccctctcaaaaaaaaaaaaaaaaagtaaagaaaaaagaaattaagaaaagaatgaacacgtgtttattttacctaactcatgaagaaactagcagatgttataattaatacaagagaaaatctagagaacggacatatttatggatcaggaaaacagaaatgaatatgaaaatggacgccaaaactgctttttttccccacagtgtggggaacagcaggttaattgaacctctaccagacaggatagaatttgcatacagatcagttacctacatgaattgtaaaataactcccatgaaaacagaatctttaaagcagaaggatatgctatagacaagtccttcaggtttcccattagccatcacttctgggaagcctttctagaatctccacgtatgaatgagttgccacttctaggccagcatatttatcacgttatattgtttacatccctccctccatacaagatacacaagaccatgggctttttggggcagattctgtgagttattcaagtctctgattgcttcttcagcgtgaatatctgcttctaaggaacacaatatgctaggcggtagtgtttgtcgtaaggtaaacatattgcatgttaacggagcatccattttactctaatatctggggaaacatcatttgactttaaagaagacgctgtctttccctccaccttcaatgtttcattgttttattaactaatcgcyttttatttccaggcctgcgggatacaacgggaatacaaaaatgcgctagagcggtccgcaacgctgtagcctgcgtaaggaacaattgatactaagtggcactaggctgcagggggtgccactgacacactgggagagggctcagccaaccacaaggtgataacgaggtcagcggagcaccagaaaccggctcactagcctcctgatcagtctcggcccagaggaaaatgaagggcttgagcttctgcttttacaaatctgaggggcaggaaatgaaatcccactagcagtctgcgtagtggagttgaaccctagcacccgctccccagggggtcgcctacaacgcgttccaggtgggcaggctcaggcgctgctccctcacaagcccccggccacgcggtgtctgggaccgggtgcctagtcagcccgggtggctccgccccgaggccccgccccatgacgcgagaccccgcccccgcagcgcccgcttccaagatggcggcagcgatgcctgcccggctgttggggtggcggtgacgacaggcagcaaaagaccaggtatgtgcgctgggaatgcgtcgacacggaggcctgggataaaggtttgggcattcgagagagtgagaagttttgggtaacgcctggagacgagcctgagcagggacggggtcctaggtggaagtatggacgggggccgggcgggctcacgttgctagtaggtagggcaaaagcaagagactgggataggatgggcgtgctccgaaagagctgggttttaaccccctccacagcgcggaccacgcccctctaggtgagcccttccagccacccctgactgtctctgcccctgctctccctctccctttctcttcagcagtaaccctcctccccacccccgctagaagaggggaaaggtagaaaaggtagaggacgccacccccaccctactctccgccgagctccggggctgttcgcttacagcccccaggtggtcacggtccctgcacctgaggagttggcacccaggcacatgaagaatagaaggagcctgtttcctacttcgccctgggtactccttaggccactccacggtcctgtcatgactctgtcgccacttcaactggttcttggtctgggggaaaacaatgtttccattagctgtcctgtccccactccccaatctgtcctgttggggtgggggtacgggggtggttaagtatgaacctgacacttatcattccagggtagcacgggagataggcgagggacctaccatctcctgctcctcctcttcctttccaaccactttccttcacttcgcctgctgggaaaccagcttcaccctgatcctgatctctggcggtgcaggtagctagttatcctttaccacttctgttccagctggtcccagattcgctgctggagtgctggatggagcctttctctgccctctgtgacatttccaattttagataatgcctcacatctctgtccccccgggaccccctggagcccccatgatccctaagaagacagcttgaacctaggtgagtctatctcttcccttctaaaattggaagagggggttctctagagactttctgaaatgaacatgagatttgaatgatgtaaacatttttgggggtgaggactgacagtagatggtgggagtggtttggggggaggtagaggagagcgaaacttgggctgaagtgacaggtggtagggttactggtggttacattctgtttccttgcgtgactgtgcacctgtgtgctcccttctgtgactttgttttctgctttttcctctttacccctggcatcaccttcaaccctacctactgacctctctgctggcttgctctcttcctgcctacccccagaattcccctctccctccctagatctcacccccaggatgttgcggaggctgctggagcggccttgcacgctggccctgcttgtgggctcccagctggctgtcatgatgtacctgtcactggggggcttccgaagtctcagtgccctatttggccgagatcagggaccgacatttgactattctcaccctcgtgatgtctacagtaacctcagtcacctgcctggggccccagggggtcctccagctcctcaaggtctgccctactgtccagaacgatctcctctcttaggtaagtgcaggaggaaggaggtggtgaaaggaaggacaaggtgcggagacagggaggcttggggatagggaggcatggagtggcagaagtggaacttagaagaggataggtaggctgaggctgcaggtaggctgaggttgagatagagggctgaggttgagatagagtagactctgaattgggagtttagattagactattgggtttccactttctactgcttgtccctttatgggctcttcctgccccaggctaggaattgttttccttgtagatgagccctggtttaattagttgcaagtctctccagccttcaactatagcttccaaccctgtaagacaggagaaagttaggcaaccctaaaataagaagagaaggctaggtaaggatcctgcaccttccagcctttgtagagctgtcccagtgataggtaatccaaggcatgcgagatttctgagtgagccctgagaaytaagccccagaaccagactgccagtgtcagaggtattcccaaaccctagtttgattcttttctctttgcccctctgatccctctacttgccattccttcccaacagtgggtcctgtgtcrgtgtcctttagcccagtgccatcactggcagagattgtggagcggaatccccgggtagaaccagggggccggtaccgccctgcaggttgtgagccccgctcccgaacagccatcattgtgcctcatcgtgcccgggagcaccacctgcgcctgctgctctaccacctgcaccccttcttgcagcgccagcagcttgcttatggcatctatgtcatccaccaggtacccccaatctccacctcattttgactgactttcttctaaggaagcctcaagcacatgccacttcactttcatctaaatgggtccctagaataattttaagaaggccagactgttagagtgtggagaagcacccggcactgctcttccaactttgttagtcccatacttttccttaatctgcttaggttattcccactgtcctacactctcctgtgattttttctttattgaatggcttgtgcagagttggaattggacacaatagggctaaaattctagttccgtcacttgttacatgtatgactctgagcaagatacttaaacatctaacatgaggaaagagcataagataactaatataccatctgttccacaccacaccattgttggttgccaattgtcaggattaaatgttagacagcagcatcttaagtatcaggtccataccaatacacaagcaagatttgtcaaatgactaagtggaaaaatgaaaaagatagtctttctttttcattctccttgccctccaccccactttgatttccctcttttcacttttattcttttttttctttttttttttttttgagatctcactctgtcccccaggctggagtgcagtggcacgatctcggctgactgcaagctccacctcccgggttttacgccattctcctgcctcagcctcctgagtagctgggactacaggcgtgtaccaccatgcccagctaattttttgtatttttagtagagatggggttttaccgtgttagccagggtggtctcaatctcctgaccttgtgatctgccygccttggcctcccaaagtactgggattacaggcgtaagccaccgcgcccggccttcacttttattctttagcccccttttctccgtgccacctacagacatagtctggttcccctccattatcttccaggctggaaatggaacatttaacagggcaaaactgttgaaygttggggtgcgagaggccctgcgtgatgaagagtgggactgcctgttcttgcacgatgtggacctcttgccagaaaatgaccacaatctgtatgtgtgtgacccccggggaccccgccatgttgccgttgctatgaacaagtttggatacaggtagagggcatggaagggtactgggaaacaggraagcctactatcctgtggaaggaggagagccaagcggattgtggttggggatgtgtccccagaagactcggggtatgcaaggatctttctctccctagcctcccgtacccccagtacttcggaggagtctcagcacttactcctgaccagtacctgaagatgaatggcttccccaatgaatactggggctggggtggtgaggatgacgacattgctaccaggtcagacttcctgccacttcctccctcctgaccccagtctggatccctgtcctctaagaccacctttgaccatagcccttcarcactaacctttagctccctggtcctgcactgagcccattcctttcccttagtctttttaggayacccaggtcaggcttgcatgctactgcccattgtgtcatccttcagtctcctggttagtttgttcttgggagaggacataagatcaataggaaatagtatcgtcggattccagaactggaaaggggcccagagacagcttagtcttgccttctgctggggttccagccaggccacttcctatggggttaggagagaggggctctgctccatgttcccagaatcgctttgtaaaaggcctgtgccattggcacagggccaactcatttttagcatgtgaaacattctgaccttcagcctcagctgacccaatttcatgtctgtggtatgaatatttgggcttggtatgcaggaccaattgcctccattccccctgtgtcctctgtgatgacatctctgtgaattctcatcctctgtatgtgtgtgaaatacccagtgaattgtaaatatacataagtattcttctagttccttcccaggccatctgcactccatgcttctgtgtgtcagaagtggagtttgtttcttttaaggtcctgattacctggttctacccttttcttttctttctttcgttttttttttttttctttttctctagagacaaggtcccattattttcccaggctggtcttgaactcctggcctcaagtgatccttctgccttggcatccaaaagtgctaggattgcaggtgtgagccactgcacctggcctacctttttcttaacatgggggatgtgggagagaagctggggtagctcagtcactatthtaagattctcagcaactcccagtcttctcttattcttttgacagaatggcctctctctgcgtccttcctagactgcaagggcagctcctaggagccctttaggaagccaagggaataggttgccaactgtttaaaggccctagggtgactggcactgggccctgaggatttggatacatccagcttttatattctcttcagccatttccttctttctgtttgacttctgtcctgggctttttttttcttttgcctactaagtaatagttgtttttttgtgtgtacagaaacatttaatcccttccttgcttttctctactctggatcccccatgataccctcacttttcccatagggtgcgcctggctgggatgaagatctctcggccccccacatctgtaggacactataagatggtgaagcaccgaggagataagggcaatgaggaaaatccccacaggtaggaagaaggaaggactgcctgggaattgttactggatcctcasggttctgtacccctagccaggaaaatcctaaaggtccctagatttctggctgttcctttctgggtcttagtctccaacctctaaccctcagatttgacctcctggtccgtacccagaattcctggacgcaagatgggatgaactcactgacataccagttgctggctcgagagctggggcctctttataccaacatcacagcagacattgggactgaccctcggggtcctcgggctccttctgggccacgttacccacctggttcctcccaagccttccgtcaagagatgctgcaacgccggcccccagccaggcctgggcctctatctactgccaaccacacagccctccgaggttcacactgactcctccttcctgtctaccttaatcatgaaaccgaattcatggggttgtattctccccaccctcagctcctcactgttctcagagggatgtgagggaactgaactctggtgccgtgctagggggtaggggcctctccctcactgctggactggagctgggctcctgtagacctsaggggtccctctctctagggtctcctgtagggcttatgactgygaatccttgatgtcatgattttatgtgacgattcctaggagtccctgcccctagagtaggagcagggctggaccccaagcccctccctcttccatggagagaagagtgatctggcttctcctcggacctctgtgaatatttattctatttatggttcccgggaagttgtttggtgaaggaagcccctccctgggcattttctgcctatgctggaatagctccctcttctggtcctggctcagggggctgggattttgatatattttctaataaaggactttgtctcgcatctgctcctgctttctgcatcccaggcacactttgcctctttgctgccccgcattcttatgcctataggtgatagaacagccagaccaagccaagctccagcaatttttattttcatgaatgagagttggggatcagctgttaggttctgtgcccaggacactgactgctgcctggcgcccactctctatacagtcattaacagcaactccctcataggaggctccagccagagtcaggggcaacctgtgagcagtcaggaattgcctagctgactctggaaggaaaggatgaaaggaatgttttagctgggggtctgatgtccttggccctcctcagcccagctgttttcccaacttacctagtttttgccagtgacctagtgtatactggggaatgcagttctgagaagagaggagaggatgcagggaaaagtttattattgatgtcctaggccttggctgacatacagtgacaaatgttccagtctctgtcttcaaggccttcagtggagagctgagggaagtttatcccaacttaccttgtgtagatggaccaagcagtggctcggcatctccttcagtcctaattgtgtagcagctgcttcctgggcccgctgttgaaacagctcctgagataagacacagccactagcctccagtgtctgtaaccaggaacctcccagcatcacctaaggagggaatatagcactgatcagtctggccttgcctacaatggagcacagaggagccctctggaaatgccactaggcaaagtttcctcctcctcacagtcactctgaggccaggggggctcccgtcctgctcagggaaagcaactgagtcatacacgattcccaggactcctggatcttctgaagatggcaccaaatgtccaaatccctggagagaaggacattcatgcgtcagaaggaaagggctctagctgaggctgtctctccttcccatttttttgggggggtgggggggacagagtctcactctgtcacccaggctggagtgtaatggcgagatctcagctcactgcaacctccacctcctgggttcaagcgattctcctgccttagcctcccgagtagctgagattacaggtgcaagccaccacacctggctaatttttgtatttttcgtagagatggggtttcaccatgttggccaggctggtctcgaactcctgaccttgttatctgcccacctcggcctcccaaaatgctgggattacaggtgtgagccaccatgcccagcctctccgtccctttatcatacctggacaggcagatgggctccttggtactgcagattcaccacagctacagacactgcagtgatggcactcagggcacgagccagaggggcagcctcagcagggagcagctcactgagcactagagatcaggcagaggcctgactcagaaggcattcccattacagttgtcagtcctctttgggattagactcccatagagatgaccagttcaggggcatggtgtggtcctgctgacccaggaaggtatagcttttgcttctcactggtaggggttggggaaggggaaggtggctattccattacctgaagctggaatggcactaataacgtggtcagcctccagactgctgtcccttagagatacctgagagcatgaaaacatttgagagacccagaaaatgagaatttgatgagtgaaaagagacttctggtgcctcactctcagtttcccaggcacccatgtggccggggagactgtgtactgacccaggatgaagagattgggtgactatgtagacttcacaaaaaatcattcctctgtgtactccaggaagtggaccagacaggccagtgtggctgttctgaaatgttcagtgaagctgggttctttcccctatctctaagccacttataagtactacttctatccacagacttgcataggctctttgaggaaggttcacaaatagggcctaggattctggggtagcccatgtctaagtagcttctaaggcacaaaaacaatgaggaactccagtcctatcggccctggcctagttaagccacttggataaagatggaaacactgacaggttcattacactccaggggttcccctaccttccagcgcccttctgcctggaggctgagcccacagaccggctggcctctgagaacactgacccccctactagtcaggtgggtttcaagggcctgaggcaacatctctagacctccacgaagtgaccactggctccagcgctcagccaaggcctggcgaatgagtgctgagtctggctgtggggtccgccctgcagaggaagcaaagaagaatcattgaggctggatgcagtggctcacacctgtaatcccagcactttaggaggccgaggcgggtggatcacttgaggtcaggagtttgagaccagcctggccaacatagtgaaactgcatctctacaaaaaaatacaaagattagctgggagtggtggcacatgtttgtaatcccagctacttaagaggctgaggcaggagaattgcttgaatctgggaggcggaggttgcagcgagccgatctgagattgcaccactgcactccagcctaggcagcagagcaagactccgtctcaaaaaagaaaaaaagaatcattgaatagcaccccttgtccccactccctcactttggcagtacttaatattttcaccctctgaatcaatcccccctcacctgcccccagcagcaggcccagtaatatggaacgatgggtttgctcagcttggaagagactgggaaagcaggacctgatgctgagctcacggctgttgcctgcaaacactccacggcagagactgtccatggctagagacgccaccttaagggtgagactaggactaaggagcgaaaaaataatctacactgactgatttccacagcccctatttggtagggaatgagggtgggatagggtttgggttgggggacattcccactgtgacggatggaaatgaaggccttcactcccaataatgagttttgggaattatgagggggtggggtatgaagagaagagggcatccccaaatgatacagaagagcccctaggtggtagatttgaacagggagctctgcagctggtttaggagggaagaggtttggggcctctgggcaagtgtcacctcaggtccaaggcggcgctgggcaaaactgtgcacagtctcatcaggctctttgccccggggcttggtcagctccctcagcccagcccaaaacagaggtttggagaaggggggtgaagggcggagtagccccctgcatggagaaaggcatagtgagggggaagctcctgacatacctccccagctccaggcgctggggtcatttccactcatttggcttccttttgctgggaaggctgacagggagatgaagaaatggaaggcaggtcgggcgtggtggctcacgcctgtaatcccagcactttggcaggccgaggcgggcggatcacaaggtcaggagttcaagaccagcctggccaatatggtgaaaccccatctctactaaaaatacaaaaactagccagacgtggtggtaggcacctgtagtcccagctactcgggaggctgaggcaggagaatcgcttgaacccgaaaggcggaagttgcagtgagccaagatcgcgccattgcactccatcctgggcgagagcgatactccgtctcaaaaaaaaaaaaaaaaaaaaaaaaaaagaaaagaagaaagaaatggaaggcatatgaggatgagggcacagtaaaaggagcggaggtgctggtgttacctgaggccagtgggtagggcatgcagggcaccgcccacgtagaggaacctgttctgggcagctgggtggtctccccggacaggcagcacttctgaatccaagccaagctcagaaacctgctctccacatgccctcagaagaggagaaactaagggaagatctgacccaccaaacatacttcctcccctaaactctattccccaatggaagccccctccacaacctctcctagacatcccacaagcctctcaccaggagcaaggtccgggcccctagggctcccgctggcctaattccccgaggtccaagctcaaagatagcaccattagggcctcgaacggagcgaatccagcctcccagacgctcactgctctccactaggaccacctggcgacaagagggagagacactgcagcaccgcctgtagccgccggcgagaggtcaggaggggaggggaagaggcatattcagagggccaggatccatctagcttttgatggaaatgggaagagcattaaatgaagctccctctggcacaagtggagcactcaccttaggggggcagggggcccggctcaggtggtaactggcggccaagccgctgatgcctccgcccagcacgaccacggtccggcccatgcggaaacctgggggaaagggggcgatatggacaggcagaccggggacaacctgcgctccagaagccccgccggttttgagttctatcccggccactcactgctttaggggaaactaagtgtgcacggatgggctggtggaacagcgaggtccccgtccaggggccaggactcacccacaataggtagggatgagagaaaatgagggagaaggagatcgaggtcctaagaccgtaccccgccggcgctctgctgggtgcagataagggccacaccctcgctatcggccctcgcagggctcgggcggcgggcagtacgcctgagttctgaggtgctctgcttgccacacctctgtaggccaacaagtgcttcaaatccgctactcccacccccagccttttcggtctctcctactctccgtccactctgttctcgcggcacgcgcctaaccctacctctcctacatctggattggcgggacttggaaggccccggatcacgttcaccaataaaacattgaactggcagaggcggagcgacggcagctgtaagagctggaggttaaccgtgttagcgccgagctgggagtgagcggccgtacccgtcactgccctcctcaggaccgaggcggcgagcgcttaatgctggagttagcgttccccagcacaagcttaccaggtccagctagggtgacaaccctagagggaaggccgcaggagctttggtcgtagggagaatagatagggacacttaaggccagtccacggggaggcggctccataaacagctccttgatgttagcaacagaccgggcctacgggagctagggccgcccggcaacgtacccagtgtttgtcaacagtggcactcccccatcgccgaccaaaccagtcgccccagagcctgcacgcagcctcactcaagtatgcctttcctcttttcctcccagtacataaccttcactgctgggggacacaggtccgggtccagcaccatccccgaaaccttccccctcggctctgagagcgcccccacctgttagagagggaacttgggtcccaagaagactccaatttggcccagttctctatcaccccctaagcaaaaatacaaataagcacatcattttttcttaataaatttattcacaaaaagtgatattgcagagggtctgggggctgtacatgggcaggggcttggtgagctttgtacatggggctgggagacaagggagcctccaggtggaagggtattttttaataaaaaaaataatggagctacaaccaccccctcccccctccccgattaaaaagacacaaaaatagacgtctctgaggtaaacggggagcctggggcttaagggtgtttaaagggcttcacaggtgccagagcttagaggtgtcacaggcaccggggtggctcctgcatcagttggtagaacagcacgtagccctcgctggatgccacctggttttcactgacaggggagacactaggaaaaaaggagatcgggaaagggttgtggtcattcctgtttactccc

SEQ ID NO: 8841 - DNA, 22272 bp, Homo sapiens
ctcacagtgggagggaggtggggggtgggcagaccaacaccacaagagagtgcatccaggccccggagctgctcagtagacactaccatgtgtagctggtgttctgtcagtgccagccacgggcctgctatgagcaagaaggcaagacctgccctccagaggctcacaggggctccaggcccctgtggatcatgcactcgagttggggaaactgcagacattctggaaggcccttctgaaggcaggccagcccccagcctgtccccttggtgtgtttctgggtcttttcagtgctgccttgctgagtgcttgcaggtttggattgtctttttgcattgactgaagccaaaagcagctttaggtagttcatctaaaggtagaaatgagtagatagacacaactcccaatacatgcctaagccaaagagaaatgcatttgactgactcgcagtcatgtatctcccagacacaatttgtgtggatcattctgagtcagtaagtgtagattaacctgagggtaggggtcattggaggggccagagggaaaccaagggtggcaggttcccaccagagccctgccttctgggattgatctgggtggggaaaattaatggtgtaggtgccaaacacaggggctaagctccctctaccatccacaggccttggacgatgccaacaagggtatcatcagagaactgaggaaaaccaactacgtggagaatctcaaagaaaaaagcgagggaggtgagttcctgaaactctgaaaaggcaacttcagcattctccctctgctttcttttcctctagtccgagacacatgcgacagcagctccccaatctgggggcttggcactgcccatcgtgcattctaatttcagtgccaccagcagccctagcctatctctggggcagtagagggtgaggattcagcccaccatgggctggactgtctggccccagagcgcactcatttctctcttcaattgattcatcaagtatatggtgagcacttgtcatgtacctggaaggtgttagattctggggagagaggcccatccctgccctggaggagcccatggccctttgggcaaggctgaccagtggagttgtcagctgctgggatcctgcacacaggtgctacaccgaggtggaggtgtgctgccatgagggtgcatgcaacggggcgtgggctcctctggggaggcagaggaggcttcgaagaggaaaaatcttctacctccaactccaaaagatgcccaggagttttccaggagagaagtgggagaagaaaggcatttttccagcagggaacagcagggccagaggcacagagacagaataacagtagctacactttgggggctcttactgtgtgctaggcactgggttaagcaccagacaggagtgatcttgttgggtctttaccccactaggaggtgtaggtgctgtggggggaaagggaggctgagtgaggtgagtgctctgccagagtcatgtagctagggaggggtgactcggggccccactctccccacctgcggcgctgctctcgggccagcagtgtgatgggcaggtgcagaggggcataaggtgcagaggctgcctgacagctgtgccttaccacattctttctcacaaggtctccagggagtaaacaggcctttggccccctgcctttgggctctcctttcctgcagggagggagtgagggaaggagaagcagaagatggctgagcagccctaccccactggagaggggcctagaggaacaggggtgttaagcgcagtagccgacccccattcatgcttcccgcaggccaggcattctttcaaagactgtgtgcacggactcatcctatctgtatctgttcaggaacactatgaaggaagtgttattagcttgactttatggaggacatggaggcagaggggttagaggctacagtggttttcagtcttgggcagtctgctctagaacccacgcgtcggcccgtgccacactgtttctagtgacacagacagccttttcctgccccagtctgtggagctctcactccagccagactgcagtgaacagagctggggctggaggtccgggaggacagagcccaatgcagattcttggctgcagccctccaggctgcaaggctgaaatcctttctggtccaggcagggcagcgggaggtttctgggcacctgagcagccagatgacagccctttattatccagcacctgctctgtggtggctggaccccctcagaggggctctgtctccgcccccacatgccctttgagctgctctgagaagccacaggagcaacagctgtggagagagactctgcggggaagcagccaacaccccagtctccctaccctggcctgcgtccttgtgcctggagaactgccgggcacgtccctctcagaacagcaggtggcagcattgcatctgttttcaccaccaaagggctgtgaccccctgagacctgagaccctctgcagatacctcagtaactagtggtttccaggaggagaatgtaagggagacgcagaaggggatgtaacttttctccataactgataaaaaaaaaaatttaggagcaaggatccctttgcttgtaaaataactcttcagctgaactttttgttagcagcgtatatctttataggaaacctatctttttccttatgttttttctatattttcataggaaacctcccaacaaataatgaatgtgcttcccagggacaaagagaaagtgtcagaatgaagatgctggagaaaatccttctgtcattttccagcacctatgctatttcttgcagggaaaagaggtgttctggggtcagactgtcctgggttcaaattctgtctcacttgcacacttgcagtgtgaccattgtgtgatttcttttctttctttttttttttttttgaaacggagtcttgttctgtcatccaggctggagtgcagtggtgcaatctcagctcactgcaacctccatctcagcctcccaaagtgctgggattacaggcatgagccactgtgcctttttttttttgaaatggagtctcccctctgttacccagtctggagtgcagtggcgcgatctcagctcactgcaacctccatctcagcctcccaaagtgctgggattacaggcatgagccactgtgcctttttttttttttgaaatggagtctcccctctgttacccagtctggagtgcagtggcgcgatctcggctcactacaacctccgcctcctaggttcaagtgattctcctgcctcagcctcctgagtagctgggactacagtcttgtgccaccactcccggttaattttttttttttttgagatggagttttgctcttgttgcccaggctggagtacaatggcacaatcttggctcactgcaacctccgcctcctgggttcaagcgattctcctgcctcagcctcccaagtagctgggattacaggcgcctgccaccatgcccagcttatttttgtatttttagtagagacggggtttcaccttgttggccaggctggtctcaaactcctgacctcaggtgatccacctgcctcggcctcccaaagtgctgggattacaggcgtgagccatgccgcccggccgtgtgatttcttttctatcgatctcaggtcccttgactgcaaactcaaatcaacggcagtgcgcattttcatgatgtctggatgggataagctatacagccctcacgtgatgcacaggacggagctgggctcagtcaatgatggttccctttctctgcttttggaaaggtgtgctgtcaacaccaatttaaagagctggcaaaaacagtcattctcagggcctttctctcatcggcctctcaaaagcacaggcctccacagagatgaacagtttctttcttttttttcttctttcttttttggagacgggtcttgctctgtcacccaggctgcagtgcagtggctggattttggctcatcacagccccaacctcctgggctcaagcgattcttctgcctcagcctccgggtagctgggactacaggcgccaaccaccacgcctggctaatttttgtatttttagtacagacagggtctcactgtgtcgcccaggctggtctggaactcctggcctcaagggatctgcctgcctcagcctcccaaagtgctgagattacaggcgtgagccaccgcacccggcctgacatgaacaaacttttatctttcttcccgcttttctcttatttttcagaagcttcactgtatgaagatagaataataacaagagagaaggacatgaggagagtgagagatgagcccgagaaggtggtgaagcagtgggaccatagtgaggatgagaaagagacagatgaggacgatgaggcttttggggaagctctgcagagcccagcaagcggaaagcagagtgtggaagcaggaaaagccagaagcgatttgggagcagttgccaagggcctgtcaggagaattaggcacaagatcaggagaaacaggcaggaagctactagaagctggcagaagagagtcaagagaaatttataggaggccttcgggagaattagagcaaagactctcaggagaattcagcagacaggaaccagaagaactaaagaaactttcagaagtgggcagaagagagccagaagaactgggaaaaacacaatttggagaaataggagaaacgaaaaaaacaggaaatgagatggaaaaggaatatgaatgaagccatcggtagagatgaggatcaggaagctggtgttcagagggatcatgggattttattaaactggattttcaagcgatttgtctgttataggaaaaatgagggttttacttctgctgctttccatcactattttgccattaaataggtgtctttcactcttgcaaaccctgagtctgtcactttgcctcttcacccctgcccattcttggaagagcatcgtggaagaaatgagaaaggtgccaagaagaaagggtttcaggagggtgaagatacgggcgctacagggaacaagaagtcacagggaggagaggggaaggcctgggaggagaggtgcttcccacacaccggtgactgactgagtccctccagtgcgcaggacagcggggaggctttatggatggaacagtggtggggcggccccagctgtcacaggtaggagaatgccgcaagccagaaccaagcgaatgctgggagtgaggccaaagataggggagtggcctgggagtcgggagggcagacagactccgcctctgacacctctgggtggcataatcaggtaaatcaggctctccaagctggcttctcctctgaacaatgggatacctgcctcaggggttgctgcgaggactgagtgcttagcacagcacttggacaggaaactcaaaaatccaacggagctctcagtggtttcacagaggaggtggcagctgaggatctggcctcagaggatgttaggatttcactccgttactcatctgtccctttggccattgccatcctggtctgtctccacagctcctagaaggaaaggtcggggctgagactgactttcggctggcacagggcctggacgaatgaggccagtgaggcatttcagatgcagagtttaccggaatgccagcaaattgcatgataatattttaatccaatgtggtaaaaaaaaaagtttttaattaatgcaaaagtccatgatgaataaaatatcaaaaattaaagacaggatccgactttgcacgaccctgcctcactcacttcctgctaatccacaggaccggggagggtgactgagttacccctcaacacgcagaaaaagctagtggccgctcagctcgcaggcgcagtgggtgggtgcgcgtggggagcaggcgcgcgcagggggcgggaccgggccgaggttcccgcgcgcggcgagagtttcgggttttggttcgcagcgcctgcgcgcagaggagacggcccgcccccagcccgcccgggtgcccgctccgccccccgggctatgtaaagcggccgggctcgggtygtgccaccgctggactcccgtgtccctccgcgcaggcgggcggccccggagcgctggtgccggcagaggcggcgacggtggcgcccctcctcatcatggtgagaggccgggcggggccgggcacggggtagcaccagggcgggaaacgagtgtcggggcccctcgggaggaagcgtcttgcaaacgaggacccggggctccgggttcgacttccagttttcttggtactcagggcggccctgaggtctgggagaagcggaggggttttggggtgccggagaggccgctgtaaagggaaacggtggtgtttctcaggagggaactcgggaccgcagaagctgctgcgcctctgggagcctgggtgggcctgggccgggagcccgggagctgctcccgaccccacgcaggcccgcgctggggcagccgcttcggcgccccctccccgggcccagtctcatcacgcggaaccgctgccccgcgcccgggtgcgggcgggaggtggagccagttcagaggaggggaccctttacggtaaaagctgccgtcccttgtggcttctagaagataggaaaacaagtggctccgagaggcgcttctgacacacagcacagcggcgggtagagctggatcctaattgcaggtgccctgtgctgccctgttctggacaggcacaaagaccacgactttgtgggggccgggagagggtagaggaggaggtggcaggcttggtgaaagagggcctttgtccagtgctctcctgccctgccccccaccagcccttctgtgggaccattgtacccgcatgccagacaagagagtattatctgttgcggccattgttgggggaagggaggcagtcttggggtaacccttctccactcccccccttctctgtgcactcagccgtggcagctgtggcttggcccagacacagagacccccacctccaaagaggacgtccttagtaggtgccaagcatataagagtgaggccagtcccagaaccgcaggctcctggcgcgccccgcatgcctccagcacgtttacctttccgaagtggcaggaatggggaaagcgcacgcttaggagagcttcagacaagcttccctcttcctcctccacgaccagaagcggaaaggtgctcccggaccgaaagggaaagaaggtccagcactgccccgcttgggaaggcacccacaaccagtctagggactaggggtaaggccggcggggagcccgcgaatgacctgggctgacatctcttcccctccttacacagaacagaggcttctcccgaaaaagccacacattcctgcccaagatcttcttccgcaagatgtcatcctcaggggccaaggacaagcctgagctgcagtttcccttccttcaggatgaggacacagtggccacgctgctagagtgcaagacgctcttcatcttgcgcggcctgccaggaagcggcaagtccacgctggcacgggtcatcgtggacaagtaccgtgatggcaccaagatggtgtcggctgacgcttacaagatcacccccggcgctcgaggagccttctccgaggagtacaagcggctcgatgaggacctggctgcctactgccgccgccgggacatcagaattcttgtgcttgatgacaccaaccacgaacgggaacggctggagcagctctttgaaatggccgaccagtaccagtaccaggtggtgctggtggagcccaagacggcgtggcggctggactgtgcccagctcaaggagaagaaccagtggcagctgtcggctgatgacctgaagaagctgaagcctgggctggagaaggacttcctgccgctctacttcggctggttcctgaccaagaagagctctgagaccctccgcaaagccggccrggtcttcctggaagagctggggaaccacaaggccttcaagaaggagctgcgacaatgtaggtggcaggktggggccttataagcccaccttgctgggcacagggtgctgcgggcaaaggaccatcattgtactcaaaggatggagcacgaagcagcaggaggcagagagaggctcacctcagcgggggcaggggcaagcggtgcgtcccagtggtagccttggggagttggcagcacattgggaacacgggggcttcccagagcgcctttcctcccaccacacctatccttctagccctcttctctccgacacccttttcccagcctgaatgtagaccactgtcccttgtcttggaggtgggaaaaacaaattactgtagtaacaggaaacatgtcctcttctaatgtaaccttagagggggaatcaagcccagtgttttccaacgcatttttagcagcagaatcatgttccaaaaaataataataataatcacatgaaattgtaagctgcaaaaaaattaaaactaggactattgtggcttcactggggatggttctcaggcctcggactrctcaatttactcatgggtttgtggcatctgcagctccagaggacacaagtctcacacttaggccaaaacccgttttcagatggaaaaacatggacccaggagggatgtggggtttacgggctggaaccctggactctggccactctagcagggttctctcttggcatgggctttttgctccaatgataggtttgagataaagaagggtcctggtggctctcctggagtgacctgttggagaagtgccacccactaatccatctatatgcctttaggccatttctggttgcctccaattttatttatttatttattgtgacacggagtctccctctgttgcccaggctggagtgcagtggcgctatctcagctcagtgcaacctctgcctcccagattcaagcaattctcctgcctcagcctctcgagtagctaggactacaggtgtgcaccaccacgtccagctaatttttgtatttttagtagagacggagtttcacaatgttggccaggctggtattgaactcctgacctcaggtgatccgcttgccttggcctcccaaagtgctgggattacaggcgtgagccaccaccgcacccagccacccccaattttagatgatcttcatgcctgaaatagccccactctggtttgttgacattgtgtatattgcacagaagcagggaatttgtgcctgtatgggttctcagagagcttttttctcagctcctaaacttgaactctgcagtgaactgtggtgcttgcagtgacattggccaggagcaagccctgtacctgtgagctggtggctctgccctgggagtgactactgctcaaagttgcttttaatatttatttatgagacggagtcttgctctgttgcccaggctggagtgcagtggcatgatctcggctcactgcaacctccgcctcctgggttcaagccaattctctgcctcagcttcccaagtagctgggaatacaggcgcctgccaccatgcccggctaatttttttttatttttgtatttttagtagagacagggtttcaccatcttgaccaggctggtcggtagcacaaaagaaaggaggggcccttggcccaagatgggacgaatcaagcttgacaggatgattgccagatcttttttttttttttttttgagacgggggtcttgctctgtcgcccaggctggagtgcagtggggcaatttggcttactgcaacctccatctcccgggttcaagcaattctcccgcctcagccacccaagtagctgggattacaggcacccgccaccatacctggctaatttataaatttttagtagagacagggtttcrccatgttggccaggctggtctcaaacgccccgcctcaatttcccaaattgccgggattacaggtgcgagccactatgcccagcctattttatttgtaaaggaaaactggatttttctgcccaggattagagcaggagaaatgtaatgggccagcaaggctgctctcaggagaggccttcctcccctgtggagggcgagacatcctcatggggactcaattcagaacataacaggaaaaagcgagtgactccaaagacagccacaggtgtggagtctggaaatcaaaatcacagatactccactcctctttgtgtcttccagccccataatgtcaccccattatagtccaagacccttcctgtaccaggaggcccccccatwggcctgcaaggtgtgtattaaactgatggtgacgttgtgactgcttgtccagatgggcccctgagtgaaatggggcactactgatagttccctggtggtcctgggaacactggggtatatggtcaccctaactgttgtgctggattgatagatagggttggtcacttgcccgaggccgatggctggtacatggcagagctgagatattcactgtgttctggctgtttccaccgtaccatgttgttcccagccctctgttttctttccaccccacttcccatgacttgcttcccctttgagacgtggtgctagtaaatcttagattcccttggcctgtactgcctgcctctgttacaaatgccttagagtttggagaagagatggaaagatctatacaatgtaaagccagagaattttaacttttttttttttttttttggagacggagtcttgctctgttgcctaggctggagtgcagtggcactatctcggctcgctgtatcctctgcctcctgggttcaagcarttctctacctcagcctcccaagtagctgggattacaggcgcccgccaccacgcctggctaatttctttgtatttttagtagagacggggtttcaccatcttggccaggctggtcttgaattcctgaccttgtgatccacccacctcggcctcccagagtgctgggattacaggtgtgaaccaccgcacctggcctgagaattttaactttttattgctctaaagttgccattagtttgaccaactaaccaatgaatgagctgtagtgggttgctggagaggtgatgcttagtgtccgagtgttttgcrctgggcctcggtggtcctggtggcggatgttggtatgcccctgctcccctgccctgactgcacccgttttctcccggcagtcgtccctggggatgagcccagggagaagatggacttggtcacctactttggaaagagacccccaggcgtgctgcattgcacaaccaagttttgtgactacgggaaggctcccggggcagaggagtacgctcaacaagatgtgagtcttccccagggacacatgggggaggtgggaggttgggggagaaggggctgcagcatcttctgaagataggtaccggtgccaggcagggaccaaaaaccagatgrcagctcaagaaaaatggcatctcctcctcctagctcccctgtccccaggcgtagctgcatagacctcagccgcaggttctaaggagcctgccctggcagtactgccagcctgtgcattcacctgcccccaagcaccttcgccttctgcagattcatggagaatgctggtccacagtgggctcctgctctggtctctctgagcctgttttaccttccaaagactaggagtccttcgcccccagggagcctggtgcactgaggtccccatccctgtccccaggtctgaggtctggcctggccccagagtgagggagtttcatacgataatgaagcttattggctaatgggtacgagacctttctgcaccacacagctggcaccttacacccacagccactgacagtgatccctgaatgccaggcatgtcacccatatccacagtctccaacttccaagtgtccacccccaagcccactctcccacttctctgcctaggttagcacaatcgtttgtttgttcactagagtgtcctcccaaatggaagctcccctgagggcgagtttttaagtttcgttgactcctgtggttccagcaccctagcatagtggaatgaatatgtaacacctgagctaccatccctaaccatgccttcatttagcatttattaactacccatttcatgccagacactgttgggacaagggatcgtgagcaaaaatagaaaagcgtttatgctgagatgggatgggctgtctcaaagaatcagatagaagcagacatatcatcagatgggaaccaaagtgtaagagcaggtttccatcaagggcgagtctgacctcagtctgacctcaccctgtcctccagggcgctgtctgggtcccaggggaagctgagcggtgccaacagtagcagctgttgtgtgcgcggacacccctgtgggctgtttacctagtcactctcataaccacattaactctgaggtaggctctggttctccctgttttacgggtgatgaagccaaggcaccgagaggtcagccagcccgctgaggccggaagccagtgtgcagggagctgggctccctcaggaagtccggctgtcccygtgtggccctgtctgagcgccttcgtgtttctcacttgagcctggagcgcctatggaaggtgcgtgccgcagttgttagtggatgctgggcctataccgacccctgctcagctgtgctcacttctgttagacttccccttctctcctccaggagggaccctccytgggtcagctgttcctcaagagcctgccatctctagcttgggcccctctttctcactctccccaggtgttaaagaaatcttactccaaggccttcacgctgaccatctctgccctctttgtgacacccaagacgactggggcccgggtggagttaagcgagcagcaactgcagttgtggccgagtgatgtggacaagctgtcacccactgacaacctgcygcgggggagccgcgcccacatcaccctcggctgtgcagctgacgtagaggccgtgcagacgggccttgacctcttagagattctgcggcaggagaaggggggcagccgaggcgaggaggtgggygagctaagccggggcaagctctattccttgggcaatgggcgctggatgctgaccctggccaagaacatggaggtcagggccatcttcacgggrtactacgggaaaggcaaacctgtgcccacgcaaggtagccggaaggggggygccttgcagtcctgcaccatcatatgagtgttctcaccaccacttatgcccctrgaagggaaggggagagggaaacgtgccctctgtttgatccttgttttgtgacattttttttttttttttttttactcaaagttaacctacctgtaactttttaaaaacttgtaaaataactgaccctcccttcctgtccgccctcttcccctctaatgctcacrctcccaacacaaggtgggcagggaggcaccattcaggaacctggaccaaagctracgaggctgggccaagccagggatggggccacagccagaaccccgagccctacttccaggttcyggttagctcagccccagcccagcccagctgctctgcccagagctgggtgagtggggagacacctcagagccccgcaaaacccactgaccggaggcaaaaggcagtggggctgggggtagttttccatggtcacagagaactagtggtggctctgagaaggggaggacctctgggctttgattccatctccttgtcttttttctttgtttttagagacagggtcctgctatttcccaagctggagtgcagtggtgcgatcatggctcactgcagcctcgaactcctgggctcaagcaatcctcctgagtgatcccatttcttaatcagtgtagccccaagaaggctggggctatttaccagggtagaaaaaggagcttacctcccacctttggtcctaagtccctgccccctccccttcacaccataactaggtaacagtttgataactagggaagaaagcagaacagttaagcagccgccacatccccgctggctgggggcctcactccaggaaggggctggactggctgtcctttccagtggcctggctccgctgtgtggatggggagatcggggccagaggcagaaccctggtgaggaagctccagtcctgctctctacccagcccatcttgcctccatggtgcctctggaggcctctgggcctcctctaacaggggctggtgggcaccaagagccaatggagtagacccctggctggtaagggccaagtcccaccggttgcttctgggaaggggtttctaacactagtctgtgtgctgtggttcctggggtgccctccactgcccyctgttcagtaacagggccttgctaatcgggttgtcactcaacaaaagtgctttggatttaagttactatcctggctttgcccaacctcagcaacctgtaagactgataatgaaataaatcatgttaatcctagctgtgtgcagtctctcttacccttctgtgcccagctcagtcttccctagggctgggtgtattaggactggctttgtcccacagcttggggccatcggtcctgtctcccctctgctggccgggcacagctgtggtgaggttgggcagctgaacagtgttggctttcatgaggaggcagaaagcagaggctggcctcagactcatacagaaggtgggggttggctgggtacgagggatgtggagcacaaaagcctctcatcccccattaaccagggcaccaagcccacaggtgtccccagcccactggatcagaaagagttcagtaagaccggaagctcctggtaygggtttctcccagttctctagggaaggccacctgcaggtcactgaaacttcaagcaccagggaagatctaacatttgagtcccttccaggccatcagaggcctagtcagccacatgggaaacttccaagacctgactcaggcatcattccaccatggctaaggcaccagccggggaagacttgaaagaaaggggcaggagctcagatgaagagaaatcctaagttacctttctaggtcaaggcctgtccctggccatctctgaacttcagctagagcttcaagtctgtgcctggagctcctgggaaggctactcaccttgaacaccacgcttgacaggacagcatggtgcatgccgctgcatccgtgagcagtgtgtctcctgcatgcagaaagggagcagagaaggccaggggcttttgctaaaaatagtggccagaccagagctctggagccacctgtcccacctcaaatgggtctgggggtcaggaggcagggttttatctctgtctaccatctccctcgaacccacactgcaacaggaactgtgagagtctttgtaagtaaactgccctgtctaggtcagtacccacctgagctttggacgcacacagcttttagtacccacctgagctttggacacacacagcttctagtgatttctggggccccaccgtaaagtgagcatgctttctgaactcgcttctctgtgactgatgttaggctgggcccagaggcacagccggggcctgcctagcactcacatgctggacaggtctgggagaggcagagtgccccacctgcmactaggctgggtgcccacagcccgcatgcagcagcttgctgcaccccaagtccaggtcgggctcagctctggctcacagactggagacaatgcagatgccagagcaaagggccaggaagggtcaaaacattttattctctttttttttttcttttttaataaagttaaacagtaaaacaaaaattcacaagctgcctccctgtccacccccgcctccctcccctgccctcggtcttcggcattggttccctttgctccaccccactcacagagacacagggcatccaactgagaaaacgaaactgctctaagcacacggagacgtgatgaagggaggaggtgaactgtttccacattcaagattaaactgagtgaatctgcattttctgggttctgggtggttgcccttcattagccaaattgaaaaaagaaattccctggaccagatgctgaaagagaaaagaggggttggtagttggctatggattttctaaggaagatcactttgctctgattatggaaaagtcttcaagggctgcttcaaactcaaacacagagagaaactctatgggtatcaaacagctcaggctgtttttgggtgcaagagggagcacgtgactgtattatacatgggtagcttctgacctcagcattatctatatagtacctttgctcttgcagagaagccttggtactaggcagttagagatgcctccctgaccctgcagagatgcggtggctaaaggtcccaaggcaaggggtgcctgggaaccttcctgtcttcatccttagcaacagccgagtggatagatgccctgctagatgagaattcagctgcccccgctcatgggcccctctgactcccaaagagctgcctaagaggcaatgagtgtgttggcttgtgatctgggaactcccaagaacagcaggcccacctaccttcaaagctgaagccgccaggaccgccaaagaatgccttgaagatattgtttggatcaaaatctgtagagcagggcaagtaacatggaagggaagaaaaggtgaaaaattagaaatgttcgaagagaactgatgacactgagaacagatctccaaagctttcctggagagtctcactcccctcctttcccaacacttcagactgcaagtgagcaaacctgccccatcccgtgcaaaacatgctacctgatcccactcctaggacatgttcccttctccttccaactgctgccccaaaggaagctttctctgcttcagcttgcttcattgggctgttttctcaacaaatggaatgccatttgcacttacacaagactttccccatactctgtctccctataatgctggagcggctactaaaaaggataaaatgtatcacttaaatgttaccaaaaataaatataagagcaagatctaggatttactgtatttgattccatgtcttttactccgtagactctaggctagaaaaaaagctatggtttattagctgggcgtggtggctcacacctataatcccagtgctttgggagtctaaggtgggaggatcacttgagcccaggagttcaaggctgcagtaagctatgatcacaacactgcaccccagcctgggtgacagcaagaccctgtcttaataacaacaacaaaccaacaaaaacacctactaggtgcaaagtactaggtactttgcatacattacattacttaatcctagtaatgttttgtcagggtaagtatcattcccaattaatactcaacaaaacatatgtaggtggttcaagtaacttgcccacgatcacatggcagcgaaagcagcagaactggaaaatccaactcctgcctgactggctctgtgcacttttgcaaggccacagcatgtctggtggccccatccctgactgactgcccaagcttcacagaaggactgacccccaccaggtgatcccacagccacctcgtgcccagagtgagtttctctgcttgcatctgtgtgtcttcctgggctcctggcttagtgaatgaccccgagtcagctatgcctgtcactttccccaacacatctgaatagcaaccaactcctgctgagtctaccactaactaactccctgactgtgccctccaatcctttcctaccttttgtgtcttccttccatctccattctccttactccctccaaccccaacctcctcacccctatcacaaatatatttccagagccaaaatctggtccacagtgcccctacttaaaacttcacggctggccgtggtggctcaggcctgtaatcccagcactttgggaggccaaggtgggtggatcacgaggtcaggagatcgagatcatcctggctaacaaagtgaaaccccgtctctactaaaaaaaataaaaataaaaataaaataaaataaaattagccgggcgtggtggcaggtgcctgtagtcccagctacttgggaggctaaggcaggagaatggcgtgaacccgggaggcggagcttgcagtgagcagagatcgcgccactgcactccagcctgggcgacagagtgagactccgtctcaaaacaaaacaaaacctcttcactagtttttgactgcttatagatcttcttaactgctaggcagaggaacatgtttattgtggtgaacctaggtttattaaacacaaatacccccacactgaactggagaggactcagcattatctatatagtaccatcattcttattttaaattccggctgggtgcggtggctcacgcctgtcatcccaacactttgggaggccaagatgggcggatcacacaaagtcaggagtttgagaccagcctggccaacatggtgaaaccccgtctctactaaaaatataaaaattagccgggtgtggctgcaggtgcctgtaatcccagctactcaggaggctgaggcaggagaatttcttgaacctgggaggtggaggttgccgtgagctgagactgcaccactgcacaccagcctgggtgacagagtaagaccatgtctcaaaaacataacaacaaaaaaaaattaaataaataaataagttgcaatggaaggccaggcacagtggctcacgcctgtaatcccagcactttgggaggccaaggccagtagatcacttgcggtcaggagttcaagaccagcccggccaacatggtgaaaccctgtctctactaaaaatataaaaattagctaggcatgggggtgggtgcctgtaatcccagctgctcaggaggctgaggcaggagaattgcttgaaccctggaggcagaggttgcagtgagccaagatggcactactgcacccagactgggctcagtcttaaaaaaaaaaaaaaaaaaaaaaaaaaggccgggcgtggtggctcacgcctgtaattccagccctttgggaggccgaggtgggtggatcacgaagtcaggagttccagatcagcctggccaatatggtaaaacgccgtctctacttaaaatacaaaaattagctgggcgtggtggcgcacacctgtagtcccagctactcgggaggctgaggcagaagaatcacttgaaccctggaggcggaggttgcagtgagtcgagatggtgccactgcactccagcctgggtgacacagcaagactccgtctcaaaaaacaaaacaaaacaaaaaacaaaatcccaatagattttcttagtggaagagatggtaggtctgttcaccattcacaggtcaggtcctctttttttttttttttttgagacaagtcttgctctgtcgccaggctggagtgcagtggtgcgatctcagctcattgcaacctccgcctcccgagttcaagcgattctcctgcctcagcctcccaagtagctgggactacaggcgtgcgccaccatggctagctaatttttgtatttttcatagagacggggtttcaccatgttgggcaggatggtctcaatctcttgaccttgtggtccgcccaccttgttctcccaaagtgatgggattacaggcgtgagccaccatgcccagcaaattttttggcagacaacttagagtgaagactgactgaattaattaattaatttttgagatggagtcgcactctgtaacccaagctggagtacagtggcgcaatctcagctcactgcaacctctgcctcctgggctcaagagtttttggtgcctcagtctcctgagtagcttggaccacaggcatgcaccaccatgctcagctaatttttttgtattttagtagagagtacaatttttttggtattttgtatgttgcccagggtggtcttgaactcctgagctcaggtgatctgcccgccttggcttcccaaagtgctgggattacaggcgtaagccaccgcgcccagctcacaggtcagggcctcttatctctgacagcccacagtgagcaacaatattgacaataggtgtgctttatatcatgctaaatctttttgggaaattaaaatctgtgagtgtttataggaatgtatgacatacataaatgtcagcatacactttgcagtgggtaaaaaagaacttccagataataggaaaatgctcatattccttaccacatacagcccttatggcctgtgagctctgatccagctacttgccggccttccaccaccacctgcctctagcaccctatccctttatcttccctagaccaagccccctgcagatccccaaagaggccatgctttgcttttttagtggggagggatggagtctcactctgttgcccaggctggagtgcagtagcgccatcttggctcactgcaacctccacctcccgggttcaagtagctgggattacaggtgtgcaccaccacacctggctaatttttcttttttctttcttcttattattttttttaattgagacaaagtcttgctctgtagcccaggatggagtacagtgggacaatctcggctcactgcaacctccgcctcctgggtgcaagcgattctcatgcctcggcctcccgagtagctgggattacaggcgcccaccaccacacctggctaatttctgtattttagtagagacgaggtttcaccatgttggccaggctggtctcaaactcctgacctggtgatcaacctgctttgacctcacaaagtggtgagattacaggcatgagccaccgcgcccagcctaatttttgtatttttagtagagacagggtttcaccatgttggccaggctggtctcaaactcctgacctcaagtgatctgcttgccttggcctcccaaagtgctgggattacaggcatgacccatggggccatgcttttctgcacttccaagccttcccttgctagtgctcgcctcctcagagctcactgcacactgtgaacctgccacatttgactgcatttgtttgactccatgtctattactgtttggaccagggatcagatttggcccaaatagactctccctctggagcatctttggaaaaaattctaacattctacagctgtcaaattcatcccaggctgccccagccaactcaccacccatattcatgccctcctcatctaggtcctgtccactgtcatagcgagtctttttcttgggatcagagaggatagtaaaggcctctccaacttccttgaacttcttctcctcctccttctgaacctcagcactggctccactatgccgatctaaagtggggagtaaaagaacaactcagtggaaatcaaagtttcaagaaaacaaagtttaagagaaaaactactttctgtctaattttggaatttggcacttcccaaaatttggagggtccacaagtctgcaacaccttattctcagctgaaggacctctccaaggggtcccctctggactgagtgtggcagttggcctgccctgcgggttcttcccactgagcccactccccgcacctactctacctggatggtgcatcaaggcccgtttccgataagctttcttgatctcgtcctcagaggcattcttgtccactcctagaatcttgtagtaatctttcctcttactcttcttcagttccagctgcgcattttttaggagctgtttgtgttctacaggaagacatctggcatcagtggacaaatctgactctggttttttcctcaccaggtctcagcccagctgcctgggagttagaggccttgttaaccatgccagggacttttacggtgctttcttctggagattagaaaaaaaatctactcggccaggcacggtgactcatgcctgtaatcgcagcactttgggaggcctgcatcaatgagagatgcaggtaaatgagacagaaaagggaactctaaacacaggtttgcttctatttcggtagcacgaaagaaagggaggggcccttggcccaagatgggaggaatcaagcttgacagaatggatcacccgaggtcaggagttcgggactagcctgtccaacatggtgaaaccccatccctactaaaaatacaaaaaattagccaggcgtggtaccatgtgcctgtaatcccagttattcgggaggctgaggcaggataattgtttgaacctgggaggcaaaggttgtagtgagctatgatcatgccattgcactccagcctgggtgacagagcaggactccatcttaaaaaaaaaaaaaagaaaaagaaaaaagaa

SEQ ID NO: 8842 - DNA, 56054 bp, Homo sapiens
ctacagaggctcacagggtgtcatggagcacgaggaaaggtgcagggaatcctagagaaagtcttgtgtttaaggagcaagacaggaaggagaaaccagtcagtgagatgggtcaaatgtaagtggagaaaggaacgtccaaggagaagcgggctgtcgctatggtgaatcatgcagagatgaaggcgggacgatggagcagtggccccttgggcttggcaggtgatcaaattcgaggtcatgatgaccttcaggagagcactgtgtgcagagtgccagcagtgggaagggaccgggtgggagggaggacgtggaatgtgagggtggtctcccctgcaggaagtttggccttggaggggatgaaaatgaagggcagggaggagtcgcgagcgaacaagcaggagggtgttcgactgctagagctgagctaagcgatgcctaaatcaaaggaacttgtttcttcaagctcttctggcagtgatcctgacagtgaggttgacaaaaagttaaagaggaaaaagcaagttgctccagaaaaacctgtaaagaagcaaaagacaggtgaaacttcgagagctctgtcatcttctaaacagagcggcagcagcagagatgataacaagtttcagattgggaaaatgaggtacgttagcgttggagattttaaagggaaagtgctaattgatactagagaatattggatggatcctgaaggcgaaatgaaaccaggaagaaaaggtattgctttaaatccagaacaatggagccagctgaaggaacagatttctgtcattgatgatgcagtaagaaaactgtaaaatccgagtcatacaaacaaaacctgtacttttctagttgtttgaatctgtctttttacattggcttttgttttctaaatgttgttctccaagcaattgtatgtttggattgcagaagaatttgtaagatgaacttttttttaatgtgcattattaaaaatgttgagtggagcaattgtcacctttattaaggaggattgctttgtgcccaccacctagtgtaaaataaaatcgagcaatacagtcttaaatgttgtggccttttttgatcataagagttggtactgtttaaggccaaaagtaatagtttttataaatcttttagtttcaactgagcttttacaataaaaaggatttgtattgcattgagtttataaacttttggtttgtgaaatccatatttgatctgttttcttccaatcaaatgtttatttggaaagtcagtgaaactgtcaaaatgttacctcaataagatatttataattgtatgagaactacaatcaccaaatcgactgtcttcagtattagcagatctagtttgataaacaaatggcttgtgtgaaaaccgagcaggtgtttgtcattacccatagtgttctgtgtagttattgcttagtctgcagaaaataatgacctagatgagatgtctgacttgctttcacttattaaacatgttcaccatgggatgatgtctgtaacgtcagatattgttaaactagactaggatttaataaaaattgtgaaagcttactggcctaacattttattttataatattgagtatgaattatatgtagccagagatgtcaataaggcttactgtcagtaggtaatatggttagtttgtagggaaaagagcgtatgagcacatgcttgtgtatttcggcctttgccccagtagatcagacaatgacattctagtcttgatgttactaagttttagcagacactagcaagtggtttgtatttaaccacacccatgaagcagacagactgaggcacagattttagtggctttgtggcaataaatagggcatggtgtgccttaggaaaagaatgtttataaagggaactataactgaaattaaaggaggcggcagtgaagaggaaataattatcttctatctaaatgatatacatatgatattttgagatttttataactgcagtgcaacacaattctgggtagagtagaaaaaggaatggtttaaagacatataaaagattcttgttgacaatttatttttggtagcaaatctcaaatgattacctgctattaagggctgccatatcagagttttgcactattttgctaccaagtttgattcgtacatctaaaacattttgtagttgattgtcaaggacttaatttgaaaatcatttgccaggccacatagttatcaattttctttctagcagctattctgttgtatttttaaaacattttttagatgactttttgaagtctatttagcagtaaccttaagaggtgcaaattagtaaaataaatctcttgtaatttagccttcatcaaataataggtaccaatgtattaaaaatatgtggtttttttttttttggcagccctttgaaccagagtaagttcagagaaactcccaaaatttgtattttagacacgtcatgcttgattggtaacttccctccttttttggggaacatgtttgtgtcctattaacttaattggatagatttttaagtatttcttatttttggcacacaggatggttagaatacagaactttgatttttggtgtagatacggagagaatgatgggtaaatttcctaggtttatatgaatttagggggtgtacgcattttgaaacgctattaacagatggtgctgaaatctattgcctacatgttttctagctctttagcattatgttaatgaagcctccatataaggagtgtttctctggcacagttggtaagttgactgctaacttcattgaaatgtgttactggatatgcagtatactgaaattattgatcttttttgtgtataggaaaagagaagtgggttaaaagaagcaaattaacttgttctgaaaagaaagtatagattaattttgttttctgtttaaattttatctccttggtaagactttttttccaaggcagaaagcttggcatttttaggcatagatcccttaccttataatgtcaaaatgaatttaattccagtactcaggtttttccctttaacagactctatgtgtatcagggctttctaatgggtttttcctctttgtttttaaaatgtgagcagcttttgaccaatttccagtgctcttagcattttacttaaagaacaaccactaaaaaagaaaaacttcgtaatttgcttgtcttttgctttgctttattaatgtctaagaacttaagaatactcctacctcattagctactcaagatgctgtgacgaccaaatctattctacataatgtgtttagaaacaaagacttgggtgaaaaatgaaataagtatattctgacttggctattgagggtaaaaagaaagaattaagtattaagtgttccttgtaggagatatgttagtagaataccataaaagtttgaaaattttaaaaagtactaatatttaggtatcctgaaattatttgcagttcattttttatggaaattaatccagtgaatcacgcaaaagttttttttttaaatggtgtttttccagatcaactctagggtaaacattcacataatcacaaatatgcaattctgtaattgtgaaatgcctgtatgttttgttttcatacatcttccttggagatgtctgaatataatactccatctatgaatattttaaatgttgaaataaaagtaagaaatgtgaaaaaaaaaaatgaaggctagggaggagagcaaaggatgaatataacgtgaaaatgtatgtatagttagttcaggggagaaaaccaggagagagagagagaaagctcacaccagagctgtcgcttaaagatgactggactagggtgggaagagaaagaataacaagtccctagaaaatttgctaaaagtgaggcctttggggtacagaagagtgggcaggtttgtaacggctgtaagggaaacgtgatcacttcgggttagagggaagggctgtagagccacatggcaagcccaggacacctgtgcatttcctgactttccctgacagcatccagtggcttaggataaaaaatggagacattggatgttggattaccccacaatggacatggacgtttgtcagggtaaggatggtgggagacctaagggacaaggagaaacattatttttttaaaattacagacgtcaaaagagtcacacaatacaaagtttatagagtgaaacatgaaagaatgaccttcatccctgccttaggaggatctctggagcagctttgctcatagtgtctctgactgcagtgacttacggaaaaaactaataattgggaaaatactagtacctaacagttgagactaagtgttgtggttggtgccgttggaactccatggaacatgttcctcatggaagaggtggggaagggggaatgtgggcaggtaacaacccacactcccatgcttctctcccagtgagtgagatctaattcaccctggcagtaggttctcagtgggtttcaggttggttccaaaaggaggtagggcctggtgcagtggctcacgcctgtaatcccagcactttgggaggctgaggcaggaggattgcttgaccccgggagttcgagaccagcctgggcaacatagcgagaccccatctctacaaaaaatacaaaaattagccaggcatggtgatgcatacctgtagtcccagctactagggaggttgaggtggaaggatcacttgagcccaggaggtcaaggctgcagtgagccgagatgatgtcactgtactccagtctgggtgacagagtaagaccttgtctcaaaaataaaaaaataaaaattttaaataaatacataaaaggaggtaggcacgatatgttgtaagtggactgaaagagaggagatggtacagagacagcagggtggagtgtgaccagtggcggttatgccttttgtgcctgtgcctgttgcctggaaggaggagaggttttcgcttgacaggactgtgaaggagggcacggaaatatggggggtcgggggtgaatctaggcttccatcttagtaaggagaggcgggatacgtgtgagaggcggcagcatgctggcagccctgcagcccttgctcgctctcggtgcctcctcggcctcggcgcccattctggccgcgcttgaggagcccttcagcccaccgctgcaccgtgggagcccttctctgggctggcctagtccggagccggctccctcggcttgcggggaggtgtggagtgagaggcactggcgggaaccagggctgcgcgcggcgcttgcgggccagcgcaagttccgggtgggcgtgggctcggcgggccgcacttggagcgggcggccggccccgccggccagggcagtgaggggcttagcacctgggccagcagccgccgtgcttgatttctcaacaggccttagctgcctccccgcggggcagggctcgggacctgcagcccgccatgcctgagcctcccccgcgccgccgccgtgggctcctgcgcggcccaagcctccccgacgagcgccaccccctgttccacggcgcccagtcccgtcgaccgcccaagagctgaggagtgcgggcggatggcacgggagtggcaggcagctccacctgcggccctgcgcgggatccactgggtgaagccagctgggctcctgagtctggtggggacttggagaatatttatgtctagctaagggattgtaaatacaccaatcagcactctgtatctagctcaaggtttgtaaacacaccaatcagcaccctgtgtctagctcagagtttgtaaatacaccaatggacactctgtatctagctaatctagtggggaggtggagaccttttatgtctagctcagggattgtaaccgcaccaatcagcaccctgtcaaaacggacaaatcagctctctgtaaaacagaccaatcggctttctgtaaaatggaccaatcagcagggtgtgggtggggccagataagagcataaaagcgggctgccttaaaaaaaacggtggcaacacgctgggtttgctttacaacgcctgggaagctttgtygtttgcaataaattttaatwcttgtctgtttcggtctgcactgcctttatgagctgtaacactcacggggtaggtttgcagcttcactcctgaagccagtaagacaacgaacccactgggagaaacaaacaactccagacgcgccgacttaagagctrtaatactcgctgtgacggtctgcagsttcactcctgagccagcgagaccacgaacccaccagaaggaagaaactccgaacacatctgaacatcagaaggaacagactccggacacgccgcctttaagaactgtaacactcaccgcgagggtgggcggtttcattcctgaagtcagtgagaccaagaaccaaccaattccggacacacttggactcgacagactctaaggtgaaagattggtttagttcatgagttggggttttgtgataactgacattgtgaaaaacgggggatttaacatagattttcacagtggctttagacatttcataaatatttcttaaatgcctcctaaatgctaggatttggcaatacaagrctaaacaaaatacaaagccaaatcctactgtaaygggagtatgtaaagtgtttctgttaatggaaaaagtgctgtgtgaggatgggggttaagtgactggactgtttgtgttctgagctttctaggactgatctgattacgctgtaaacactcygccagatactgtgtaggcccagcycttgtgcttgagggggccactgtgaggtggcgaaacagacaagagattattagaatacagaaagttcaggttgggaggaaccactgaacatggtagaagtactgaggtctgtgaaagtaaagatcagcccaatgaacacaaacaaataaggttcttgattcggagcttgctgtagtaagggagttttgtacttagtggacactccgaggcaggcaggggagtgggaagctttacggtggaaaaggggaaggctgcagcagtgctctgattggaggcttctggcctggggaagttggaagcagctgatagaggtaggtgtcttcagtgattggtttgaggagcctatttgtttttctgtggttgattctgagttgcaagagtcctgaccatttggggctgattgctgctgaggttgtggttttcttgcaggacaggcaagccccaaattgggccttagcccatgagggttcctggctttacccaggaaagaattcaagggtgagccagtggtaaggtggaagaaaacaacttcatkaaagaggcagtgtgacagctccgtgacttttcctgcagagtasggctgctccgcaggcagtgtgctgaaagcagctcagggcagttgtgcagtcagatctatayctacttttaattgcacgcagattaaaggacagtttctgaagacatctgtaggaaaagggtagtaacttctgggttgttgggtcattgccatggaaaggggtggtaaatcctgggtgttgcgatggcaatggtaaactgacatggcaaactggtgggcgtgtcttaaggacggctgcttcggcccctccctgttttagctagtcctcaatttggtcggctgtctgaaccccacctctggagtcgaatctcgccttctatctcattttgagttccttggactgcctgcagcagcggttgtttaagccatrgttctgttatatagtgtctggctgttatccattcgtatgttcagcttccaagtggacacctaagtcagactgagggagctggattaggggctctctaacaaatagcaccatcacataacatgtctgtttcttcctctgcattgtaagctccttggstgtggaaccttatcttactcatctttgttttttcccatgtctcctgccacattgtagatgttcagccaatgtttgttgcatttaaagaacagataaagaatcacagctactagggaagctgagatgggaagatccttaatcctaggagtttgagccagcctggacaacataagaccctgtctgtctctcacacacactcaaaaaaaaaaaaaaaaaaaaaagaaacaaacaaaaaaaacggtgggggaggggaacagataaaggagaggccaggaaacacyagaaaaggattcctgaagcagattccacctgagctgtaatggaggcgtggcaggtggctaggcaaggagcaggaagcctattccaggcaggtgaattgcttgggccaaggccggatgtgaagtactgtagcctgttygggggacaataagtgctgctaggactggatcagggtgtgaaagtagtacaagaatgggtggacaggaggctgaaatcccaacaaaggatgtagatgccaaatggcaaggacgtttttattctatgccagaaggcttgatttcctttaaatcaatccattgattcgaagacatttcattggaggaatttaaaatggaaggattataatcaastgtgtgtttttattttttatttttttgagacggagtctcactttgttgcccaggctgcagtgtggtgtggtgatctcggctcgtgggttcaagcgattctccagcctcagcctcccgagtaactgggattacaggcacccacaaccacgctcagctaattttggtatttttagtagagacggggtttcaccatgttagccaggctggtctcaaagtcctgacctcaagtgatccgcctgcatcggtcttyccaagtgctgggattacaggtgtgagccactgcacccagcccagtgtgtgttttagacgaataactctacctgccatatgggaaaggacaggggaagtcaacttcaacatggtttgggaaagaagatgtggcttaaaccaagatggagcagagaggagagattaaaatgaaaggtatttgttttcttggactccacaggacttgatgaatgattttgaaggggtggatataaggagagaaagggcgttatcaatgacacctggattttgtgattacaaaactgagaggctgttaaygctatccacaggagaagcagatttaatggaagagagatttaaagaatgggcacgttaactaactttgcattgtttaggcaccatcgtgtcctatacgcagctcaattcaataaatactcattgagcacccaataaatattcattgagccagtatgtgctrggcactattccagatggttgaggggacattagtgagcaaaacaaaggtgtgtcgtcactgagcttagatttctagtgttgacttaaaaaatatgatttatcaatttagaaagggagaagagcctttatttcttctaaagggttacagcatgcttccagcttagaccacagacgggcactttgaaggaaaaggcgtttgasgtaggagctttatgctgactgggttggctaaacgtacatatttaacagattacaagaggagctacgaatatttatgatggcggacctgacacattgaacaaacatgtatgtaatatatgacccatattcactttgggatagagactcaacatgtgaatgcattacaattacaccctataggtcaaaaggtctttttaggacaggaaggcgccttgagtgtacagtttctgtaaactggccagaccagtccacggtcggcggtcttatcaggagaaagttactgagatcaatctcttgaccagtcaaagctgtagttatggctggtggaacaggggttcaattagtcactgtctggtggagctgcaggtgttttactattgcttatctcaaggccagcgtttagctgctggagaaaaagaagagccctgtggcagttagagcttagttgattcttcaagtgtaggggtgcctgacttcaccattgcctgcatggccttaggtcctgtttataattgggtatcttattgccacagagtctgttccgttagtsttatgatctctgttttaatgttaatgccagccagttgtgtatgaactccaaaaggaagggggtacaatgagggctatctgatctcctgtcccgttatttgaaatgctttttccctggtgctgkaaagaaatagcacttgtaggctgggmgccgtggctcacgcctgtaatcccagtacctggggaggctgaggcgggcggatcacgaggtcaagagattgagaccatcctaaccaacatggtgaaaccctgtctcaactaaaaataaaaaaattagctggccgtggtggtacatgcctgtagttccagctactcgggaggctaaggcaggagactcacttgaacctgggagccagaggttgcagtgarccaagatcgcgccactgcactccagcctcacgacagagtgagactccaytwaaaaaaaaaaaaaaaatgaagaagaaatagcactcgaaggctgggcgcagtggcttgcctgtaatcctagcactttgggaggccgaggakggtggatcatgaggtcaggagttcaagaccagtctggccaacatggtgaaaccctgtctctactaaaaatcgaaaaattacccaggcgtggtggttgggcgcctgtaatcccagctactcgggaggctgaggcaggagaagcacttgaacccagaaggcagaggtggcagtgarccgagactgtgccactgcactccagcctggcaacaagagtgaaattytgtctcaaaaaaaaaaaaaaaaaaaaaaaaaaaaggcgcttgaacattaatttactaagcaggccattttyacttcctgcagaaagggtacactcgccagcagttttgccatgggagtataccaaacaaaggagacagggtcatttataacctsactcgtccaccccactgcttgtgtctagtttccattggctggaacggtgcctcacgttctgtatttgtcccgattggctagcaacttagaagtttttaaaagaggcaaaggtagaggagaacaaaggaaggaggaagtaacttgtggaatggtgacaaaggttgaaacaccttcaaataaggaagaggaacaggctatgacctaatgctttcttggaccactataagcatgccagggcaaatatttaggctaaattgtgagagctaagaacatgaagtacattgatttctttatcatagctagcagatatttaagaatgttagcacaggtctttgaataaagtttgcttctaagagaagttactatttattcctaattaaatggggaggaaagtctttgaagaggaacctctactttactttttataccgtcatggctggaaactaagtttttaagatttttctggggttcccttggccgaggtggggagtgggagggctgtccagtggtagggacttaggatttttagtttacagtagtaggggaaacactctgtaatctaatacataagtaaatgatgtattagaatatggtaaatataggcaagtagacccccactgggattagcagtggtggaaatgtgagagagggcaaacaggtgggtctagatgaggtgtgagcagactcgaggggcacaggagttagtcaagccagtatctgggggatagtgcaggaatagtgaacagctagacaaaaagtcctagggccagagaaagcaaaagcataagagatggaggccagagaggtaatctgggtggaaggctgcagcctctcaggatccctataggtgctttggcttttgttggagagacactgaacagctttgggcagtgaacgtacctgacaggtttcctgtttgtttttgagatgaagtctcgctcttgtcccccaggctggagtgcaatagcgcgatctcagctcactgcaacctctgcctcctgtgttcaagcgattctcctgcctcagcctcccaggtagctgggattataggcgcctgccaccatgcctggctaatttttgtatttttagtagagacgcagtttcagcatgttggccaggctggtcttgaactccagacctcaggtgatccgcccgccttggcctcccaaagtgctgggattacaggcrtgagccaccgcgctcggctagacctgacaggttttaaaaggattactggttgctgtgttaaaacagactgcaggatggcttaggtagccagtaggttttttttttttttggagacgtagtcttgctctgttggcctggctggagtgcagcggtgtcatcttggctcactgcaaactccgcttcccgggttcaagtgattctcctgcctcagcctccggagtagttgggactacaggcgcccaccaccacactcggcttttttgtatttttagtagagacgggtttcaccatgttggccaggatggtctcgatctcttgacctcgtgatccacccgccttggcctcccaaagtgttgcgattacaggcgtgagccaccacgcctggacgggtagccagtagtttctagggctggagagatctaggatgagagaagtttccacattcctgttacaggctctctaaggcttcagctcctttttctaggactaagctggatctcaagtaaacactagagagggggcagctgaagctccaggagtgtgtggggctccctggggctggatggcggtggcgggcaggcgagctgggctgtgctcgggtgtgttacagtaaagacgcccagcttggcgctggcccggccttttcacggttttaggctctacagagagcggctgcagagctcacccggctggcaggagccaccgaggccggacacgtgggcgacttattgaccaagtggggaggaagcagccccgcactgctctcccgactgcggaccaccgttgggctcmtgcgcatcctaagccccaccgcctcacctccagtccccacagcgttcgcgctcccagccggggtaagcggaagaaaacaaaggcccggctccatcagggcaccaatcccgctcgtcggcctctttctcggcctccaatgagcttctagrgtgttatcacgccagtctccttccgckactgattggccggggtcttcctagtgtgagcggccctggccaatcagcgcccgtcagcccaccccacgaggccgcagctagccccgctgscggccgaggccggttgaagtgggcggagcggcgggcggggcgtcgccgtactaggcctgccccctgtccggccagcccctcgaagcacctactscacaggtccagccggccggtgagcgcctggggaccgcagaggtgagagtcgcgcccgggagtccgccgcctgcgccaggatggagttcgtgaaatgcctyggccaccccgaagagttctacaacctggtgcgcttccggatcgggggcaagcggaaggtgatgcccaagatggaccaggtgggccgagcctccctgcttgcccggggcggggaaggagctcgctgggccggcctcagggcctgagcggccgggcccggatctggggcaaggggcgcggcgagcagggccgacgcctgggtgttcccgtccccctttcctcgagccttccccctgtagggcccgggtggacgyggccgtcctggctgacctgtccctgcccccgcaagccgccctgggcatgagcgacttttgcgtggttcccggtggttgcgctccccgtttcgtcccctccgtgagcatcggcgcttaccggtattttaacccgagggttacacatctgasgcaatgtgggtgggttacgcgggagaggacgagtgagttttttggtaagcggaatgaactatgcagataacatcacatgaaggccgtttctggaatgaagtctgactcctccagtttcaccacctcttccggagctctccccgccttgctgycttccatcgcttcatcctcggtgcttcctgagttttaaaatcgcctatctacgcttccaagttccaatgagttatctaacgtctatggattagctaggtggttggtggaaggtcagaacttggttttacttagatttttatctgcctcatgcctgtactatttgtttaatgaatgcataggaggtgtttttattccaacaagaaaattattcgtacgcgattattgaatgaatagacaaattcagccaagttcttctggtctggaccagcctggctgatttctgtaacttttttgggccaacaggacagtagcaaatgtgactcaggccgaggcttgataggtgcctgaacatcggagtctttctttcagtgtccatgtgcttcagtaaacacactagaaaataaatttctggtttttgtccccagtagactacaccctcatttggtgttatttttcacgtgctatctttaatacaggtacatccttcagtctatttgtagaacattcagttttcttcatcttttctttgccggtgctacattatttgaattattttgctacagaataacttctattatttgatatggcagatgtcactttttatatttagatatagcattcatttatttaacaaatatttgacgaccagttgtatatcagatagtgttctaggtgctggaggtacaacagtgaacaagctaggtgaagaccttgattttataaaacttactttttagtggaagagagacaatttaaraaagcgaatgtacagtttttcacgtggagaaaagcactgcagaggaagatactagcagggcaagggatctgagtgcagtcagacctcatttgggtccagacttcattcctctatgtctctttcctttctacagaaagactgttagagaaaatggtagcattggtttcctgttgggagggaaagtgggtggtcatggtaagtgggtagagaaagacttcacagtatactgtttttgtacattttgartttttttaaaagcgagacttgagctattctagctctgataatatggtgcagtatttgttatgttagttgtagtctttctgggcagtttttacatccccatgagccgttaaaaaaatacctgaacctttaattaggggaaataaattggaaaaatacatttcccttcacttaacattatcttagtttctcttttttttttttttttttwtwgagatggagtcttgctctgttacccaggctggagtgcagtggtggcgggacctcagctagatgcagcctccgcctsctgggttcaagcaattctcctgcctcagcctgctgagtagctgggattrcaggcacctgccactacgcccggctgattttttggtatttttagtagagacggggtttcaccatgttggygaggctggttttgaactcttgacctcaagtgatctgctcgccttggtctcycaaagtgytaggattacaggcgtgagccactgcacccggcctttttttttttttttttgaggggggggtctcactccatcgtccaggctagaatgctgtggcctgaacatgactcactccagttttgacttccttggctgaagccatcctcccacctcggcttcctgatccygagtagctgggactccaggcacgtgtcaccaatgcatggctaatttttaaatttttttgtagacacaatgtctcgctgcattgcccaggctggtcttgaactcctgagctcaagcgattttcccacctcagccttcaaagtgctgggattacaggtgtgagccactgcacccaaccagtttctctctgcaaactagggaaaaaatttacgcttagcagataytgagggctgattatttctatcacagaagcatttggctatagaatttcagggtttagtaaacttgatttacactgaatttttaggtgcatatcagtaaatctacgggcatatgccgcctgcaagttgtgtggcatcacccaaaagccgagagtaatggaaagagcaggctgttagtaatcaggcagatctggctcctgtccaatctaaatcctgttatttagactaatatcttaagtctgttattaagtccgatttctgacgctattaagttaggtgaacaaccttggtaacttaacctctgaacyacagttacttcatctgtaaaatagggatgtatgtatggtaacgattttttaaccacaacttcccaactctaagatggtctgaaaagaattttttswgwgtttggctcagaatcacttggcagcaaaacctgacttgaagttgaggcttcattcatcccacttagtatattcaaatgttttgctaaagaaataattatgaggtgctacttcacactgactagggttgtatatgcattttattgcctattttctaaaacactaaaaatgctaaattctgccccaggtcttgccacagatgtttcagtggactatgggcctktgagaccttaaagggttgattgagtaaggatcacaggtgatgtccgcattgtgcttggcatggagttaagtgcttgataaatggtggttatcaatctgattatgtaaatttatgtaaattcagttctcaagtttgtggtttttttcccctcctggagaaatctattctattttaaagtgaggaaggctccgtggagggctggtagctggtagctgttcacttgtggaactttcagcctgaggctggagccccttcctgggagtctggtcttgtcgtcttcctgaccacccccacacccttcctctaaattccctccatccctgtttttctcccgcttgcgagcttttgggagtgtgctgaatctcagactgcaatagataaacccaagagggacaggcaccagtagcctgagcttgctttctcccctggctcatgggaatcaagcagtagaaatttttagtgagtgttgttttccatagtatgcttactagttgtgtcttcctgttttgttcttggtgatttgaagaaacctgtttacaaggtaagggactgaaacaaataggtgacaggaaaaagagcagcaggggtacgagctggaggagtaagtggcttggcttgctctctttcagaatggagggctgtatggaaaggaggggtagtgttcttgaagagtgttggggtttaaatctagggggaccgtgtcttggcattgattgaaactcctggcttaacatcaccccgaaactgttagttggactgaacatgacatttggcagtgcagttaaaaacacttcctgctgtagcctggtaatggtcaggctatgtgaagagctgctctggagctcagtccagagcgggtattctgtttctttcactctgaaatcctgcctctcgatattttgagaaggaaggagttggtgaattgttttaaaatcctcgatgaatgtcttcatttattcatgacaccacttctgaatatatttatgtgccagacgctgaagtttactaatattatggtgcccagtaaatacttgtttttactaatattttttatggcaataaaatgactttttcaggattatgtgatttaaaagattgacccttttggcaaaatacgtattcatgataggaaatatatacaawatagttcacttaaacctcccaccagagcccagggttcactgttaccattctgaagtgactggaatttcctagaagtggatatgccatatttttttaaccactcctattggatatttgttttttatttttttgagatggggtcccactctgcagtgtacaatatcatagttcactgtaacgtgtatctcttgggctcaagcgatcctcccacctcagcctcctgagtagctagtcttcagtagctagactataggtgggcgccaccacagctggctttttaaaaaattttttatgaacacgaggtctcactatgttgcccaggctgccctcaaaytcctgggctcaagtgattctcccaccttggccttccgaagtgcagggattataggcgtgcgccactgcacccggccctgttggataaatgattccagtctctcccaaaaagaactgttgtragactgtggggtgaggggagggaagggacaaataggaacccgccgtattttccactccctgtgggcctaaaactgctctaaaaaatagtccatgaaaaaatacatagtacaaacagcaactctttctgatatgcttgcatttaaaatcaggctttttctcccttttggaaaaacacagtccttgtttgctttagggaagartaaaggtcagtgcgctgcattgcattaatttcgaagggaaagatgagaagacatcttgaaaggaatggctggctttctagagaatagtagaggcttaataggtgtcatagaaaaaccagggttggacagtggtagtaaaacggcaaaacagattttattcagaaaaactactgcagtaagaggagagagacctcggtacagaactgctccactgcgaatacaaagaaaagtaggaattgatggcgggggagccggatgtcagtggatggaaaattattacgaggaaacacaggggtgtgcrttcttgctgaaggcaggccagagttatcagacatcacctgagggatggagggggatgtggaacctaatcggctgtctagggtgatcagatactgaagttgggggattctggtcaaatcaatttagcaggattcttggtaaaaytgggcgatgcaaagacagatgcgttgagtacaaagtccaggcyttattgggaagaggatttcagcggagcccgagtagagtttggtctagggagactctgtcactgggaggacgagcgagccgctcggaagtgcgctgggttcycttagcggccagtgggttctggtgagaagggcaacagcgggaggaggcgccggtgcggagcgggaggccgggggcggggctgcggggctgcggggcgggcccgttgtgggtcggcccagcgcgtattcgagtagagggcgagcccgtcccgccyctcgtcgggcgcttcccagatctgcttgagtctatggaggaaaaactccgcggggtccgcgattcccatggccgcagccgcctgcggcaccaaggccatggccctcttcaagcgcaccttggtgctgagtcccgccgcggcgcccaggggcccgggcgcaggcascgccccgcggggctgctgcttgcctcctgccgcctggccctgcaaggactggcctcggggagagggcggcaggctgtggagccgcctgccccagtcccactcccactcccactcccactcccactcccactcctgctcctcgacgtctcccaccgccgtgtgtgttgtctgcccgcaggactcgctcagcagcagcctgaaaacttgctacargtatctcaatcagaccagtcgcagtttcgcagctgttatccaggcgctggatggggaaatgcggtgagtgatggaggcagcgcctctggcttggaggaaagcttgtccgggacytttgagtgtgttggaagctaccttttgatatagcgctcagcgttgcagcctcgttgctgtggcttatccagaacatagcccggccctacgtgtttactttagaaagcccttccaggctctttgccatctagtagagtccctgcgggcccagcctttcagagaagrgggsggagggggtgatgtttattaactttttttagtcttggcagctgaacctgcctgtgagcaggtcgtgtatttctcggcttcccttatccaactttgcatttctatttctagcatattgggttgattcttttgaagctgcctctgtgcasattacacccatgaacttagaccmgttgcctttatgtatgatcgtatttatactgagaagttactgtgttttttgactttcttttctatttgctacatattagttcggtctaaacgtttggtcttctggtctccatagttctacattggttaaatgcaactcacttctgggagtagtggtgacattcaactagtaggctttttaataaactacagaagttcattactctcatgtaaggaaggaaaactaatgtaactttcgttaagtatgaaaagcgttggatatccttatagttctttagagttaagggtgagatgggtttagaaagtggccaggcacaagttattttaaaataaaaaatctttggctgtttgttccaatatattaatagttttcccttttttacagcaaygcagtgtgcatattttatctggttctccgagctctggacacactggaagatgacatgaccatcagtgtggaaaagaaggtcccgctgttacacaactttcactctttcytttmccaaccagactggcggttcatggagagcaaggagaaggatcgccaggtgctggaggacttcccaacggtgagtggggttacgcatcttgtctacggactgttgtgttcataattgctaacgtggttgtccggtagcctccatacatgtggagaaaggttaaataagcattctgagggcagcataatgtgagggttaaaaactcyggtagccaagactctgaagccaggctgcctgggttggaatctcaaatctcccacttactaaactgttggttacttacaaagactctctgtgcctcagtttcttcatctgtaaaataggggtaataataacacctacctcatggtattctgaggattcaaagaattaacgtaggtaatgctcttagaatgttagctactgctgttattatcagtattggaagtccagtgtttcttcctgtgggaagacgcagtcaaattttagtgttgtgaaagattctcaggctagctcacaaaagcctgccgactgtatgatgcagcctacctgtaacactgctggcctcttgactacccggagcctggtagcatgggactgctgctcacgatgggcagcagcctggyatgggggcggtgtctgttggcagctagggcgagcctctgccacttcacctgtgatcctgggcaagttccttatctgctttgtgtctccgtctcctcgtttgtaaagttagagctgagaggattaatttcgcacatataaagtacttagtgcctggtacagggtaagtattctgtaagtattagctatttggtctattttgttggagtaaagtgggttatagttaaaatcctaagatttttaaagtccctcaagttcaygtggacatctrcctaggtcctactatcctagaattcgcatgtcttatcacayaaataactgattcttccatatcttataaataaaggtttgatttagcaaagtcacatgttgtgtaatagctcgaagaagccctttttgtccacagttgccagagcttttggagaacagtccttatgttattgaaacaaacctaatctgtagctgagttgggagggagctaagtggacagagagtcctccacccaaacaaaagaatctttgattyttgggcataatgggagcaatatttaaaaaaaaaaaaaaaaaaaaaaaaaggaatgtttggggaagactcttgcggtgcaaaggctgtttcagattgctgagatcagaccttaagtaccaaagcccaaatatagtacaacataatacaaatgagaagaaaatagctgaagaataattcgagtttatacagtacaattcaagagaagaaagaaaatttatgacgactagctgggtgagaattagaactgtaaccctgggaaggtcctggtgatttgactctcacaggacacctgatgaccagaggatgggtttcctttgatgggaaatctgtggcgattcattgatgggcytctgaattctgctgaagcagaggaagtagtaataccccatttataatggaagtgcattctcacttaaaaacaactaatattattctagctggacctagcctctagaaacagccaaattacatttgacttgagtggattcataataattaaaaaatttctggggcatgggataaatgtgttaggtattgctaagtcaaggcagccctatcccctcagcagaagtgagggaatatgaaagtgtgtgaatgctaacataattttggggaatatcgccgtcagatttccagatgatattccaacatgtttgtgaaacttcagtgtcttcctgtgttcatacagtgttccagtggaaaaataatgcttagttctggaaggtttcagatgtgaacactgaactcatcgttttcttttttgggtagtagagttagagattccatcctcttgaaagcacagttgccccgggaagagtaaaagggagcagaaggcgtaagccaggcacggctgttttcactgttgttcaccttttgtatccttacgaatatgaagatgtactaagttgtgtgttttgcgtgcatatataattttaagctacttgagttgtaggtccctccagtctgtgattcagtttgagatgggactgtatgggaattaacagtgccttgtcttcttaagsagtgatttgtgtatgtgctgatatagctcagtatgtctttgaaaccagttgtctggggctaggcctgcaatcagcttttggctaagaggtcccaggatggaacaagtagtgtgaaagaggactgataccttggcctcacacacagtactgctcttagactggggcaagtgaaactcctcacttcagagtgccccattctaggccccctcactcccaaaggggtgagggatcactggggccatgggaatgtgcttgttcagctctcgtgggctctccttctgtaccacgttctggacatctggagttccttgccccaaatccctgagcccacgtctgcgtccgcacagtctatttcctaaggtcagtccatctcctccaggtgggaacgtgccaccattgactgtgcccttgggcctgagtgatggccaagggctgtgttggggagtgttgtggatggatcctggcaccgagggctgggatatcctctcaaatgaatgtgaggtgcctcccagtgctggagagagcgggattcaggaagcagtggaagggaagagcctgggatatggggatcagctgtctgtgccctgctgcattctggaataaaactctgagggactaagaattctaaattcaaacctgaatcaaccaggttgttacaaagatawgtttgtcagtgcaggaggatacaatatattttacttaagttactagctcgattgatcatttttaaatttttagctacatatagtatgtgggcctccatttgtcctcttatcccaggccttgcagaatttaggaataagcctcaatacagtgttctaacccagtgacytccgcctcratgtacagtagattgaacctgatcctttatactttagtgatcattagttgataccagttcaagtcaggctttctagaaatctcattgtatgttaggggttcgattagagtacagtcatgcatcacttaatgaatggccacaggatacattctgagaaaygcattgatagatgatttcatcattctgtgaacatcatagagtgtacttacacataccaagatggcatagctactacagacgtaggctctgtggtacaggccattgctccaaggctgcacatctctacaggatggtactgtactgaatactgtaggcaattggagcacagtggtaagtatttgtgtatttaaacatagaaaaggtatagtaaaaacagggtgttacagtcttaagggcccaccattgtatttccagtctccgttgactgaaacatcattatacagtacatgagcacgtatctttctcacctggtactagtggaaagctagaaggcttagaagtctacctgtaaacatagcttaagtaataatacagccttatttttaaatgataatagcaataatagtgttcacttattgagcattttactatgagttacttactaaatatatttcatcgttaatttactctttgtgttatttgatctataayatcgtttaacagggaaattacctagtacataatgtactgttatctacattttatctagatgaggaaactgaggcacagagaaattaagtactttgcctaggattacccrtgaagttaagtgacagaatcaatgaatctggaaggtctggcttcagatctcttgtgctgagtcactcgcatactttactacctctaaggtttctaatcagaggaatttgtatctgtattccctgctactcttaccctctatgtgggatttggcctttctccattatccctgtgaactcgctctgggaccttccttcttgtacttggaaccatcagaaagtgatctgagaacatagaaatctactgtgttgtgaaacagaattacctggaagcggaaaaagccctcctggctcaattcacatgtcacggcttatggtcgtayccggggaacatatgaaactgggcactgagtgcggagtcaggaaagccctgtccatcctctgggtttctggggaaaacgtggaccccttcattgtcactttctcctgtatatttttgtttttacttttagaactgtacaattacgtaataaataataaaaagtcgttggaaggataggtgaagttcagaagtgaaagtgttttggaggagtctaagctccttcccaccctcattgacctttcctctctaataaatagaactggtctaaccaaggatctgtggaatgagcagagtccaacggagattcagggattctaataacctcttgtagaatcactggtttgtttcagccacaagaaggaattaccttttgacattggcttgaacagctgttgtgcaaagaaaaactttttggaaagttctggaagtaccagattgattttataggtttttttttttttttttggagggacatgggggtattgacagttgatgttaatcagaaatcctaaattatgtgtattcctggtatgttgcaatcagccggccacctggttttcctctgggctcttaattttaggtgtattccgaggaagtttttctaacttttctgtaaacacagaccaggtatattgcatactttcaatgtttaaccaaatctcttcactgtttgcagtattatctgtaggctctcatgttttaagacttcccatggtgtttttgtattgtattttgctaacctataaacaattctttgaacttaaaacaagatatttgggcagtaacaataaattttaaaaacatcaattcaacttttttacattagggcttggactatggaaaaagtattgggcagcatgcctcatactgagttgtttaatgaatttaaaagtatagccttaatagtgagagaaactctatagcttcataatataaattgggtaactaatgagataaaatggttggcagatctgctcactagaatytaagctcttcaagggtctgagtttttttttttctttttcttttattatactttaagttctagggtacatgtgcacaacgtgcaggtttgttacataggtatacatgtgccatgttggtttgctacacccatcarctcgtcatttacattaggtatttctcgtaatgctatccctcccttggccccccaccccacaacaggccccggtatgtgatgttcccctccytgtgtccatgtgttctcattgttcaactcccacttaggagtgagaacatgtagtgtttggttttctgtcgttgtgatactttgctcagaatgatgatttccagcttcatccatgtccctgcaaaggacatgaactcatcctttttttatggctgtgtagtattccatggtgtatatgtgccacattttctttattcagtctattattgatggacatttgggttggttccaggtctttgctattgtgaatagtgccacagtaaacatacatgtgcttgtgtcttcatagttggacgagttataatcctttgggtatatgcccagtaatgggattgctgggtcaaatggtatttctagttctagatccttggggaatcaccatactgtcttccacaatggttgaactaatttacactcccaccaacagtgtaaatttagtcctgtttctccacatcctctccagcatctgttgtttcctgactttttaaatgatcgccattgtaactggcttgagatggtatctcattgtggttttgatttgcatttctctgatgaccagtggtgatgagcatttcttcatatgtctgttggctgcataaatgtcttcctttgagaagtgtctgttcatatcctttgcccacttattgatggggttgttgattttcttgtaaattttttttaagttctttgtagattctggatactaccctttgttggatggataaattacaaaaattttctcctattctgtaggttgccttttactctgatgatagtttcttttgctgtgcagaagctctttagttgaattagatcccatttgtctagtttggcttttgttgccattgcttttggtgttttagtcatgaagtctttgcccatgcctatgtcctgaatggtattgactgcatttycttctagggtttttacggttttaggccttatatttaagccttcagtccatcttgagttaatttttgtataagatgtaaggaagggatccagtttcagctttctacatatggcaagccaggtttcccagcagcatttattaaatagggaatcctttctccattgcttgtttttgtcaggtttgtcaaagatcagatggctgtagatgtgtagtgttatttctgaggcctctgttccgttccattggtgtacatatctgttttggtaccagtaccatgctgttttggttactgtagccttgtagtatagtttgaagtcaggtagcgtgatgcctccagctttgttcttttggcttaggattgtcttggctatgcaggctcttttttgcttccatgtgaaatttaaagtagttttttccaattctgtgaagaaagtcattggtagcttgatggggatagcattgaatctgtaaattaccttgggcagtatagccattttcacsatactgattcttcctatccatgagcatggaatgttcttccatttgtttatggcctcttttatttcattgagcagtggtttgtagttctctttgaagaggtccttcatatcccttgtaagttggattcctaggtgttgtattctctttgtagctattgtgaatgggagttcactcatgatttggctccttgtttgtctgttattggtgtataggaatgcttgagattttttgcacattgattttgtatcctgagactttgctgaagttgcttakcagcttaaggagatttagggctgagacgatggggttttctaaatatacaatcatgtcatttgcaaacaggcaattttacttcctcttttcctaattgaataccctttatttctttctcttgcctgattatcctggccagaactaccaatactgtgttgaataggagtggtgagaggacggcatccttgtcttgtgcaggttttcaaagggaatgcttccagtttttgcccattcagtatgatattggctttgggtttgtcataaatagctccttattattttgagatgcgttccatcaatatctagtttactgagagtttttagcatgaaagactgttgaattttgtcaaaggcctttcgtgcatctattgagataatcatgtggtttttgtcataggttctgtttatgtgatggatgatgtttattgatttgtgtatgttgaacagccttgcatcccagggatgaagccgacttgatcgtggtggataagctttttgatgtgctgctggattcaatttgccattattttatagmggattttcgcatcaacgttcatcagggatattggcctaaaattctctttttttattgtttgtctgccaggctttggtatcaggatgatgctggcctcataaaatgagttagggaggattccctctttttctattggaatagtttcagaaggaatggtaccagctcctctttgtacctctggtagaattcggctgtgaatctgtctgttcctggactttctttggttggtaggctattaattattgcctcaatttcagagcctgctattggtcatttcagaggttcaacttcttcctggtttagtcttgggagagtgtatgtgtcgaggaatgtatccatttcttctggattttctagcttatttgcatagaggtgttgatagtattctccagtggtagtttgtatttctgtgggattggtggtgatatcccctttatcattttttattacgtctwtttgattcttctgtcttttcttcttgctagcggtctatcaattttgttgatcttttcaaaaaaccagctcctggattcattaatttttttttttgaagggttttttgtgtgtctrtctctttcagttctgctctgatcttagttatttcttgccttttactagcttttcaatttgtttgctcttgcttttctagttcttttaattgtgatgttaaggtgttgtttttagatctttcctgctttctcttgtgagcatttagtgctataaatttccctctacacwctgctttaaatgtgtcccagagattctggtatgttgtgtctttgttctcattggtttcaaagaacatctttatttctgctttcatttcgttatgtacccagtagtcattcaggagcaggttgttcagtttccatgtagatgtgtggttttgagtgagtttattaatcctgagttctaatttgatttcactgtggtctgagagaaagtttgttgtaatttctgttcttttacatttgctgagcagtgtttttcttccaattctgtggtcaattttagaataagtgcgatgtggtgctgagaagaatgtatattctgttgatttggggtggagagttctgtagatgtctgttaggtctgcttggtccagagctgagttcaagtcctggatatccttgttaaccttttgtcttgttgatctatctaatattgacagtgggatgttagactcgcacacaataataatgagagactttaagtctttttctaggtctctaaggacttgctttatgaatctgggtgctcctgtattgggtacatatatgtttaagatagttagctcttcttgttgaattgatccctttaccattatgtagtggccttctttgtctcttttgatcttagttggtttaaagtctgttttattagagactaggattgcattccctgcttttttttttcgcttggtagatcttcctccagctgtttattttgagcctatgtgcatctctgcacgtgagacgggtctcctgaatacagcacagtgacgggccttgactgtttatccaatttgccagtctgcgtcttttaactggggcatttagcccacttatatttaaggttaatattgttatgtttgaatttgatctgtcattatgatgtttgctggwtattttgcccattaattgatgcagtttcttcctagcctcgatggtctttacaatttggcatgtttttgcagtggctggtaccagttgttcctttccatttttactgcttccttcaggagctcttttagggcaggcctggtggtgacaaaatctctgagcatttgcttgtctgtraaggattttatttctccttcacttgtgaaacttagtttggctggttatgagattctgggttgaaaattctttaagaatgctgaatattggcccccactctcttctggcttgtagggtttctgctgagagatctgctgttagtctgatgggcttccctttgtgggtaacccgacctttctctctggcagcccttaacattttttccttcatttcaacgttggtgaatctgacaattacgtatcttgggattgcgcttctcgaggaatatctttgtggtgttctctgtatttcctgaatttgaatgttgacctgccttgctaggttggggaagttctcctggataatatactgaagagtgttttgtaacttggttccattctgtctatcactttcaggtacaacaatcatagcattggtcttttcacatagtcgcatatttattgaagcctttgttcatttcttttcattcttttttctctaatcttgtcttcttgctttatttcattaatttgatcttygatcactgatatcctttcttctgcttgatcgaatcggctattgaagcttgtttatgctttgtgaaattcttgtactttggttttcagctccatcaggtcatttaagctcttctctacactggttattctagttagccatwtgtccaaccttttctcaaggttttaagtttccttgcgatsggtcagaacgtgctsctttagcttggagaagtttgttattaccaaccttctgaagcctacttctgtcaactcgttaaactcattgtccatccagttttgttcctttgctggtgaggagttacgttcctttggaggagaagaggcgttctgtttttggaattttcagcytttctgctgtggtktctccccatctttgtggttttatctacctttggtctttgattttggtgacgyacagatgggttttggtgtgggtgtcctttttgttgatattgatcctattcctttgtttgttagttttccttctaacagaggcccgtcagctgcaggtctgttggagttgctggaggtccactctagaccctgtttacctgggtatcaccagtggaggctgcagaacagcaaatatcgcggcctgatccttcctctggaagcttcgtccaagaaggacacccacctatatgaggtgtctgtcggcccctactgggaggtgtctcctcccagtcaggctacatggggctcagggacccacttgaggaggcagtctgtccgttactggagttcaaatgccgagctgggagaaccactgctctcttcagagctgtcaggcagggmtgtttaaatctgcagaagccgtctgctgccttttgtttagatatgccctgcccccagagatgcaatctagagaggcagtaggccttgctgagctgcggtgggctccacccagttcaagcttccttgctgctttgtttacactgtgagcatagaagtgcgtactgaagcctcagcaatggcggggaggcgcttcccctcaccaagctccagcatcccagcttgatctcagactgcttggctagcagcaagcaaggttccatgggcatgggaccccccgagccaggcactggaggcaatcacctgctctgccagttgcgaagactgggaaaagcacagtatttgggcagagtatactgttcctccaggtacagtcactcacgcctttccttggctaggaaagggaaatcccctgaccccttgcacttcctggatgaggtgacgtcctgccctgctttggctcaccctccatgggctgcacccactgtccaaccagtgccartgagatgaaccaggtacctcagttggaaatgcagaaatcacccatcttctgcatcgatcttgctgggagctgtagaccagagctgttcctactgggrcatcttggaagcaactctgggtctgagtttctgtttgttgccctgatgtatatccccagtgcctagaatgatacttgttacataggaagtgcttgatccatgtttgcacaaatgaatctttctcataatgaggtttctctaaacaagctgttctcccaaaaacttamacccagctttatgttgaagcatctcattatacattggaaagatgaaatgtgtagtgagactttgaatcttcttttgaatctagaaacattagcatttttagaccattctattttaatatttatgaaatttatgaaataataagaaacatgaggccgggctcagtggcttatgcctgtaatcccagcagtttgggaggccagggctagtggatcatgaggtcaggaatttgagaccagcttggccaacatggtgaaaccccacttctactaaaaatataaaaattagctgggcgtggtggtgcatgcctgtaatgccagctcctggagaggctgaggcaggagaatcatttgaacctgggaggcggagtttgcagtgagctgagatcgtgccattgcactccagcctgggcaacattgcgagactccatctcaaaaacaaaaacaaaaacaaaaaaaatgtgtgacctaaattaggcttatagatgaaccattgcagtcatgattaattccgccattgtttgccttgtgatctttggtgccatgtctgtacatatttcatgatttctgtgtttttacggtttccatttcagatctcccttgagtttagaaatctggctgagaaataccaaacagtgattgccgacatttgccggagaatgggcattgggatggcagagtttttggataagcatgtgacctctgaacaggagtgggacaaggttagtctcataaaacagtgtctgtgtgtgatgtattagacagagctggcagtcctcatagtgaagctcagaacaagaaaagttrtccagtattttcagcccctctggttttacaattcatctgtttaggttgaatgtctcatcataaacagtttattccagagttaattccaaaccagcagctatgtaggatatcagccaggctaggagtagggtactggagagaagtgcttatctagacaaagggatgtaattgaccatgaagattaaaactacacatcaaaacataaggtagggttaggagtcttgcctatttttcataggaatggtgtttgtgagacttactcatcacttctgtggaagtaaagacattttatttatttattttaaagccartcagatttagcaggcagagacatttcagacatctaaagtgttgatgtatttcatacctttaactgtgcttaaattaggatctccgaaaagatgctgctacatggtcactacgttagtgtaggtccaaggtcttgggcctcttaatttttcaaacctcaaaacttgacagcagttatctttggaactgctgatttgtgcttcctaagttaacagcatacaatgaytgctagaaatcaatttctgcatttaaggtgaagttagccgggtactatggtttacctgtaatctcagcactttgggaggctgaggtgggaggatcatttgagcccaggagttagacacaagcctaagcaacatagcgagaccccgtctttcaaaaaattaaaaaatgagcagggaattggtggcatgtgcctgtggtcccagctactctggaggctgaggtgtgggaggattgcttgagcccaagagttgaaggttgcagtgagccatgattgtgccactgcactccaacgtgggtgacagagcaagacaccatctgaaagaaaataaagttgaagttaaaacttctggccaagaaccagcactggttatgatagtaactcattttctgttgtgcagatttattcaggaaacttaattttaggttgttgaatagaagttttgatcagataaaattgaattaaaaaaaattttttttgagacagggtcttgctgttatccaggctggtgtgtagtggtgtgatcacggytccccgcagcctcaacctcctgggctcaggtgatcctcccacctcagcctaccgagtagctgtaactacagtgcatgacaccataccaggctcatttttgtacattttttgtagagagagggttttgccatgttgcccaggctagtctcaaactcctggcatcaaacagtcctcccactctggcctctcaaatgttgggattacaggcatgaccagccaattatttcaaggagttattttttttcttctactttgggggaagatgaattatataagtctccattttaggagtatttctaccaaaagaactattatcttcaaatatatttttggatagtactatagatatactaatttttttttaaatttctagtaattcttttgaagattttgtatagctgtccaaagccaatttctgtctacctaatttcagcaagatttcactcttttcatgttacttttgtcccagaacaaatttcaagtgctttctcttcacctgtgcattcttccccctgattagtctctggctttgtattactttcagtcagagacgactttttttttttgagacagggtctcactctgtcacccagactggaatgcagtggcacagacaaggcagccttgaccttctgggctcaagcaatcttccttgccctcagcctcctgagtaactgggaccacaggcacgttgccaccatgcctggctartttattttaatttttattatttttgagacagggtattgctctgtcacccaggctggagtgtagtggcatgatcaaggctcactgcagccttcacctcctgtgctcaagcagtcctctcacctcagcctccccattagctggractataggtccacaccactacaccaggctaatttttgtaattttttggtagagacagggtttcatcgtgttgcctaggctggtcttgagctcctgggctcaagcgattcacctgccttagcctcccaggtgtgagccactacactcagccttttaaaattttttacagagatgaggtcttgctttgttggccaggctggtctaaaactcttgggctcaagcagtcccctctccacagcctcccaaaattccgggattacaggcgtgaacttcggtcatttcctaacttttacccttcctaatgacactccagagcttaccttctttacttttgcttcttaagttaactaatagacaattattgtatgtggatattgcattaagttgtcttaggatacccttttcagaggaggacagcttttgacaaattgctgtcgcggaaaaaaaaagtatttggcaattaagagttgcatttactgaaatctctgttgagagaggggaagttacgttgtctctaaaagaaaaactaaaaagaaaaggggaagttttagcaaagttgttaaagcctgacacttaagtcatactacctagttttgaactcttagcccctgccacagacacggcagccccttgaaccttcctgggttcaagcgagcctcctacttcagccccctgagtaactgggaccactggcctgtgtcactgtgcctggctaattttttttttttcctcacatgggcaatgttgggcaagttaaatcgacttctttgtgcctcagtttcctcatctgaaatggagatcatactgctatgtacctgatacaatgtttgtgaggattgaatgtgcagagttctttttttctgttgttgttgttttgagacggagtctcactctgtcgcccaggctggagtgcagtggcgcgatctcggctccctgcaagctccacctcctgggttcacgccattctcctgccttagccttctgagtagctgggactacaggcacccgccaccaggccagctaatttttttgtatttttagtagagacggggtttcaccgtcttagccaggatggtcttgatctcctgatctcgtgatccgcccgtctcagcttcccaaagtgctgggattacaggcatgagccatcgtgcccggctgaatgtgcagagttcttaaaacmgtgtcaagaacataaaatagttatttgttctttcatataatgatgattttgagggcctgcggatcttgacatgttatcagattggtcaaaaaaagattaaaccatagttggtattgtcctagttcctgttaccagaatattccatctttcatcgttgccttctctcatagttttatgtatcaaaaagtttattgtaaagctaggscgggcacggtgtcttgggctggtaatcccagcactttgggaggccaaggctggcagatcagttgaggtcaggagttcgagaccagcgtggccaacatggtgaaaccccgtctctactaaaaataaaaaattagctggatgtggtggtgggtgctttaattccagctactcaggaagctgaggcaggagaatcacttgaacccaagaggcagaggttgcagtgagttgagattgtgccastgcactccagcccaggggacaaagtgagacttgatctcaaaaaaaaaaaaaaaaaaaagttattgtaaagctagacacggtggtatttgcctacaatcccagctgttcgggaagctgaggcagaaagattgcttgggtccagtagtttgagtctaacgtgggcaaatatatgagactccatctcaaaaaaaaaaataaaaaataaaaataaaaaaatgtttactagtttttttcagtagccttttattatagtagcagtacatgtgtattgtagaaatttggaaaatacaagtgaaaaataaaaacatcaaattcccgtcagccagagactgctrtgaaatgttttgagcacatccttcttgaatgttttttaaatcctggtatgtatatttgtattttaaaatcaaaatgcattcttacccattctcttttgaacctgcttttttgtagctaatgatctctagtgtgtccatttcagtaaaaatkscattattaaagtgctttaaaaatcgtctcttacagtactgccactatgttgctgggctggtcggaattggcctttcccgtcttttctcagcctcagagtttgaagaccccttagttggtgaagatacagaacgtgccaactctatgggcctgtttytgcagaaaacaaacatcatccgtgactatctggaagaccagcaaggaggaagagagttctggcctcaagaggtaacagattcagggtattttgggggaaaataactttagacattctctgaaaaatcctttaactcttgtggttgcgggtgacagaaaaacaagycaggcctcccccaggcagcataaggggatgtggaaaataggataghttgacatgagtttgcttcaggtagactggctgactcccaggattcacaccacgtaatcagtatattcaagccttgctgtccttgatttctttcagacggtctttctccaagtggtggatatggtaacaacccaygtgcactagcttaacaaaaagttcttaggaatggctttgttcggcctggcgcagtggctcatgcctgtaatcmcaacagtttgagaggccaaggtgggcggatcacctgaggccaggagttcgagaccagcctggccaacatmgtgaaaccccgtgtttactaaaaaatacaaaaattagccgggcgtggtggcaagggcttgtaatcccagctacctgggaggctgaggcaggagaatcgcttgaacccaggaagcagagattgcggtgagctcagattgtgccactgcactccagcctgggcgacagagtgagactccctctcaaaagaagaggaagggcttggttcttctgctcagccctgaatcagttactgttgctacacagctgagttctctggcctcrcctggattacgtctacacagtacacacagaatggatttcccccaaagaaagaattctgcrgcaggaaggggaaagggatggcaggtagacaaaaactccaggtgtctgtaataagggacagggtcgatctttaattaaaacatggacagggaacagaaagcttttgatactgattttgttcagaaggaaagtagaaaattttatgactgttccctgaatttattccagcatttaccttttgctttccataaaagtgtttcctgcagccaagtactttaaagttttaaaaagacgggtgaggctaagtgtggtgtctcatacttataatcccagtgctgaggccaggagttcaagaccagcctgagcaacacagcaagataccatctctataaaaaattgttagaaaatgattctgctgaaagagcaaaaataaaaattaaagaaagtagaaaaaataaaactaaatttaaaagattaactgggcatgttggcatgcacctgtattcctaggtattcgggaggctaaggcacaaggatcccttgagcgcaggagctcaaggttggattgagttgtaatcacaccactgcactccagcctcggtggcasaatgaaactgtctcaagaaaaaaaaaaagtgacagagggaaacaatatttgcaattcatagagcagatacagggttcatattcctaatattaaaaaaaacttctaaaagttaagaaaaaggccaactgccccacagaaaaatgggcaaggagataagaacaagatwgttcacaggaagagacacacagatgattattaaaaatctgaaaagatgctgagtcttactcctaagaaaaattcacatttaaactactctgggggctgggcaaggtggctcacgcctgtaatctcaacactgggagaccaaggyaggaagatcactgaagccaggrtatcgagaccagcctggacaacgtagtgagaccttatctcttaaaacaaaacaaaacaaaacaaaamaaaaaaaacagtaaaaattggccgggcacagtgactcctgcctrtaatcccagcactttgggaagcccaggtgagtggatcacttgaggtcaggtgtttgagaacagcctggccaacatggcaaaaytccgtctctactaaaattacaaaaattagccaagtgtggtggcatacgctggtagggccagctacttgggaggctgatgtgagactccatttaaaaaaaaaaaatcaaaaattagctgggtatagtggcacacccctatagttctcgctccttgggaggttgaggcaggaggattgcctgagcccaggagttcaaggctgcagtgaaycatgatcrcaccactgcattctagcagcctgggagacagagcaaaacccttgtctcaaaacaaasaaacaacaacaaaaaaacaaaaaacacttccctcagctcagacatggccttttaagtttcctaggtgactcgtgtgcagccagggttgagaaaccactcttgtcttacccctcttttgcagacacagggctcagagaagggaaggggattgtctggggatgtatagtgaggsagtggctgccttgraagtggagtctcagtctcccggctcctaggccagcccctgaccactgttccattgtctcccagacagaacatcagccacgggcatgtgatgcatgagcgtgagccacaccatcttgcacacacaggagcagagccctgctcttctcattcacttactttatctgtaaaatagcatcatttctaccacacggtggtggtgtgaataaaatgagatgaacttctagcatagagtgcttagtaaaggttctggacatttcgtagtagttgaatcatgccaaatgtggtcctaggtgattggcttcttttgctagcatgttttcagggctcctccatgctggggcattgcatcactgctttattcctttttatcgcctagtattattccactgtgtggatagaccacatttatccattcatcagttgraggatatttgggttcttcccattttttttggctatggtgaatagtastgtgtacatttgcatataagkttttgtgtagatgtgtgttttcctttttcttgggtctatgctgagaagtggaattgctggttcatacagcagctcgaaccttktgaggagctgccagacgcttttccaaggtcgctccaccattttacattcccgtcagcagtgtgagagtcccagtttcaccagcacttgttgttatctctttttaactgtatgtatatatacttaacattttatttataataaatgtacataatagagaatttgccattttaactatttttaagtctattattcagtggcattaagtacattaatgatgttatataaccatcaacactatgtttccagaactttcgctagcttcasagaatcctctaaataatatcattaaaaatcatcaagccgaatcccactgttagaattaaaggttttatttcactttcaagttatcaggatccagggaggtgtaatacacttagaggatagactcagctcatttcccagctatgcctttcagcagcwttcttaccagagtaggaatataatgttagtcattatttagaggcctggccatcttgagaaggtttactgtttagtctgcagtacaattataactgtttttgtatattgggttatttttttcagaagtaggccagtagctctaacaggagcctctttagcctgaattcrtccaagtagtgcagtgttgcactagttgtccctcgggacatgctccccaatacgtaactcacttccaggttgcaactggacacttactggtagtcagaaatagctattgcatggagcttaaaatgaacttgatcttcgtgaaagatgagtctgcagctaagagactttactgtatatcatagtgtttttttttgttttgttttgtttttgtttttgtgacggagtctcactctttcacccaggctggagtgcaatggcgagatcttgactcactgcaacctccgccccctaggttcaagcaattcttctgtctcaccctcctgagtagctgggattacaggcgcctgccaccgtacccrgctagtttttgtatttttagtagacacagggtttcaccaccttggccaggctggtcttgaactcctgacctcgtgatccaccctcctcggcctcccaaagtgctgggattacaggcgtgagccacggcgcccagcctgtatcatagttcttatgcacaaagaccctttaatattgtttgtaaattctcccctatgcacacgctgacctgttccttaatcttcttatctgtctaggtttggagcaggtatgttaagaagttaggggattttgctaagccggagaatattgacttggccgtgcagtgcctgaatgaacttataaccaatgcactgcaccacatcccagatgtcatcacctacctttcgagactcagaaaccagagtgtgtttaacttctgtgctattccacaggtagggaasggggctcctctgggtggatayggggctaaagggagtggggtaggagtaagggtggattttgctgtgctatattcaaggatatgattccttaaaaagacgatgactccagtttattacgctgggagtttcatagcacccgcctttgcttccagccaccaaactcagctcagccttgaggttaagcctgctccttttcagaaccttctttcyggatttactattttctacagctatcctaaactagttaggttcttttcctcacagttaagtcaaggtctttggcttagatttatggggagtgctgggtaaaacctgggtgaagctgttatcattaaaaagtcttcattaagcacctaattactgctgtccttttcctagacccggcataaaaagaacctggtccggtagacctagcctctcagtatgctaggaacttacactttttagttgcctttaccaagtattgcagatactactgcaaataagtgaagaaagtaacagcatttaactgatttgggaacttggtttgatcttgttctaatgaccmacttcgaatggtggttgaaagtaaaatctgtatcgccgtcttatgtttccatttacctagaaatactttacctttgagcacaggaaattaatccccttctggttgttctccccctggcattggttttaaatatataatgattatgtttgttgtakgaaaaatagaaaaacaactacaatagaaaattcttcccatatattattttgaaatacatatttccgatccgataatccattgctctagcatggaaaatgttggatttacttgtgtttgctttttccaaataaaatggaacttttgtggctacattatagaattgttttagactgcttaattctgtgtgttgttgaraaagggaggagtggggaaggtaaaaatcttgacatactttcttcgtgggtattttttcttgagcgattccatcttagttgattagcagttagcaattgcccattcaacagaaggttttcttacctttttgtgataatgatagctaacgacatcatttcttcttttttccctctcttcttgttgtctctaggtgatggccattgccactttggctgcctgttataataaccagcaggtgttcaaaggggcagtgaagattcggaaagggcaagcagtgaccctbatgatggatgccaccaatatgccagctgtcaaagccatcatatatcagtatatggaagaggtgggtttttatttaactacttggataatttgtagctacttttatgatktagtaatgtcactgtttaaccaggtttggatattagatgatcctaacaattcactatcctgtggcctaaagagacaggaattgatatcctttataaggaaaaaagtctattcacaggagccgagcagattgctcactgctgtgtagtaccctggtgagaggagataaatggagsaaggctgtaggttggagcccctcagtagaatcatagattttgagctgcaagatgatgcaggaggccaaccaagcttcttgttgctggtgaggaatgtgaggttgaagcttgtctgtgctgatgcagtgcgtgattgagtggatctctggctcccgtccatgtgtcctgacacccagtctggtactttcattatgccacaggcctcaattgaaaaatcacagtagggaatttaggccaaggaaagccatcaagttgcaattatttcctaaattttctttggaaaatttcatttcaaataccaaaaccatcctataaaaagaaaacttaccttcttaggtcaaatctctaatatttgactagrttcaaaaagtttatttctggccaggcacagtagcttactcctgaaatcccagcactttgggagaccaaggtgggaggatcacttgaggccaggaattcaagaccagcccgggcgacatagcaagaccccatttctacaaaaaatttaaaaattgtcatggtggtgcacgcctgtggtcccagctactcaggaggctgaggcaggtggatcacatgagcctgagaggtcgaggctacagtaagctgtgtgatttcatcattgcactctagcctgggtgatagagtgagactttgtctcaaaaaaaaaaaaaaaaaaaaargtcttagagaccagaagtctytgtaatctctaataatctctaggccctagagcagtggtttgtaaatggaggtgatttgctcccctccccccagaggacattggacaatgtctggagacatttttgattgtcctaaccggcaggaatcgggtgctactggcatctggtgagtagaggcccaggatgatgctgtgatcctcaggtgtgatcctgttgagaatgaaacactgtagactttatgaaaacatacaagaccctcatcatttttcctttgcctgagctccctccccagaggttacctctgttcatggttttgtgcatccgtctagtccccctrttacgcgtttacaggaatatggtttgcaacagtgttttcatctaaatagaattatacaaaatagcgatttctgatttctcttgcatattgcacattcttcttatacttcctccctacctttatctgacacagaaatgctgtatgtccagaacttctatcagaggcacctatggaagtctaagggaagaccacatcgcttttaaaaaccctaaaattttgtagtcactagatgaaaatattcagccagtgacccaaaaaattgctaccaatgagactctccattttgccatgtagccagaacttactttgatctatgtgcctggggtagtgaccaagtaggtgggtaggagtaatctcagggaaacttgaggccccagcctcatggctagggtcataatttgaacccaggtctgtctgacatcagaatccatgatgttaaccccaattctaaggggttcaactaccctttctaaatggaatcctgctatattargcactatttattcattttatataaactagaaacattttatgtagtaagtagttgagagtgttttggttttgcagtttgatcactagttttagaaaccagtttttaaacactttgtggccaattccattactatattaaaattcagatttatttggtttttccttaactattgggattaaatcctggttgtaattcatagtttgagggcgagggtgggcagtctacagttggctgagccctgtttttgtgaataaatgttatcagaacacagccacacccatttgcttctwtgtcttctgtggctgcttttgcaatgtgacggccgagttgaggagctgcaacaggcgatgacttgtaaagctgaaaatattttttggcccttgaataagaggttkgctgacttctgacttagggyatcagttgttctgttatcccagtaaaactcaaggcattaggggagaaatgttaatattaatacttaagttgatttgatttagggaaatctttgaagatttctaagtcttaagcagtagaacctgttaatggttttagtttcagcagtaaggacattttacaagtaaagttttaaatgaaaacattttgtatgaagccacaagtcgtctggcctcttgctggtgtccagatattaacactgatcctatttctccttgctgaccaagtctgtcctttgtagtaagaaaggaagaaacgttgactctgtccgatctctggacttagtgttgtagcgagcatgcacctggaagggacttgccagaggacctcctcatgcttctccagtgcttagtgggggcttggagtgcagccccaggtcttcacgagcagttggccacactgcagggccctcaccccactctggagcagcctctgcttcaaaccagcctggatgcttgtcagctggggagaagatcaacctgctattttgggatagaaataaatgctcagccaaacggccagaaacccccattcccctctctgccaaagtgaattccttggcagggagaakcttgttcgtgtctctgcacacttcctgtgccctcctgtggttaagtcagagaatcatccggctctttgagccccaggtgcctagctgctcaaggatggtccccagccagcagctgccaggaatcacctgggagcccattaagacatccagcccccacccaaacstatcgaatcagaatctgcctttttttcccaaatgatgtttttgctttaatggaagtttagatgttcatagacaagagttttaaatgatgatcaagctgattccatattcgcagttgtaagtagaactgctgagacgtggaagtaccacatggactcacagaggagctgctgtatgtagcacagcattgcacaagagcttatttcagtctagtaaacatttataggagcctgtgtcatttaatcatcaagcctcgcactgtggctcacacctgtaatcccaaaactttgggaggctgaggcaggcagatcacttgaggtaaggagttcgagaccagcctggccaatatggcaaaaccctgtctctactaaaaatacaayatttagccaggtgtggtggtgcacacttgtcatcccagctattccggagcctgagacatgagcatcgcttgaactcgggaggtggagkttgtagtgagctgagatggcaccactgcactccagcctgggcaacagggtgaaggccctttctcaaacycctcaagtatttggcttcaactttatgccgggcatgtagatgaaaagtcggctatgacctgtccttgacaagcagatgtaactccttgattgaggctagtaggtttttaagacctgaataattgagtttgcagaaacctactgtgtgccttcaggtaaatggagagtggggtttggtctagcaacgaagcatctagaaggtcyctttggccttacyggctctgttttaggtaagtccacgtctgagtaccagtgactgcagctcttccagttgtgctgtcatgyttatatgttagaaatgatcatcaaaggactcaaaagttttgccactaattgtattaccggggactgtcacaaccaagatttctcttaatttattcaccttacttatctcctggaagggcatattgragtgctcttggagttctctaaaagggtttttgttggttgtgtatattcacttgggtgccagcgattgattccaaataagtaaatcttttttcccaaaaggatgtaagatggcttatggttataagtacaacaggctaacaaagtmcaagtagatgagaaagtaaaatgaagaaataaagtcataggagccmcagaattaacccaggaatgaataagtgtgtagtttggtgctgatgttatcatcctttatttgtacattgcttgtacagttgctytgagaaggtaagtcttaaattttcaaaagtgaaatgtcmccgagcatggtggcttatgcctctaatctcagcactttgggagrctgaggcaggcggatcacttgaggtcaggagtkcgaaaccagcctgacttatgtgatgaaaccctgtctctactaaaaaaaaaaaaaaaaaaaaaaaaaaaaaaatmcaaaagttagttgggcatggtggcaggtgcctgtaatcccasctacttgggaggctgaggcaggagaatcrcatgaacctgggaagtggaggctgcagtgagccaagattgcaccactgcactctagcctgggtgacagagcgagacaccatcttaaaaaaaaaaaaaaatctacaatataccaaaaccattacttacctgagaaactattctcagggtcattgtagtgaatgcctattttatggcttttgatggcatcagggcactcaggtcatttacaagagtagtgtgtgagaccctgtgtgtcactgccactcatcttggccttcggccactgctgtagcaaccagtttccaagtagggctggaccttgccttctgctccagagacctctcgcttcctgcccttgggcttctgacgagctgcaggaactgcctggcacgtgggtccccacaacccagaggaggtgagggccacctctctgctcctcagggccacctttcataaggctccttgaaggtccctcaagatcaagccaactcaacacatccttgataggccttcctgccttctgtttcacttctccactcgtttccaaataaatggctgcatgcaagcttttgcctcaggttctgcttttaggaggaaggctaagacaagcagtaaagcaacatgggcaggcagaaggatgacttctaatagaattatctcatcactatatattttactttatggatgcttgtattgaaaagtcttggctgggtggagtggctcacgcctgtaatcccagccctttgggaggccgaggtgggtggatcacttgaggtctggagtttgagaccagcctgaccaacactggtaaaaccttgtctctattaaaaatgcaaaaattagccagggatgcacgcttgctgtgtgccagcacagggctaggctggagataaaaaggtgagtaagtaggtgcggtgtagtcagggtgaaaactacagatggtccatttccacgtaagtggaaaggtaaaggtatgtacaatagggtggctcctggctgaacctggagctgcagacaggttttctagaaggcataatcctgaagttgagacttgggggcctaggtaggagccagttgaagggacgtgggaggygcattccagagagaaggagtggtatgagactggaacagaggtgtgcagcagcatcgcatgggcgaaacaacagtagacagttgttcttttgtttttgtttgttttttgagacagsgtcttgttctgtcatccaggctggagtgcagtggcatgatctcggatcactgcaacctccacctcccaggctcaagtgatcttcccaccccagtccccaagtagctgggggaccacaggtgcatgccacgatgcccggctaatttttgtacattytgtagaaacagggttttactgtgttgtccaggctggtcttaaacgcctgagcttaagcagtctacrtgcctcagcctcctgaagtgctgggattccaaacatgagccactgtgcctggcccggcaactgttactagactrtagagagggaggtgggcaagggctggtgacactagacaggtgcagtaggtctggaccatgggtggccttgcgctacacattacagagctcaggctttttttctccaggtgagagggctggtgccactgaggcatcaagcagaggtttgagatctccttggtgacagtgtagagcagacaggtagatttgggaatttaagcttagactcacgttggagactgagatagctcatctgagaggcactcagggcctaatctcaggcagtaattttagggatgtaggggaagagatggattctgcacatacttgggaggcttgtggaggagtggggagggaggcacagggaggactccagggtggttcatacggctccctgcttctgttcctgtccccctttgtcaagctgtggtctgtactgcgtgttccatcttgtttctaagctgcttttgcccagtctttccagcatttccctttcgtcatgttagtctgtgcctgtctacgtgaactatggtgacgtttattgggcctggcactgtgaggtgctggggatgtgaagatyattgtggctcagcygctgctctcgagggcctctgggtgcagtatgcacacctgtgcctcctgtttgctcaggaagacaggctttgagatgagctggggctgacatccccaccttatcattgggatggctttgggtaagttatgttcatgttctctgagcctccctttcctcattggtaaaatgggtataaaatacctgccagtggagggttgttgtaagtagccatggaaaatgtaaagcacatagcacttaycattttttcctgtgtctttaacagatttatcatagaatccccgactcagacccatcttctagcaaaacaaggcagatcatctccaccatccggacgcagaatcttcccaactgtcagctgatttcccgaagccactactcccccatctacctgtcgtttgtcatgcytttggctgccctgagctggcagtacctgaccactctctcccaggtaacagaagactatgttcagactggagaacactgatcccaaatttgtccatagctgaagtccaccataaagtggatttactttttttctttaaggatggatgttgtgttctctttatttttttcctactactttaatccctaaaagaacgctgtgtggctgggaccttwaggaaagtgaaatgcaggtgagaagaacctaaacatgaaaggaaagggtgcctcatcccagcaacctgtccttgtgggtgatgatcactgtgmtgcttgyggctcatggcagagcattcagtgccmcggtttaggtgaagtcgctgcatatgtgactgtcatgagatcctacttagtatgatcctggctagaatgataattaaaagtatttaatttgaagcaccatttgaatgttcgtamtagtagaaaatgatgtgaattttctttctgttcggctcctatttttctcatcattttgttttctttaattgggttgaatggagtagatagaaatatttatggtttaggtaacagttagatgtttcctaagaatgcaaactgccttttccacacaaaggctgggaataaaattctgggtattctcstattctcatttaaaggagtttagctttcagagagaaacagcaggattgcttttgaccttttagaagattggtctccagtaaaggtggacatttttgagatttttataataaagaatttaattgctctgcatttgtcaagtacagttcgcttgaaagcctgcctgactgtggaaaagatggagctcaagaatggagttgatggcccagcgtggtggctcatgcctgtaatcccagcactttgggaggctgaggcggtcggatcacgacattaggggatcgagaccatcctggctaacacggtgaaaccccgtctctactaaaaaaaaaaaaaattagccaggcgtggtggcgggtgcctgtagttccagctactcgggaggctgaggcaggagaatggcttaaacccgggaggcggagcttgcagtgagctcagatcgcgccactgcactccagtctgggcaacagagcgagactccatctcaaaaaaaggaaaaaattgtaaaaaaaaaaaaaaaaaaatttcccccagcagtttttgttttctaaagttatcagtttatatattcaggtcttaagaaaggcaaaagctgtcttcaggtgattggcttgggggcagaacagtacttctgctcggggtttcaccttcctctctactccagtgcagcagagcttgtgatgtgctctcactgaggtgctcagtgcagcaaggaggcctgtggaccctcgagttgagaattggtgtactagggcattcggtactttctagaagccattaatgctacaggtactcataaagtctactcttctgcagcccatcgtggatggtggcttaatcattgaatttgagttgtttcgagctgcaacgttggatttgcattgttgtaagcacactttcttgctgtgaccactgacaccaaaattagtttgggcccagggagacttcagttaattggttcatttgaggcttagccctggactcatttgtcaccagccaagataacttgccacatggaatacagccagaccaggggtccccgacccccaggcctaggaccggcactaaaccttctgttacgtggcctgttaggaaccgggcatcacagcaggaggtgagcggcgggtgagtgaacattatcacgtgagctccactcggcgttagattctcataggtgcgattgcgcgtgtgagggatctgggttgcatgctccttgtgagaatctagtccctgatgatctgaggtggcagtttcatcccaaaaccattttcctccctctgtccttgggaaaattgtctttatgaaaccggtccctggtgccaaaaagcttggggaccactgagctagactcgacagtattttccaaggaattaaagcctcaaaacttggtttgagatttcagggtaggttgttaaaaatctgtgtgttgaaatctaagatttaattctgccaaagttcacgttaagacagaacaacctgctggaaagagatttggtctgagtggggcctgcggaaatcttctttcctgacttggtcattacctgtgggaccacttcctgagctgtgtggtttgggtgatctcagattttttctatctataaagctatgtgcttttttctactcactgagttgtagaaaggtattcgctctcattccattctgaagctctttgaaagcttgttttccttctaagtatcttctctactaaggttgccagatataataggggatgctgggcatggcggctcacacctgtggtctcagctactcggagggtgttggggctgaggcaggaggatcccttgagctcaagaggttgaggcagaggttgtggtgagccaagatcacgccattgcactccagcctgggcgacagagtgagactctgtctcaaaaaacaaacaaacttgcataactgaaaattcagaagtagttggccatcttgtatttctgtttggtaactctggcaacactaccctctactccccacttctaatataattttatagcatctctggcatacagtctatttggatccgacctaatggtgcaatattttgttttcctcagaggagcctctgacccatgtgaatctaggaccataaacaattagaatgcttgggagcaagagctttatatctgcatatgggaacttccggatccctgtgggcaagtgcagggagggccccttcttccatctactgagccatttcccaggggctcgggtgtgtataggaggaagagggcgagtcaggcatgttaacaaacattctaggttattcttggcagttttggaaacagttctaaggctgtggttctcagactttatatcagaattgcctgattgctgggaacagagactgatacagtaggtctgatggggtgcccaagaggttgcattcctaaattctcatgcagttttctaatcagggagcagctggaaaggtattgtgagcttgaatgtacctgggaaactacctggggtcttgggagatgcaaatgctggttcagaggtctggccctctgacactctgatgagcatttctaacaggctctcaggtgacggccgtgctcctggtctgtggaccacttcagtatggctgaagcacaataaaagagggcaaattactgctttctttaaaaagagtggcagccgggcacagtggctcacgcctataatcctagcactttgggaggccaaggcaggtggatcacttgaagtcaggagttcaagaccagcctggccaacatggtgaaactctatctctactaaaaatataaacattaggccaggtgtggtggcaggtgcctgtaatcccagctactcgggaggctgaggcaggagaatcccttgaacccaggaggcggaggctgcagtgagccaagatcatgccactgcactccagcctgggtgacagagagagactcccatctcaaaatttttttttttaaatgcagaggttggactgcctacctatactctaatttctattctggagtgattctctggagagtctaggtaaagactgaaaaggcattgttacgtccacctgtcatctcacttggacaagaatccaggagaaactattgaactgaggtgacaaagttatgatcaatgtggtgatctgaggtgtattaaaacactgagctctttcccagtcacaaacactgcaaggcaggtgtttctaacaaagccttaagctgatgtcgacatgccccacaattccttgtcactcaccagcacatccccgctggctccatgctagaagcaggcaaggagctgcaggtgcgtatacgatggaggtgagggagacagtgcgcatggaatgaatcaactcagtttgggagcagggagaactttattgaggttatgaatatattctacttgaaactggaaggataagtggttatgaatttgtggcttatggtaacctttgttaagcatctttctttttctttttttttttggtgagacacagattcactcttgtcccccaggctggagtgcaatggcgtgatctcggctcactgcatcctctgcctcccaggttcaagcgattctcgtacctcagcctcccgagtagctgggattacaggcatgtgccagcatgcttggctaattttgtatttttagtagagatggggtttcaccgtgttgccaaggctgatctcaaaactcctgacctcaggtgatctgcccgcctcagcctcccaaagtgctgggattacaggcttgagccactgcgcccggccttttttttttttttttttttttaattattgagacggagccttgcgctgtcaccgaggctggagtgcactggcactgtcttggctcactgcaacctccgcctcccgggttcaagcgattctcctgcctcagcctcccaagtagctgggattacaggcatgtgccaccatgcccagctaatttttgtatttttagtagaggtgaggtttcagcatgttggccaggctggtcttgaactcctgaccttgtcatcctcccaccttggcctcccaaagtgctgggattacaggcgtgagccaccacggccggctgttatgctcatcatggcacttaagagatgcttaacaaacctttcctacaatgttcctcagattttcagagcttatttgatctagcatctggttcctaaattctgagtcacatcagaagccaaacttgaatgcttttggaaagagctagcctcataccacttcagttgggaaggggagtactgaggtgtaccttggcaggacagtggaatgattgctggttcttctagtttgctctataccaagaactgctataacatgtttctaaaccagggctatgcaaagcactagagttcctgaccagcaatgcaaaccagtggcatacaaattcaaaatactgtatacaggccctgactccagcccaaaccaaggctggagggcatccagggggatgtggttccccacggggtagcatcttggttatgtgagatcaccaagacaccaaacctgttttatgagctgaatcctcagcttgttgctggatttgtggctgataaaaagtacaggcagggcccagtggctcacacctgtaatcccaacactttgggaggctgaggcaggcagaccacctgaggccgggagtttgaaactagcctggccaacatggtgaaatcctgtatgtacttaaaaatacaaaaattacccaggcatattggtgagtgcctgtcatcccagctactcggaaggctgaagcaggagaatcgcttgaatctaggaggctgcaggttgcagtgagctgagaaggcgccactgcactccagcctgggagacggaatctcactctgtcagtcacaacaacaacaaaaaaatagagcacagctatgttttgagttcttaagcaagggcaagcttaccaggcacttacagagaaggttgacgaggatgacagggaactaattgggggagggatgccatggttgaaaacatggctggggcagcgagaagttaagatgaagtcccaagagtcgcaagaacatgcagttccaggacgtgattctctgcagggacaaagagagacagcagctacaagtctataggcagtgacaaaggatctgagatcccatcagagtagacttcaagttggagaaaccttttattggcacaggcattccttgttaacttgacagggtgaagctgtaatttttcaaaaacagtaaaagctggtttctcctaaactattttccttgtggtagtagagatcagtgggtcagaaacaactcctgaccacttggtttccttttgagccgcgtcataaggaggcaatctgtaaaactagcacaggtctcccgctgttccactggctcacccacatgattagcagagtgcacgaaaaaataaaacttctattaaagaatcatgctgagcacaagatcagagaggttgtgacattgcaaactcgatagatgcagggggcctgggagactggcgttctccaaagggctcccaacaccatctctcctctgatttctgtgacaaatgtggaaagctacttgcttggaggtactgggggaactgatgggggaactttcatcctgttaggaactccgctttccattcctgcgtctctgtcttgctccctggagatggatggatcacggagggggccacagtcagctggggcagcaggtactccctacggcactagtctacagggggaaggacgctctgtgctggcagcggtggctcacatggcctgtctgcactgtaaccacaggctgggatgtagccaggacttggtctccttggaagacaggtctgatgtttggccaatccagtccttcagaccctgtctgaaacttgtatcttacgtgaacttaaagaataaaatgcatttctaccccgatctcgcccccaggactggcacgacaggcccacggcagattagatcttttcccagtactgatcggtgcgtggaattccagccaccacttctgattcgattccacagtgatcctgtcctctgagtattttaaagaagcctgggaataaaaagtaaggtgcttttaaagtgtgacaagggtcaaccaatatagtcagactcatccttaaaagaccttaagtcactcatccctggccactcctgctgtgggcccactagcacagtcctcaacaccacaaggcttctggagccgtggggcacacctccacgggcaagccccctgcccggtcacccttcccatcacaggatctggcgcgatgctgtgggaactgttgcaggcgttggctctgaagctgctcagagtctgccctcacagcaaaagggaactcctgactgcctggcacttaggaggagctcacagcctggccgtaggtccagggtttaaggctgtgcggtgggtagaacagagaaagccgagatggccacggggtgtggctcacaattcactgttcttggcaggaagggggcagccactcaccattgtcac

SEQ ID NO: 8843 - DNA, 68610 bp, Homo sapiens
  misc_feature (1)...(68610): n = A,T,C or G, or insertion/deletion polymorphism (see Tables 1-2)
tcgggaggctgaggcaggagaatttcttgaacccaggaggcgaaggctgcagtgagctgagatagagccactgcactccagccagtttgggcgacagtgagactccgtcttaaaaaaaaaaaaaaaaaaaaaaaaaaaaaaaaagacggagaggtgctgtacaccttaagaaagagtcccccttagaagcagttctcccatttggtcggctggatcccagacacttgattttccacgccctcttccctgggacttctgcgatcacaagcagaagagggcagatggcattttaataatatagtaattccatcagaaaaaacatgtgacttagtactactaatctgacaggcagaaatgtagggaattgtactcaatgaatttaaccaacttctctccatttagtaccaattacacttcattcaaccagagaggactacaaaaaaaaaacgagtaaatttaagagcttactgtaaaccacttcatttcgaagaaaccttcctaaaacacttagaagttattttccaaaagatttatattttataaattcaacaaaggttcttcttttcctttagaaagctcttaggtttaagataacagtttgcatatgattactacttttttttaaatctccaagagtttacatgagaatgctagtagttcagtcctgaatgaaaacagagaaagagagaaaggaactccaaatttagctacatcagaaagctagaaaacactgtttcagtgcacacactgggcagattgcgcacattaaaacccactcccctagatcgcgcccaccgcactccagcctgggaaacagagcaagactccgtctcaagaaaaaaaaaaaaaccactccccagcagcctctgcattcattacatgttatgctaacatactggatttatgttaaactctacaaactgaaagctttgatagtaggggaatgtgtaggttattattaattcaagttctgttttttttttattaccaaccacatgccagacacaagtgatgcactagaaatgcaagcacaagacaccagctctgtcctcaaggaatgggcagtgtggctatttaagtgctggcacctgccagtcgtctgaatggggagcatgcttttagggacagtgctagggactggtggagaacacagccacactgtggtctgcctgccacctcctggacctctccacacccgcagaggcctttggcctcttttctttcccacccacattcacaccctgggtgacctcatctgatgtgacctccagtctatctccagcccaggcttattcttttagctccaaacctgtagacccaaaagcccactggacactgctctacaaggatgtctaacatccacctcacattcaacacacataaatccaaactcgcaacagaaagcttcccaccagacaggacctccccaagtcttccccatctgagtttctttttttttttttttttgagacagagtctcgctctgtcgcccaggctggagtgcagtggcgcagtcttggctcactgcaagctccgcctcccgggttcacgccattctcctgcctcagcctcctgcgtagctgggatcacaggcgcccgccactatgcccggctaattttttgtatttttagtagcgacggggtttcaccgtgttagccaggatggtctcgatctcctgaccttgtgatccgcccacctaggcctctcaaagtgctgggattacaggcgtgagccaccacgccccgcccccctccatctgagttgcttagctcaggccatacactatggggccatctttaactcctcccctctctacccatccctctcccaacttccaatctacaaacaaattctattgtctcaacctccaaaacacatgcagaagtcaacctcttacccaccctgagctaatccactggcatctccttgctggcttgttcaacagtctcttagctggtctcgttgcctctgcccttgcccctctgcagtacattctcaaaagagatgccagagcaagcctgttgaacacagtctatcatgtgactcctcctctagaatgaaaccttccaaacggctgccatcctgttcagaataaacactgagtcctcactatgagctgccatcctgttcagaataaacaccgagtcctcactatgagctggcaaggccccactacactgagcctaagtcacctttctatcctcagctcctgcttctcccaccgccacccgctgcacccgagccacaccaggctcttgctacctgcccttcctcctacactgctttaagtcttcgtcaaaacttaaaccttcagagtgagacccttcctggccatcctggctacaattccaatcctcctcatccttggcccaaatcaccatcccccaggagccacgcacttcgctgctaatgctggtctcatgtctagaacgttagctaccccagggcaatggttttcatctatgttgttacttctctagtcctagtgtctagaacaatgcctaacacatatctgacagtcagtaacaaacagtgtattgaattaatgactatcagaacagaaactgtattacacatggtcaaggaaggcagaatcttcaagaactctagagatcaaaggagggcagatcattaatcatctctgaaaggaaatacagcatcaagtcagaaggaaaattccccatgatatcctacaaacatcatatacgtttttatcagcataaacagagacctttaaatgcaaacaccttttctactctgatcccacatgcagcagcatccagtgtcctattaaagtatcaccatgtcaacacagttgtcaagggaaaataaaagataaaataaagtatcgccatgtaacaacataactgttctcccaacttgaacatgatgattttcacattttaggtcatatgatcgacactgaaccgtgtttttgaccttagccaagtctctcatatgatactccagcctcaaggtatcgaaatgatagaggcaggaggcagacaaatcctaggcagagaggggtgggtcaccagtgaaacccaaccttcaagccacagtttaaagcctgaaagccaagcgacgagtctcggataaatccacagactggattgcgaacctctcttcctgtttggtgcgctttcctctaattaatccccacccttcacctattttacatatacctacttttctctaattggtttattacactgttgtgcccacctttgagtagtgactttgttttaaccttttttgcatactcacagacaaatcagcacacactccccattctgagcctataaaagccctggacccagccacaccaagggagaccacccgactttgggtggaagaccacccttgagtcccctctctgctgaggggtgtttcatcactcaataaaactattctccaccctcctcacccttcgattgtcagtgttaagtgtagtctcattcttcttggacgtgggacaagaactagggacccaatgaatgcaagtacaaagaaggctgtaacactgtggccctgggccctctgccggcaaagggcagccacccactgtgacaccccacgtgacaggaggcagcaaagggaagcagcggggacggagccagccccagagctatagcctggagcagggcaatgggagtaacagggctgctgacactctgcaacaccccctcttgggcttcagggttgtaagcacccctgcttgggcgccactaccttccccttgtctggacaccagaatccactgtccctttgtctggacgctggagtccgccgtgggagttgcttgccacatgtctagctgtaagctctgcagagcccactctgctgcctgcgcttgaaacagctggcgggacccggcactcactcacccacacacccactcccgccaggggctgagcatacagtcatggtggccatggtatccgtgccatagtgcaaaccaggtgcccaccggtggaccaagtagatggggtatctcctgcggcgagcctggacccaagcaaggcctgggcaggggcctcgccagccggaggtctctggctgccagagtggctgagaaaaatcctgcatcacaaacaataacacctaaaaagatataatacaacagttgtaaaatagtaaacaacaaatagtacacagctgcaaatagttcaaccgtgaatgacggttattctaaaagacaaacttcacaagatatacacctggtcaacatgctccttagggagtcagggctcctgtttcctccagccacctaccacatttaagtggtgagctgctacaaatcattttaatagatattggcaatacacattacagttttccaactcagatcttaataaatttatgttgtagctaccagaaaaataaaaagtaaaaacaatcccattcagaatgacagaattaaaccagatgaaaatctttctttacagatgggggatacttggtaaaaggcaaatcagttcctacaaagaatgaatgagctaaaacttctgtgtaaaaatatttctagggctactgggctagcgatgggtttggcgctgacttaaaataatcttgctagcaaaaatggagcggaagcatgaaaggataggaaaaaaaccaacactccctatacacacacacacacactccttctctttctctctctcttaggaccccaagaaactaagacccgatgatacaaattcactgtttctctttctcgtcacggaaaagcagcttggagaatctactggttactaaattgaagacaaaaacaaaaaagatacgtatactgtgatgaacacgtcacgtttctctcctccaacctaccaataacttcataaaagttaaagagcttccatcccttcacgctcagctgcggaaaggctacgctttcgcccgccgctcgcgtccccggcccggaccgcggccgccccgttcgccgccgcgcctctccccgcccggcaggctccgccgccctccacggccgacctggcgcaagggcctgtgcagccacaacctccggagcgctccggacgggaccggaaaagcagaagctccagcgcaaccgacggcgggttccgcggcgcagtgcgccgccgtccccctcccgctcccaccgcccaccacccaccaacaccgccccgcgctcccgcagcgcccgccgccccggcccagcctggcccgcaccggcgtgccccgaggcgagtcgcggcagcccgacccgagcaggggaggccaatgataaggcgagcacctcctgcggaaagaccgacccccggcaactcctcacctgcgtccatcttcccagtccggccgccgactgacccgagcggcgtcgctccgacgggccagcaacgcgacgcggcgacgggacgccgcgggggccaataggtgtgccggcgcaggcggcgaagacgatacggcgcgcgagcggaaatacgcgggagccgccattttggcgtacggccgggccgacgcgagccccggggcgccctgcgggcggcatggggtcgtgtcgtgggacgacggctggttctgctgtccgacgggacactgtgtgccatgggtggcgcttcctcctcttagaggacccaggagcagttgtcgaggcggcagaggcgagctctgtccccgtccgagcagccatcttgcggtacggacgtgctcggcgcgcccatgtcgcggtacggacttgccccgccggggcgactcccccgcccgtctgcccgcctgccgacggacgctgcgaggggcctgcggcgccccgctggtccgaagacgcccgaacccgcggctggcgaggacgcgggcgggggatggggcgggggcgggcccgctgcgggcgcctgcgcctccatcttgccgtacggcgcggacgccgcgggccggcccacgtcccgagccgtgtcgccgccgcgctccctccctcggggcggtccgcgggcgggcgggcggctagggccggggcctggctgcgcggctgggccaaggcccgcgatggtgatctgctgtgcggtcgtgaactgctccaaccggcagggaaagggcgagaagcgcgccgtctccttccacaggtacgcgggccccgggnnnnnnnnnnnnnnnnnnnnnnnnnnnnnnnnnnnnnnnnnnnnnnnnnnnnnnnnnnnnnnnnnnnnnnnnnnnnnnnnnnnnnnnnnnnnnnnnnnnnnnnnnnnnnnnnnnnnnnnnnnnnnnnnnnnnnnnnnnnnnnnnnnnnnnnnnnnnnnnnnnnnnnnnnnnnnnnnnnnnnnnnnnnnnnnnnnnnnnnnnnnnnnnnnnnnnnnnnnnnnnnnnnnnnnnnnnnnnnnnnnnnnnnnnnnnnnnnnnnnnnnnnnnnnnnnnnnnnnnnnnnnnnnnnnnnnnnnnnnnnnnnnnnnnnnnnnnnnnnnnnnnnnnnnnnnnnnnnnnnnnnnnnnnnnnnnnnnnnnnnnnnnnnnnnnnnnnnnnnnngccggcgcctagcttcagaaagccgcacgctctggtaacgcaggtcctgggccgattgtcctgctcggccgcgactgctgactctccggaccgcgcgggccgtcggcctggatgtctgcgagcaggagcgaccgggcagacgcgacctgcgcctccgtagctgacagcccccgagagggctttccgggactgggcccccgagcccaggacgcgggtacgcgcggagagtctacgggacggccggctggggacggcatcctcctgcgctcccttagagcctggcccggggctctcggccgcttcccacgtgggcccccgcggcagggcccaaacccctctaaggccttgtgagttcagcctatttcagtgagatttctgcggattacacgcgggaggcaccagaaccgcgaacagactttaaaaaccactttggagatgtttctgttttatgttgcatggtgttatttaagttttaaagacgggaatggcacgtgttatttatagggttattgaaagttcacagtagtttgctgtaagtcttaaatcattacaatgtattataagaattagtaacattagattatttcacaagtcagccagcgcactttcttgacaatttccttcagagcttgtgtcctagaagttttgttattgttttttgaaaacgaggcaacgtgttgcaacggtctaacatggtatgggaggaaaggacatcggaattgggggtgggggggtacctttgcagttggcctcacagtgttcagaaaggaggttagaaggtcctgttgcttagaacggcccagtccatcctgttaggatttgtcctggtccacactggcctcaggtggagcaaatagcagttagaactgaccaccctgtcccttatgtgcacattagggcctggtttttttttctttttttctcttttttttgagaaggagtctccctctgtcgcccaggctggagtgcattggtgcgatctcggctcactgcaacccccgctcctgggttcaagctattctcctgcttcagcctcccaagtagctgggattacaggcaagcgccaccacgcctgtctaatttttttgtatttttagtagagacagggtttcaccatattggccaggctggtctcgaactctggcctcaaagtcctgacctcaagtgatccacccgcctcggcctcccaaagtgctgggattacaggcataagccaccccgcccggcccaggcctatgttcttaaacacagagtttgccttaatgaagaaatggttatgaaggatctttattaggtaataaagaaatgactaaacatcctattcagtatcttcctgcgctggttgcttttttctcaccatttttaaattatggtataatacatgtaacatgaaatttaccatcctaactttttttggagacagagtcccactctgtcacccaggctggagtgcaatggtatgaccgtagctcactgcagcctcagcctcctggacccaagtggtcctcccatctcagcctccagagtagctgggatcacaggcatgagccacggctcccagcctttcctaccgctttttcagtgtacaattcatggcaacaaatacattcacgttgttgtgcagctgtcactaccatccacctccagaattatttttattttgtaaagcggaatctctggactcattaaacattaataccccagtcctcctctccctaggctctgggaacccgcattctcctgtctctatgaatttgattactctgagtacctcatgtgagtggtatcatgcagtgtttgttttttkgcacctgccctatttcattcagtataatgtcctcaaggatcatctgagttggttgattttttttgaggggagaagaccgggtttcactctgttccccaggatggggagcagtggtgcagtcttagctcactgtaacttcgaatttctgggctcaaagaaccctcaagcctcaggctcccaagtaactggaactgcaggtgagcaccattgtgccctgtccctgggctggttgacttttaaaaggagcatttttactcctggaggtgggcatgcaacaggaacacagaactgtagctctggagtcttctggaggtctccagattctcagctgcttgcgcacagccagggctgcctccatgcagtcctgacctctcacgccctagtgtctgtggatgctggccctggttttggtacccagagtcctaccttccaggcaagttgggagggttggttagcagtcagcttctaggagctatttcctgctgtcctgaggccatcctggcactgtctgtcagcatcctgtgtccccattgggcatttaccacagcctggggagcagttggttaccttctttcccatccgccctacagactataagctctgtatgggtagacaacgggtctttcagatttctactccagtaataactgcaggtagaagatgttctttaaatctttttgaagtatttttttaagtggatgaagtcaatacggcttagggtgcgtgcaaaaatacttgttttgcttttacagttgattattttaaggggagacatttaattatttctaattactttttgtcatttgtcctgtaggttcccccyaaaggactcamaacgtctaatccaatggttaaaagctgttcagagggataactggactcccactaagtattcatttctctgtagtgagcatttcaccaaagacagcttctccaagaggctggaggaccagcatcgcctgctgaagccyacggccgtgccatccatcttccacctgaccgagaagaagaggggggctggaggccatggccgcacccggagaaaagatgccagcaaggccacagggggtgtgaggggacactcgagtgccgccaccrgcagaggagctgcaggttggtcaccgtcctcgagtggaaacccgatggccaagccrgagtcccgcaggttgaagcaagctgctctgcaaggtgaagccacacccagggcggcccaggaggccgccagccaggagcaggcccagcaagctctggaacggactccaggagatggactggccaccatggtggcaggcagtcagggaaaagcagaagcgtctgccacagatgctggcgatgagagcgccacttcctccatcgaagggggcgtgacagataagagtggcatttctatggatgactttacgcccccaggatctggggcgtgcaaatttatcggctcacttcattcgtacagtttctcctcyaagcacacccgagaaaggccatctgtcccccgagagcccattgaccgcaagaggctgaagaaagatgtggaaccaagctgcagtgggagcagcctgggacccgacaagggcctggcccagagccctcccagctcatcacttaccgcracaccgcagaagccttcccagagcccctctgcccctcctgccgacgtcaccccaaagccagccacggaagccgtgcagagcgagcacagcgacgccagccccatgtccatcaacgaggtcatcctgtcggcgtcaggggcctgcaagctcatcgactcactgcactcctactgcttctcctcccggcagaacaagagccaggtgtgctgcctgcgggagcaggtggagaagaagaacggcgagctgaagagcctgcggcagagggtcagccgctccgacagccaggtgcggaagctacaggagaagctggatgagctgaggagagtgagcgtcccctatccaagtagcctgctgtcgcccagccgcggtcagtaccggagcctcgcgtacccatgttcccttcccgttaggaggggtttctctgcaaggtggccagygtcccctgagcatttctgggaggtgtcacaagctccctgcgctctcaggaggaagctctggtcgtaaccataccttgtggatgagggaatccaggttagaaagcaggcctcactgcacctggtcccacaagaggcatctgtgtgtgtagggatgtaggccgtgaaggaggcaggcagcacgcgtcagccaggagtgcctgaacgcctccgtggagagtgcacagggaaagatagcttctgtttcataccttatgcaacagaaattccagatgagttaggaactagatggaaaataagagagtaaactctcagaaaaagcaaatatcagaaactgttaaaatcatgaggaggttctttctgttcacgttttaaggaatatccttgaagttaaatcatcatgaacaktaataattattttaacatcyattcaattaaaacatctgttgaggctggactcggtggctcacacctgtaatcccagtactttgggaggctaaggtgggcagatcacttgaggtcaggagttcgagaccaccctggccaatatggtgaaacatacaaaaacatactactaaaacatacaaaaactagctgcacatggtggtgcacgcttgtaatcccagttattggggaggctggggcaggtggattgcttgaacctgggaggcagaggttgctgtgagccaggattgcaccacttcactctggcctgggtgacagaataagactctgtctccaaaaaaaaaagacacacatctattgaaacacattctcagccgggcatggtggcacactcctgtaatgccagctactcaggaggctgaggcaggagaatagcttgaacctgggaggcggaggttgcagtgagctgagatggcatcactgcactactctttgtcagcctgcgtgacaaagagcacaactctgtctcaaaagagaaaaaaaaaaaaaaagaaatacaatacattctctgttgcaaaaattaaaactgcagaaatagactaagaagtggtaaaaaaattattgtttgtcatccacctcccaagttctattccttgttgttattaaaaatttggtgtgtaagccaggcacagtagctcttgcctgtaatctcagcacttcgggaggccraagagggaaggttacttgagtccagaagttcaaaccagcctgggcaacatagggagaccccatctctataaataatttaaaaattagccgagtaccatggtgcacgcctgtggtcccaactacttgggagactgaggcagaaggatagcttgagcctgggaggtcgaggctgtagtgagctgtgattgcaccactgtactccagcctaggtgacagtgagaccctgtctcaaaaaacaaaatttcctgtgtaatctttgtatgtatattagctctatttctgttttttcccrtattttactgttaagtatttcttaaaattggtttctagatgtttacatatggcggatggtttcctttgcctgtcgtgtacataggaaaaccatattcctaccacattgttgatttcatctggatcaatgcttgtcaataagtatatgatagtgggacaagattttcaggacctcctggatcctcagggtaacagctattagcacaaccgaaaacaaagcccatccgacatgttctccagatgtgtcctggggaggaacggtgccactgagtactgctgacctagattttcagatcaaatctagattttcggattcttgggttgaaattgtatactgtttttctcttggaattttattttattttttgagatggcatctcactctgttgccgaggttggagtgcagtggtgagatctcagctaactgcaacctctgcctcccgggttcaagcagttctccaacctctgcctcctgggttcaagcaattctcctacctcagcctcccaaggagctaggattacaggcccctatcaccacacctggctaattcttatatttttagtacagatgatgtttcaccatgttggctacagttgtgagccaccacaccaggccttctctcggaattttttttttttttttttgagacggagttttgctcttgttgcccaggctggagtgcaatggtgcaatcttggctcaccgcaacctccacctcccgggttcaagcaattctcttgcctcagcctcccgagtagctgggatcacaggcatgcgccaccacacccagctaattttgtatttttagtagagacagtggtttctccatgttggtcaggctggtctcgaactcccgacctcaggtgatccacccgcctcggcctcccagcttctcttggaattttaaagctgtttgtagttatcagagctaatgctgctttwgacagcttctctctgttcctcttggttaaacttcctgaagtttgtctccattacaggtttttgcaaacagccagcccttcgtgtctctgagttgttgtttatgctggttaatccttacatctttttgctttgttgggttttttcttgtagttctggttcctggcgtgttccttaaccctgcaatggaggctgtggctctgctgttccttgggctgcgtgccatggatctgcctctctctgcttttgttgctgttcatttctgagtcgtttgtaattccagcctcgatgccccctttaaccctgtggttatttaaaagggtgttgacagatttttcagtgcacacagattgggcgaggggagcaaatttttttgtagttactttaaaatttgattgcattaaggtctaatggtaaggactgaaggagttctgctttttggaatcctttgagacttcactgtggctaacacagtccctttttgtgactgttgcagtgtagtgctagaagaatgtatcctcaccactccttggttatattgttcccgcctgaagctgggcacttgcttacttgtgttagtcagcggaccagagcgttccctagcttcttgtcaggctctcggtctgctgatttccaggaaaggtgaggtagacctcccctgtggttctggaggtgcccgtttctgcttgtatgtccaagttttgctttctgcctcaagaccatgctgtttgatgcataagttttcctgttaccaacacaagaaactcctttttgtcccgtttaacgtcttatttcttcatttccttattttcaaccttttcatcttattttatagttatatttttaactcaatccaaaagtctttttgtagagtaatttagtcatttacaattgtgattactgataagtgggaattcgggcctacctttttaatttgttaggcttcctcaccgttttcttattattcttctagtggatatgtttcaattttttcttttctttttttttttttaagagacagggctttgctctgtcacccaggctggagtgtggtggtcctatcacagctcactgcagccttgacctcctgggctcaagcgatcctcccacctcagcctctcgagtagctgggactacaggcacataccaccacatccggctaatttttaaaattttttgtagcaatagggtcttactatgttgcctgggctggtcttgaacccttggcttcaagggatcttcccgtctcagcctcccaaagctctgggtttataattgtgagccactgtgcccagcccatctttcagttttaaaaacaaacacgtgagcccctctttgtgtaactgttgagagctgatcggtcctgtgtgccaccttccctaggtggaggctgtatgtcatcttagttccggtgcttcttattcccccatcaagcaaccatgattattagattgaagtatacattttactggttactttatttaccattgtttgctgtatccaagtttcccctcctttttggcagtatttaatgactttttttttttttttttttttttgagacaatctcagactggagtgcagtggcatgatctcgtcttactgcggccacgaccccctgggctccagcgatcctctcacctgagcctcctgagtagctgggactacaggcatgtgccatcatgcccggctaattttttgtgtgtttttttgtttttttgttttttttgttttttgtttttttttttgtagagatggggttttgccatgttggccaggtaagccaccgcacccagccatgactttaaaaaaaaaaaatcctattccagtacagttttgaggggggcgctggtgactgttgtggcagtcccagggtagatggcgatggctcagactttagggaggaagtggcggtggtagcaatgctggagtactggctgggttcagggggttgagaggcaaaagatcagcaggccagctacagggattaggcttgagcacctggaggatgctaagtgggagaggcttttggggaggagcaggagatgggggtgaggaacggagtttgagatgctcttgggtgctgaggccagagtttgaacaggcagtctgaggccagcagctggcctctgggatttgggcatgtgagtgtgggggtggagggcaaaggtgtttgaagccttggggggtcgagtgtggttctaggctgggcttcagtgcccggcccaggagcaggcctcgctgagagggggcagccgaggcgggtccaggggaaggctgaggggttgttcaggaaagaagggtgacttgctgtgctgggtgctactctgaccagaatggagagaagggggctggatgtgccccaggatagtggagagaagggggttggatgtgctcccagggtcgctggttactggaatctcactggagaggctggtggagctgggcggagagggggccagtgatgaggggtcagggccaggtttggccgtgaagtggagtgaggcaagtagacaggagccagagggagtgtggctccaaagagagtgtgtcagtggggagggctgtgaagggccaggctctggagagcaagggacaggtgcaggcaccaccctgcatgccttgtgcccctccaaaggtgaggccaggccacggctgggcatgcggtgtgggcacaggggtggcaggagcgagggtgtggtggggagaggacatcctctccctggggttgcagtctgtcacgccggcgtcgcaggccctggggtctgcactctgtggttcttgctgtccgtgtggatttgttcttcagtgacagactctttgggtcattctttagggatttatgtggaaagcgccgcacacttgtctattcagctcgctagccagtgtctgcttttgggcaggttccccaaactgaaggatgcgggccagtgggcttcagaggtgggttgaagccacgctccagaggcagtgcccggtggcgttctgtggacgtagtgttcttctccgccagcagcgattccttgagggtacattgttagcacgtctatgaaccacgtgttcgcggtcttgcttgcccactgagttataaacgttcttgatacagtarggataccaacgcctgttaaatattattcacctgtttcctaagttcagcaatttaacacttgcttcaaaatctgttttctttttrttcctttatggattcattatctacatataattcttgaaatctggattgtcaaaatccaagtacaaaacaagtgaaccttaatgtaaactatggaccctatttgtagcaatgaatcagtattggttcgtaacttgagacacacatacccacactaatgcaagatgttaatcataggggaacagggcagggggtgagagggtgaaggaattctctgtactacctgctggatttttctgtcctaaaaacaatctgttaataaataataaatggaagctgaagagtttggagaagtgcagacaaaacaggaatgtcagaagagtgataaatggtgaaactagggacatgtgtgtggatttattacactaatctgtttaatttgtaatgttcaagatttttcacaatataaagttgttcaaaaatccagattagctgggctcagtgactcatgcctgtaatcccaacactttgggaggccgaggcaggcagatcacttaaggtcaagagtttgagaccagcctggccaacagggtgaagccctgtctctactaaaaatacaaaaattagctgggcatggtgacacgtgcctgtaatcccagcttctcaggaggctgaggcaggaggatcacttgaacccgggaggtggaggttgcagtgagtcgagatcacgccactgcactccatcctgggtgacagagcgagactccgtctaaaaaaaaaaaacaaaaactgttaagaaatagcagaaataataacagtgttttttttcctccttatgatgtgagctgtagtactttgttgttgttttttggtttttgtttttttgttttgttttgtttttgtttttgttttgagacgtagtttcgctcttgttgcccaggctagagtgcaatggcgatatctaggctcactgcaacctccgactccctggttaaagcaattctcctgcctcagcctcccaagtagctgggattacaggcatgtgccaccatgtccagctaatttttgtatttttagtagagatgggatttcaccatgttggccaggctggtctcgatctcctgacctcatgatctgcccgcctcagcctcccaaagtgctgggattacaggcgtgagccaccaagctgtagtttttttatatgtcctttatcaagttgacagaattcccatttattcctgttgctgagagctgttatcatgaatgggatgttggaatgtgtcagatgatttttttgcacctattaatgtgatcctgtgatttacggtcagatgatttgcctgttgatgtgacgggttacgttaatcaattttagagcacagagccagccttgcatacctggaatagatctcactgggtcatggcaaataattctttttatacattttttttattcaatcgcaaatgttttcttagagatttttgcatctgtgttcatgagagatatttgtctgtagttttcttttttctttttttttttttttttttttttttttagagacggagtcttgctctgttgcccaggctggagtgcagtggcacgatctcagctcactgcaaaaaccacctcccgggttcaagcaattctcctgcctcagcctccctagtagctgggaccacaggcgcccgccatgacgcccggctaattttttgtattttttagtagagacgggatttcactgtgttagccatggatggtctcgatctcctgacctcgtgatctgcctgcctcaccctcccaaaatgctgggattacaggcgtgatccacacacctggactctttttcctttttcctttttttttttttttttgagacagtgtctcactctgtcacccaggctggagtgcatagtacagaggtgtgacctcggctcactgctgcctcaacctcctcggctcaggtgacccacctgccacagcctttcgagtagctgggactatggacacgtgccgtcacactggctagttttttaatatttttgtacagacagggtcccagcctgttgcccaggctggtctcgaactcctgggtccaagtgattctcccagcttggcctctgaaagtgttgggactacaggtgtgagccaccacacccggcctgtagttttcttgtagtgtgcgtgttttggtattagggccctgctggacacacagaatgagttaggaagcatttcctctgctactgttttctggtttcatttcttccttgaatgcttggtaaaatccaccaatgaagctagcagggcttggtgctttctgttttggaaagctattaattattccatttctttaatagatgctgtgacataataaaaaaatatatttagtctctgccccagaatatggcccagagctcctaaaacccttgtcgtctcctgagcaaaatggcgctccgaccaccttccgttctcatagtcggtctttgctctgttcgtcatacagagctcctaatcccttggaatgttctaataaagtgattcttggggggctcccagatgagggctgctcaccagaaagaccaagccataaacagaagctaggggctttgagccccaccccctccatcctgcaggaagaggaatggggtagagttaataattgatcatgcctatgtaattaagcctccatgaaaacttcagaactacagaatttggagagcttccaggttggtgaacacatctgtgtgctggatgaggtgatggtgcaccccaactccacagggacagacgccccttgcccgagacccttccagacctctccctgagctcttcctctgactgtttatttgtatcttttttttttttttgagaaagagtctcactgtgttgccaggctggagtacagtggcgcgatctcggctcattgcaacctctgccccctgggttcaagcgattctcctgcctcagcctcctgagtagctgggagtacaggcacgygccaccacacccagctaattttttgtatttttagtagagactgtgtttcaccttgttagccaggatggtctcgatctcctgacctcgtgatctgcccgcctcagcctcccacagtgctgggattataggcgtgagccaccacgcctggctatttgtgtcttttaaaatatcctttgtaataaattggtattagtaaataaactctttttctgggttctgagagcctcctagcagattatcaaacccagggaaagggctgtgggaagcctggatttgtagccaggtggggcagaggctgtgagtaacctgggacccactacttgccatcgtcctcagatgggggcagtcttgtgggactgagcccttaacctgtgggatgtgcacgaactccagttcgtgtcagaactgaattgacgtgcaggacacccaaatggtatcagagaattggtcagtgtgggaaaagacctgcatgtggccacagaagtgtcctgagtgtgcgtatagagaaagagattgtttttttccatatattcaatataggcctgttcagattatctatttcttcttgtgtgagttttggtggaggtatctttcagagaattggtccatctcatctatatgattaaatttgtgggcatggaagtgtttatgatactgctctattaagcttttaatggccatgggattaacagtgattgaccccctcccttcttttttttttaaatgatatcaataatttgtaccttctytctttttttttttccttttttctttcttgagacagggtcttgctctgacacccaggctgaagggcactggtatgattttggctcaccgcaacctccgcctcctgagctgaggtgatcctcccacttagcctcctaagtaggtgggactacagatgsgtgccaccatgccctgctaatttttgtatgttttgtagagacagggttttgccatgttgcccaagctggtctggaactcctgagctcaagctatctgcctggctcagcctcccaaagtgctgggattacagacgtgagccaccatgctggcctatccctttacttttaatctatgtttttatattcaaagtggggtttttttgttggtggtttatttttattattattattatttttgacagagtctcactgtgtcaccaggctggagtgctgtggtgcaacgttggctcactgcagcctccgactccctggttcaagtgattcaggaggccttagcctcctgagtagctgggattacaggcatgcactaccacacccagctaatttttgtatttttagtagagacggggtttcaccatgttggccagggtggtctcgatctcctgacattgtgatccgcccgcctcggcctcccaaagtgctgggattacagccgtgagccaccgtgcctggcctcaaagtgggtttcttatagtcaacatatattcagggccaggtgaggtggctcacacctgtaatctcagctttgagaggctgaggtgtgaggattgcttgagcccaggagtttgagaccagcctgggcaacatagtgagaccccatctctacaaaaaaaaataagaaaattagctaggcatggtgatgcacacctgtagtcccagcttcacaggaggctgaggtaggaggatcgcttgagccccggaggttgaagctgcagtgagccgtaattatgccactgcactccagcctgggaaacagaacaaaaccctatctcaaaaaaagaaaactttttttttktttgttttctgttaggtcaattaagaataagaaaagattttattttaccttcacttacttctctctgatgctctccctttttttacatacattttagtttctgacgtatatcatattccttctccctgaagaacttttaatatttctcaaagggaagaggtactgccagtgaattctctgtttttatttaaagaaatttttttgtttgttttttgttttgttttgtttgagacagagccttgctctgtcgccaggctggggtgcagtggcgtgatcatctcagctcattgcaacctccacctcccakgctcaagcaattctcctgcctcagccttctaagtagctgggatcacaggcgcccgccaccagccccagtgtcgtatttttagtagagacagggattcaccacgttggccagactggtctcgaactcctgacctcaggcgatccacccgccttggcctcccaaagtgttgggattacaggcgtgagccaccgygcccgcgtaaataagtctttatattgagtttctttttcagagatttagaaaaaaatgggaaaaaagtaagttctttacttctcctttgcacccgaagaatagtttcactggatgtagagttgcacgtttttggtttggtttggtttttttttttgcttgcgtggtttctgacaagtctgctgtaattcttattctttctgctctacatgtaaggattttttttccttttgattctcttagtctttggttttctgcagtttgagtatgacatgcctatgtgtagattctttggtatttatcttgcttgatgttttccgagcttcctggatctgtggtttggtgtcatcgataattttggaaaactctgaactatggttaattcaaatacttctgctcctttyatctctttctggcattcccattatgctcatgtaacacttttgccccacaattctccaatattctgattttttttttccgtttttttctctttgcatttcagtttgggaagtttctattgacatatcttcaactcagtgattctttcttcagccatatccatcctattgatgagcccttagagattcttcatttcagttagcatttttggtttgcagcaatttcctttttgttcttttgtccatcactcctcttacattgcccatgttttcttgcctatcacccactttttccrttagagcccttagcatattaattgtactgattttattattattactattattttgagatggagtcttgctctgttgcccaggctggagtgcagtggcacagtctcggctcactgcaacctctgcttcctgggctcaagcaattctcctacctcagcctcccgagtagatgggattacaggcacccgccaccacgcccagctaatttttgtatttttagtagagatggggtttcaccatgttggccaggctggtctcgaactcctgacctcaagtgatccacccaccttggcctcccaaagtgctgggattacagaggtgagccactgtccccaaactaaccagtaattttaatttctccgtgtggtaattctaaaatctctgccgtacctgagtctggttctgatgctcactctctctcttcagatttttttttttgccttttagcatgtctcgttatttttggttgcaaagtagacatgaaatatcagatccagccgtgtgctacatgatgatgttttggtcaatgacagaccacatacaccatggtagtcccgtaagaattataatggagctgaaagagtcctgtcacctagtgacattgtagccattgtaacatcgtagtacaattttttttaatcgatttagtgtagcctctgtgcagtattgagaaagtctaccatagtgtacagtcatggtcccaggcctttgcattcactcaccgccggagtcactgcctcagtcaccgactcactcacccctcactcactgannnnnnnnnnnnnnnnnnnnnnnnnnnnnnnnnnnnnnnnnnnnnnnnnnnnnnnnnnnnnnnnnnnnnnnnnnnnnnnnnnnnnnnnnnnnnnnnnnnnnnnnnnnnnnnnnnnnnnnnnnnnnnnnnnnnnnnnnnnnnnnnnnnnnnnnnnnnnnnnnnnnnnnnnnnnnnnnnnnnnnnnnnnnnnnnnnnnnnnnnnnnnnnnnnnnnnnnnnnnnnnnnnnnnnnnnnnnnnnnnnnnnnnnnnnnnnnnnnnnnnnnnnnnnnnnnnnnnnnnnnnnnnnnnnnnnnnnnnnnnnnnnnnnnnnnnnnnnnnnnnnnnnnnnnnnnnnnnnnnnnnnnnnnnnnnnnnnnnnnnnnnnnnnnnnnnnnnnnnnnnnnnnnnnnnnnnnnnnnnnnnnnnnnnnnnnnnnnnnnnnnnnnnnnnnnnnnnnnnnnnnnnnnnnnnnnnnnnnnnnnnnnnnnnnnnnnnnnnncacgactcacaactcactcacccctcactcacgactcacgcacccctcactcaccgactcactcacccctcactcaccgactcactcacccctcactcacccctcaccgactcactcacccttcactcaccgactcactcacccctcacccctcacttaccaacttactcaccaactcacccagagcaactgcccatgctgcacactccagtgctggtaagtgccttatgcaggtgaaccattttttgtctcttatgccatatttttactgtaggttttctatgtttagatgtgttttaggtacacacacccttggcactgtgttacaactgcctacagtattcagtaacacactggggtgtgtagcctgggagcacaggctgtgccatacagcctaggtgcgtggtacgcggtaagtgcactctgtgacgtttgtacaatgatgaacttgcctcatgacgtgtttgtcaacrcatcccccatcagtaagtgctgcttgactgaaaggtgaagtaagtgtgccttgtttggagggcatccatccccttaacctggctggcactcgggctgtgtttaatcctgcagtggctgtaaaattcctcgagtgtccttgttttgtctccctgttgtcgtggagtttctccgagcatgccttccacagcctgcgcctgggccctttccactcccacccaggatgttatgctggagcctgcagggctgggaggggaagcaggctccagcctgtgactcgatttaagcccttcagtggcccgtgtccctgagccgtgaccttcacacgtgtctttccctttctcctccccgcttgggtgagacggaagactggtggggctggagcagtgaaatgcccttcccagctgagatgaggtcctggtgaagtcagcttcgctacagagcaggcctggcctttgcctggagaacgctctgggctcatttcaaggtggtcacctccccctcctcatcccagagacatgaggtgtttttttttttcttggcttttcgtggggagaacctgatggggttcctggaggtgaaacctatgaaaatgtaggaccccaggagattctcacacctgccatgttcagcctccagcattttgtccaaatcaagttcccaccagttccttcccctgtagactgtagattctgctccacgtgagctgatctcactgctattctctgtggcaggagagacatctgtgacctcacttccttatggatccaagaaaagttgttgatttttcactnnnnnnnnnnnnnnnnnnnnnnnnnnnnnnnnnnnnnnnnnnnnnnnnnnnnnnnnnnnnnnnnnnnnnnnnnnnnnnnnnnnnnnnnnnnnnnnnnnnnnnnnnnnnnnnnnnnnnnnnnnnnnnnnnnnnnnnngccgattctaatagttcttcaattgatactcagattaacgagggaaatcaaacataacatttgcaaattatttgtatccactttatggcctttttatattttatagaaatacttgctgtattttctctccatcatgatttctgtttttcccctgggcatgcaactccttccgtttcatggttgataagttgagggccttgatgtcactttaaaacaacagttccctgctggtatgccttgtcagtggacccaaacatatcacggtgttcctggacagctcctccccaccttgggacagctggtgcgggccgcgcaccctcagcttccatgcaccctgttgtactaagcagtaagtgtccctttctgtgtgtgccttggcaggaaacaccgtgtcactaacacaaagagatgtgagggtgggagctccaggaaggagccgtccccaggtcccagtgggtgcatttgctcacttcctgtcctgggttcccgggccgcttgccaggagacaggacagtctctggagcctccatgtccaggtgaagatgagtctccagccaccctctaggagacagaaaaggacatgccaggggtggccagagggactgctctggagagagaaagcatttaggatgtgcctgkytctgtggtgttgccttcctctgctgtagctggtggaggaggctgagggtagaagccgcactcgtcactccgcccagacctctggccagtccctctttcataaaattcacctaacctccaaagctccttccagctctgaaattctgtgatstgggctgtyattgtcttttactttcttctgagacgtgatctttcatagtggaactacaattcccagaatgcaccatttaaagttagcattcacttcctgcagagccattaagagccaggtgcaaacatttcccgtcaattggcagaaaacaaccttgaggaaccttgacgagtgtccggagtttagaaaacttagggatgggtaagcctgctttcagtgtcttgggccaaaacatgaaaatttaaatttcttgcaggaaatttaaatttttgtttttgtgttttggttgagatttyaataaaagaaaaatgaaatcagaaaagaaatgcctasaaaagcctgtctggtttatttaaagaggtggaaagtgacaaatagactaggtcctttatagtattttttgtttcatgtttaaatttatttttttctaatgaagtataatttacagagagtaaaatacacagatattgaggtcacagtttgatggatcttaacatatatctaggctcaagtaacctgatgtttggattctaaaattctcttactggtcgtcctcacccccacccatgcttcagtgacaacaaggagggacagtggctaggctgctgccacgttccacgcggcccgaagtggtggagggtgcagggggagcggccccaggagcaggttaacctggtgaggtgcagygtagacagaaggaggcgccgccgctgcttgtttactgcctgacctgttgtccctgtccaaattaaactccattaagattcagagcaaataacagcaagccaggagggcgacaggaagggaagtatttctcacagccattagttgctcacagccgtaagcctccatctagttgcttagccgcgtgctccttcctttccagtctgatgttattttttctgctcaaaagcgtttcttctgaatttcagagctatcttagaattctctagttttttaaaaagaaattgccacataagtgctgcgtcctgtcctgtccccaagtgtggtgtgggccctgtgcccctgaagcagcagccgcctgcagggtagcttctctccagggcccgcgggacttgcttccctgacctggcatgcacatagcaaagtccactcaaaagctcacttttagccagaatttttgaggcagcctctccctacctgttcttaccaggacaccatccccctgctcaggtgccactgcttacccgctctgtggtgggcctctctggtcctgatgccagggctcgccctcagctctcgtgcgcctgcacccgcccttctcactgatgtcacgggtcgccttccaagctgccagcaatgccagctgctggccatctccagcccacccatccctcttatctcactctcatttccatctcccttgggctagtcgtcgaggcagaaagcccgggccacgtccctcctacgtaaaaggttctggcccatccaggcccacttgggggaatagatggtccagttcaacttgaccagacttcagataagcccagttcttctgaggagccagctgtgctcacctgtccttgccagccccctgactgagttctcccaggcgtcttgtggcaggggctctgggctgctccagctgcaggactggggcagagtgtgtccccatgggcgccctccttgcttccaggccagccgggctgggcctgtgtctagaaccagctccccagcatcctgaggaacgcgaaacctactcagaaacacggctgagggcggcgaagagctctcctgatgtgtcgggaaccgtgggcttggggcacggggatgtgctgggtggctgccagtggcgtcctcactcccacctgggagaagagaggagtgaagaggagaggtgggaggtgagaggcaccgggcagggcgctgtgtgtggctccagccctctctggccctctgcacctgccccaaggtatgcgactcacamcacagtggtgtcatttgttttaatttgaacagatgtttagaaattgggatattttagcctaaaatcagcttctggcttttctcgaaatattagatctgcagtaggtgctgcagcttggatggcagcagaccctggggccaggagccaaggccctgagctgtgaggccracctcactccccaccacatcccctgctctgaggccacccagaaccctgtgctgcagtaacatagtaaacactcttgggataaaatkcttttagtttttttaagttttctgctttttgaaatattaatttgtttggggaggtttttctttataacatttttattgaggtgtaattcgcataagtgaaacacaagctcctaggtgttcccgtggtgagttttggcaggtgcaggcgcttgtgcagccacacccacgtccagcggtccaggttctcctttgcactcccctccaagcccctccccgtcaccgttcagattccccaccctccatcctttctgcctggtctcgaatttcatctaattggaatcatagaatatatacgtttttgtctggcttctttcttttcgcgcagtgttttcaagggacacctgattgattttcatttctagtctcactgcattgtgatcagacagtagacttctttctgctttctggaacttacaggctttctttgaccatttagaaggccagtttgcatgactgttccagaggaacttgaagaaggcattccttagttttgtttttgtttttgtttttgtttttgttttgagatggagtttcgctcttgtcacccaggctggagtgcaatggtgcaatctcggctcaccgcaacctctgcctcccagtttcaagcgattctcctgcctcagcctcccgagtagctgagattacaggcatgcaccaccacacccggctaattttttgtgtgtttttagtagagacggggtttcatcatgttggtcaggctggtctcgaactcctgacctcaggtgatccacccacttcagcctcccaaagtgctgggattacagtcgtgagccactgcgcccggcggtattccctagttttaagctacagagttcaatatgtatcagtcagaactaccttattaattatattatttgggaattttgttttatttgtattcattcagacttagaggtgaattgcaatttcatttagtttctttctctcgacatcttcgtgtgtcatcagtaatttctgctttatagatgttgctgtgcttggtgcatgagtatccctcacggttacgtcttcattgtgcattctgcccttcattcgggagagccattctttgtctagttccatgcattttacgtgatgctaagattgggaagcctgcttccttattgcttattgcccagctttctggactctctctctgaattgctttattttaggtgcatctctcatttacagcaaaagaggtgagggtcttgctttgtggtccaatctgaaaagcctttttttttttttttctcaaggcagggtgtctctccagttgcccagactggagtgcagtggcgcgatcttggctcactgcagcctcaacctcctgggcgcaagtgattctccccacctaccctcccaagtagcgggggctacagacacgcaccaccatgcctggctaatttttttgtatttctggtagagatggggtttcactatgttgcccaggctggtctcgaatttctggactcaagcaatccacccacctcggtctctcaaagttatgggattataggtatgagccatcatgcccggccttgaaaagctttttcatatgtaagttcaagcatttttagtcttggttctgtcatcttattttatattatgcttgttgtgttttacttttttttgttttgtttttgttttgtttctgagacagggtctcgctctgtcacccaggttggagtgtagtgatgtgctctcggctcattgcgatctctgcctcccaggcccaagcgatcctcccasctcagcctcctgagtagctgggacgacaggcacgtgccaccacgcccagccaattttttgtagttctggtagagacagtgttttgctatgttgcctgggctggtctcaaactcctgagctcaggcaatccaccctcctcggcctcccaaagggctgggattacagatatgagccactgcaaccggcccagtttttaaaatgaaatcttccactgctacttcatttgtaagcctctgtggtgtcagctctcagggacaagaccagtggggagttctgccccttcaagggtcctatgagttgagtgtcatgcctgtacgaccaggcatctaccacctataaccagtttttttttgttgtttctataaccgctttttttttttttttggcttagtacattcagtgtttacggaggtttctttccgcatcatttccctattgtctcctgatgacatccagctgctggtaatgtcctcagggagaagacatagaaacaaagctccttgggtgccaagggttgaaaactccattcctgcactgtcgaaaaggtctagagagtgagtctcttatgtagtttaatattttctaatagctacattaaaaaggtaaaaagaaacaagtgaaatcgattttaataatatattttatttaacccgatattatctaaaaattatttcaacaggcaaccacccatactataagattattgaattatttgaagactttttggactgagttttcggaatctagtttgtagctcgcactcactgcacgtgtcagtgagccagctcacgcgcctgcaatctggaaggatcgctgtggccagccgtagcatccttgccactcaccttccctcctcatgcgccttctacgtgtgactctagcgtcttctgccacagaacgcagctgtggagaaacactgacccacgttctgtctctgtagatgtgtgtgttctgcacctttcacagaaatggaattgcagaatatgtgctcttttgagcctgattgctttcatatggtgtgttgtcaagggccatttgaattgcagcttatattagtgcttcatttttatggccaaataacattccattgtctggatatactgcagtttgtttactcattggttgacggacatctgtgttgtttccactttggggctgttgggaatggtgctgctgtaaacattcatgggcagcgtcctgtggggacaggtgtgtcatttctgctgggwrtgcatgtctccaggagtggcagtcctgggccactgctccacacttaacctctcaggcacatgccagatggtcttcactaggctgtgccagttcacgtccccatcagcagtgtgccaggcgttcccgtccttctaactttgtttccatttctctatcttttgtctttttttttaactcatttctgtcctctgtgttccgctgtgtttcccggtgtttgtttctccctgtgctgcttccaatctccacttcatttgggtggtggcttgattttttttcttttactttctcgacttctgccaggtcatgtttcaccttctcctctttccttgccgtttctctcctgagttcttacatgtttagttagtggtctttcttcatggagcagcttcattcaactactcgggaggctgaggcgggagaatcacttgagccccagtggtctaggccgcagtgaaccgtattcatgccactgcactccagcctgggtgactgagcaagaccctttctcttagtttcacctttgccccatcaacattttgcagtttgtnnnnnnnnnnnnnnnnnnnnnnnnnnnnnnnnnnnnnnnnnnnnnnnnnnnnnnnnnnnnnnnnnnnnnnnnnnnnnnnnnnnnnnnnnnnnnnnnnnnnnnnnnnnnnnnnnnnnnnnnnnnnnnnnnnnnnnnnnnnnnnnnnnnnnnnnnnnnnnnnnnnnnnnnnnnnnnnnnnnnnnnnnnnnnnnnnnnnnnnnnnnnnnnnnnnnnnnnnnnnnnnnnnnnnnnnnnncggctcactgcaacctgtgcctccggggttcatgccattctcctgcctcagcctccctagtagctggtactacaggcacccgccaccacgcccggctagttttttatatttttagtagagatgggatttcaccatgttggccaggctggtctcgaactcctgacctcagatgatccacccgccttggcctcccaaagtgctgggattataggcgtgagccactgcgtccagccggcagcacccctttctttcggagtggcgcattacttctctatggcgggtggtgggtaaccctgcatggaggccagcctgggccttcagcacctgggcgaacacctggggtgtcctgggcagacgcgtggggtgccctgggcctgctgtttgcaggagctccctgtggcagagcgggggccagaagagcctccaggcttcccaagtccagggctccccactccgccccaggcctctgagccaggccagaccctgaggcttctcaggggccacccccccagctcccagaggcccctcctgtcctccagcgaggcactgacccmccacttctcacagcatccgtatgtgtgttttggtggctgtgggttgtatctgtgacctattttccctcaaaatcaagttcagggaaaaggttttttcgttatttttgttttttttaattcttgggagggaaggtgataatattgttacttacctgagagtccccctcggagacccccagaagctggttttaagggaagaaagagtaagatccctttctgtgtctctgtctctggccccgtctctggccccatccccgtgtctctctggccctgtctctctgtctctgtgtctctgtccccgtcccgtctctcgctgtccctggctctgtccgtctttcttccccatttaaggagcgcctcctctccggtcccctctgaggagcgctggatggaggacagggcctcccggagaggactccacggtgggtggtgggagggaaagaccagggggaggcagaggctgccggtgagaggcgtctgccaagtagatgaggggccgggagaagaccccgtggctggggaagcaggagtggggagggcggggcctccgggccgaggggcgcggtcgctgtggtctgtggaggggcyggcgaggctcccgcctctgctcttgctggagctcttgagtgagccctgtgacgcctgctaggtgaggtggcagccagtgagcgcgccccaccgcccagcgccgcccagcctccgccctgactcctctgccgctccccaaacagggcgcggtggcgtgaccctggcgctggggggcgagcgcggccctcccggtcccgcaggcgcaagagagggcggagatgcggcgcctgaggcggggctgcgcwtccggggcggggccggcggaggctggagggggccgcccgggagcagaggcaggacttgcggcgcgtgcccctcacccyagcccggggctgtcctgcctcgtggggagtgtgaaggccatgcccggcgccgcggccctggtgcccctgttccactgggaccctggggggcgccgccaggccccttggcctcttcctcggggccctcgggacccaggggccggtggtggccgtgccggggactcgggcgtgaggggtggagatcgcggccccggtgcagcagctcagaacctggactctggatcgctgctccccagcgcccggggtgccgcttcccacagggttcagctcccatgcaggctgcgctcaccagtggaagtgggtccacccggtcccaggagagccagagccccgtggcagtcgctgtggggtgtgctccgcacaggccagagagccggcccaaaaacctgaggtttgcaaagcctctttctttctttttttttttttgagaaaacgtctctgtcgcccaggctggagagcagtgacacgacctcggctcactgcaacctccgcctcccgggttcaagcaattcttgtacctcagcctcccgagtaactgggattacaggcgtgtgccaccacgcccggctaatttttgtatttttaatagagacagcgtttcaccacgttggccacgctggtctcaaactcctgacctgaggtgatctgcccgtctcggcatcccaaagtgctgggattacaggttcagtgagccattgcgcccggcccaaagcctctttcttttcrgtgctgagctggataaagtctaccaaactgaaaggtctccaaggctatagctggctgtctgagaaattatggtgtttgtttagcccatcttaggacttgggctatcccaggtgactgagttttgctgtttcacacctcccaaggttcttctcattcttccttttctccattaatggtaacttgtcttctcaattgctcaggccagaaacctccgttaccatcttttcttacgtgtttcacatccaaaccatcagcacatccgggtggctctgccttcaagatagatccagaagctaggtcctttccactgcctccaccacggccacctggcccaggccaccctcctctgccacaagggtttttgccattgccctccctggcttcctgtggttgcagtcagagacctcgtccctcccactcagccttctcgagggcttctgtctgctcagagtcaaggtcacggcccttccgaggggtgaggatctccttcccctggccacactggcctcctgttcctctccagcaagaccaggcctacgtacccaggacctccgtctctggcacttccacctggtctgctcttctccagggtagctgcagggaccctgatcccctgcctggtctgtgcacacttctcagggagggtgtccttgtcccttttgggtaggttttcacagtgccccaacagccctgtctccctttctgcctcatctcctaatgtacattcagttctgcatcattcactcatttcttgtgtattgtctgccctcgctaggatgtatgctccgtagggatgtatgactgttccgtcagcttctccctggaagagtgtccagcacgttgaatgatgaaagaattgatcagctatgatagatcacaagcctcgttccagaggccacacattggattcagaagcttctattccttatctccgtgaaagattgcaacgaaaatcttgatttaaaaattctcttattgtctaattaggaaagttttattgaagtccaaatattcccatcctcaccttcccacttttcaccgggagtctgaggaggaaatactgatataaaaaatttttaaatcatcatttaagaaaaacaaaaaaggaaatactgaaagaccacaggccagtctggaaaaggagcggactctcccactctcctgcttcaggtcacctatgtttgccctgtgcagccagcaggcagagtgctcattacctgctctccaccctcggttctcactctgggccccagggctcggccactgggccaggccacatgtgcggccctccttggttccaagctgttcttggacgtggtctcctccacccccagagcctttgctttcctttccccmgatcttcttttcccagacttcctggaatttataatccaaaggttgtgtaatttcagaagctgcgatggttccaagaactcctgtccccgtcagtccgtcttctgcttgcgcgggcctggaggagacactgggggtcagtcctgatcccgtccccatcagtctgtctkctgcttttgcgggcctggaggagacgccgggggtcagtcctgatcctgtccccgtcagcygtcttctgcttgygcgggcctggaggagacactgggggtcagtccaatcctgtccccatcagtccgtcttctgcttgcgcgggcctggaggagacactgggcatcagtccgatcctgtccccgtcagtccgtcttctgcttgcgcgggcctggaggagacactgggggtcagtcctgatcccgtccccgtcagtccgtcttctgcttgcgtgggcctggaggagacgccgggggtcagtcctgatgtgcaggccggtctctgtgcttgggcatctttgggctccgtagatgaggcttgtgcggccacagagctgcttctgtccctgctgctgctcctgggtgtcagtgtccgttctgtcaattgaagcactgagacttgagggttaagcaggcctgggaagcaggtctttgggattgcctctggggatcagtccttctcttccagcgcccctgatgggtagcatgcagtggggctttcctgtggtccccgcacaggtctcccttagaaaatgagtaagagcagggcccgtgcatccagccagggtgagggtcatgtgagtgaatcctgaaaagccgctcgggagcacccagtccttgctgagcgaggcaggaagcaggggtccctttgagttcgcccagcagaacagccaacccagcggcccctccctgctgtcctgtcactgcacccccacctctgagttccaggcctgtggtgtcatccttcacacttagtgggatgagagactgaaccccacaggagaccttctaaaggggtctcctggccactacacaggctgctgtgaagccccagcccctcctcagggaagcggggtcttacttcccttttaaaccccgcctgcccctgggccctcacactctggctgctccgagaccctgcatcccctttcattttctccctgatgctctttgtctccttcacacactcttcacrccagggcaccgtgcctcccgtgtgagctgctttcagccttgctgtaggacatgkaggacccctgagctatttggggtcacaaggaagctgttagtatgtggttctcatattcttaactgtacaagaaagcaaaagccccttgaggtccctcagtatcccttcccaccacctgcaccccacaggtggagaaattgcctgcttttagggagatagcagtgtaggcctctttgcttgcgccctgcctggcccctgttggatctcttttctctgcaggaactgcagaggcttctgaagctggatctttcactatgacatttacagttgcttgaccattttctcccgctcttgacaggtcccccaggattagctgtggccaccagaagcaagcgtcgatatggaacgtgcattctgcttaaagctcagcaaggcatggttggagggaggccactgatagtctcattcttttgtcctcagagccccccaagatgaacccagtggtggagccactgtcctggatgctgggcacctggctgtcggacccacctggagccgggacctaccccacactgcagcccttccagwacctggaggaggttcacatctcccacgtgggccagcccatgctgaacttctcgtaagttgtctccctccaccccaccctgcttgactcatgggccgcctaggtctctgaaaataattccagactgatcaaagacaaaggccaagcaggaaggtgtaaaaggaacttgtccatctatttcagaaaggtgtcctcttgcctgaatgtgcaactgagacacagagtggtaaaaatgatactttctggttctgttatatttttggagatattaagctgaccaccaaattacaggcttgttaatccaaacataaaaacaaatgcatgtacttaatttatgtatcaaaattaatcaccctggccagtgcggtagctcatacctgtaatcccagcactttagaggctgagtcaggaggattgcttgagcttaggaattgaagaccagcctgggcaacatagtgagaccttgtctctactgaaaagtatttagccaggtgtggtgacacatgcctgtagtcccagctactcgagaaactgaggtgggaggattgcttgaacccagggagggccaaggctacagtgagctgtgatcataacactgtactccagcctgggtgacagagtgagaacctgtctcaaaaaaaaaaagaaaaaaattagtcacccaatattactgaaaataatagtgcatgtttgtattttacacgtacccctgagctatttggggtcacaaggaagctgttagtatgtggttctcatattcttaccgtacaagaaagcaaaagccccttgaggtccctcagtatcccttcccaccacctgcwccccacaggtggagaaattgcctgcttttagggagayagcagtgtaggcctctgaagtagaggagagccaccagggatggggagtggttgaagtatctttattttttaattatagaagtaatacacagtttttttaaagtttaaacaaaatataaaaagcaaaccctcccttagtctccattacacaactatatgttaagaatcttattaaaccaacttggtactatttgtataatgcctagcagtttcagaacggggctgggcacctggctctcagacccccagctctgagaccctccatccccttttagaagatctcattgtttttaaaaatatctcctacctttttatattattattgattgaatgcatgaggtcaaagtaatacatctgcacataaaccaaaaggtgagaattctgggtaatacaaaataacccagaacccaagcagtcttttttaaactatagattataacccacgaaaaggtcagaaagtcaattttgtgactagcattcgaagaaaaatgaaccagagtggaaaatatatttcagtaaatgtgatggtatgtgtgtttgtgtgtgtgtcctagaatatggtataaatgtatttctttgtcggggttatgttagtgagcatgtaccattctagaaggtgtagcaccatcactagcccaacagaaatttatcttggcccagcgcggtggctcgtgcctgtaatcccagcactttgggaggccaaggcgggtggatcacttgagtccaggagtccaagaccagcctgggcaacacagtgagaccctaaaaaaatttgttttaataaataaataagtttatcttggccaggtgcggtggctgacgcctgtaatcccagcactttgggaggtcaaggcaggtggatcactagaagtcaagagttcgagaccagcctggccaatgtggtgaaattgtgtctctactaaaaaaaaatacaaaaatacaaaaattagccgggtgtgtggctgggcacagtggctcacacctgtaatcccagcactttgagaggctgaggtgggcagatcacctgaggttgggagttcaagatcagcctgaccaacatggagaaacctggtctctactaaaattacaaaattagccgggcatggtggcgcatgcctgtaatcccagctactcggtaaggctgaggcaggagaatcgcttgaactcaggaggcggaggttgcagtgagccaagatagcgccattgcactccagcctgggcaacaagagagaaactctgtctcaaaaaataaataaataaataaataaataaattagccgggtgtggtgggcgcctgtaatcccagctactcaggaggctgagacaggagaatcatttcaacccaggaagcggaggtttcactgagctgagaccgcgacgagcctgggtgacagagcaaaaaaataaataaataaagtttatctctaagaatcatagagatggattccctatagaaactcataaggttggtgaaatgataaatgaggcttttttttttttggtttggtttttttgtttttatttttgtagaaacagggtctgtgttgcccagccctgtctcaaattcctaggctcaagagatctacccgactgggcccctgaagtgctgggattacggccttgagtcaccatgccagcgagttagtttttaagccgtggttttgtgccctcagttcaagatgcaggtgcctgtcttttactgttgagaatttgcactaatgatgaagggtgataagaaaccataccataactcagcacctgttctgttttttaccgtaggaattgattagattcttacacaagagcatagctcaaaagagaaagattgtgttagggtgaggtttactgcaagggagtgctgagggctgacactgtgtgaggcctgggctaacgggcccagggcaaggatatgccctgaggtgattaagaacagtgctgtcttcaggagctgagggtcagcaggcaagacagacacagccaaaatgagcaaggtggtggagggggcgggcaggtgtgtgggcgtggctggaacagcccgtcttcaggagtggagggtcagcaggtaagacagacacagccaaaatgagcaaggtggtggtaggggcagacaggtgtgcgggtgtggctggagcagccacctggagggcaccctggacagttctggcatccacgcagcccacgccatcttggaggccagtgcctgggcttctcaactccaacttcccgtccaggttcaactccttccacccggacacgcgcaagccgatgcacagagagtgtggcttcattcgcctcaagcccgacaccaacaaggtggcctttgtcagcgcccagaacacaggtgaggcccagcttgcggggcgggagggctggccatgggaggctgctgcctgcattcgaagcaggggtgcagggatgcccatgtgcraccctgctgaggcatgtgctggtggggaccgtggggatggccctgagtgttgagagtggtcctgggagcctgcggggccgactgtgtagctgtaggggcctccggcacacaggttgtgtgcgtgcagccccctgaccatgagggcccgtttacccagtgccacgtctgcagaaatggccatcagctgtgtgcattcattaggaattgctggaaaacaggttgggcacagtggctcacgcctgtaatcccagcactttgggaggcctaggtgggcagatcacttgaggtcaggagttcaagaccagcctggccaacatactgaaatcccgtctctactaaaaatacaaaaattagctgggtgtggtggtgcatgcctgtaatcccaagccacttgggaggctgaggcaggagaatcacttgaacctgggaggcagaggttgcggtgagccaagaatgcgccactgcactccagcctgggcaacagagcgagattctgtctcaaaaaaaaaagaaaaaaaaaaaaaccagcctgcgtgactctagatcagtgtttcttcctggacgtccattcccacctgcgacttctgccactgtatgtgctaggggtggttctgccaggctgattggtgggtggaggtgggagggctggggcccagtctggagagggtggccttccatagagcacctgcctgttctgtgaggagagttgtggctttccctccgtatccacagggtgaagtggggaggaggagaaatatcgttgcttccacagctgcagagttggggcctcctgtggagtcccggcttgcaggcaaggagagtcaaggctgcctctctgcaagccgagcagctgctgggtgagctgactgcccttcccttgcaggcgtggtggaagtggaggagggcgaggtgaacgggcaggagctgtgcatcgcatcccactccatcgccaggatctccttcgccaaggagccccacgtagagcaggtgagcccagccctgctcccagcacgctcctgtcttctgtttgcagcggtctgtggagtcagcctcttcctcttccgtgaggtagtgcgtgtcttgccactgtgtctcacaggcctgtcttcactgtctccttcttttcccttctcggaccatccagggtggatgttccctaaattcattgccccctcctcggctggtcagtggtgtggtttttttgaggtttgttgtttgtcacaaacatccttttgcatttgggttgtccacgtttacagatatatccatatctattgataaatttttcccagttaaattgctggatcaaaggacaggtacattttaaatttgatacacactgttagattgtatttcttcatgattatcctcccactatctcttgcatgagggcagctggttccctactccttaacaacatggtgtattttcagaatttcggtcctttcaaatctgagaaataaaagatgaaatctcactcatgttttgaatctaacttagaagcaggagggctcattccccatgctcactggctgtttacgcttcttattctgtgcacttgatatttaaagtctttgcctgtttttctgtggattgttcttttttgaggcggagtttcgctctgttgcccaggctggaatgcaaaggtgggatctcggctyatcgcaaccaccgcctctcaggttcaagcgattctcctgcctcggcctcctgggtagctgggattacaggcatgcgccaccacgcctggctaattttgtattattagtagagacagggtttctccrtgttggtcaggctggtcttgaattcctgacttcaggtgatccacccgcctcagcctcccaaagtgctgggattacaggtatgaacaaccgtgcccggccagattgtccttttttttttttaaagatttgtaggagctttctgtatgccatgggttaatctgttgtctgctttatttgtgacacatacttccctagtctgtggcctggtccatgatgggctgtgccccacaggtgctcagctttcctgttgttgcctctgggctgtttcctttacaatgtctggatttgggttcttgctaaggaagttgttgtccactccaaaatgataaaaatattctctcattttctttctttttttttttttttttgagacggagtctcactctgtcacccaggctggagtgcagtggagcaatctcggctcactgcatgttctgcctcctgggttcacgccattctcctgcctcagcctcccgagtagctgggactacaggtgcccgccaccacacccagatcatttttttgtgtttttagtagagacggggtttcgctgtgttagccaggatggtctcgatctcctgaccttgtgatccacctgcctcggcctcccaaagtgctaggattacaggcgtgagccaccgcgcccagcctgttctttcatttcttgtattcttacagctttcctttttacattaccacctagacctttaatctctctcacatttgttttttgagtgacgcagcgtataattctaactcttccagatgagtgacccagtrgtcccaacaccattcatcgaattccatcctgactccacagatttggaatgtcatacatacattaaaccacatccacataaatataggggtctgtttctttttttcttttttcctttttttgagaaggagtcttgctctgttgcccaggctggagtgcagtggcacaatctcagctcactgtagcctccacctctcgggttcaggtgattctcctgcctcagcctcccgagtagctgggattacaggcatgtgccaccatgcccagctaatttttgtatttttagtagccatgttgaccaggctggtcacaaactcctgacctcaagtgatccgcctgcctcagcctcccaagtgctgggattacaggcatgagccactgtgcccagcctcgtttgtctttcttcgtctgcttgtccacttccttaccagtaacacatttttagctctcacagctgtatattacatgttaatgtctaagggaacgkttcccacattttttctccaaattttcttactcattcttaagcatttcctcttctagatgaacttttgaataaacatctcaaggcttataaaatgtacatcaagactgcattgaatacatkaatgaatttgggtagaattgacatattttcatgggtagcaatatgcagcgtgacagtgtattacggtgactttaggtcatgttttgtgtattttagtatatagaaaagctttatttctttatagttttaattatacaggtcttgtacatttcatgttagggtaaactcaagtgttttatcatttttgttrcttgtaaatagattttttcccatttaatcttcagattgattattgataattgtgtggacacttctgatttctctgtgttgaactgggccactggtgtaactttcagacagccaggatcttaggcacagcatggatagaacaacaggcgtgaatgtttgttgcatgcttgtccctgactctagtggaaatagttctgtgtgtcaccacctgtaagatgctcactgtagattacttactggtagataagaaggtagcttttttttttttttgagacagagtctcaatctgttgcccaggctggaatgcagtggcacgatctcagctcactgcaacctccgcctcctgagttcaagcgattctcatgcctcagcctcccaagtagctggggttacaggcatgcaccaccacacccagctaatttttgtatttttagtacagatggggtttcaccatgttggccaggctggtcttgaattcctgatctcaagtgacccacccggctcagcttcctaaagtgttgggattgggcatgagccactgcgcccagccggatagccttttttttagttgtaaaatttttctacttttttttttttccagtgcaggtgcgtatcttggtaaaggcagtctttttcaggttaagaagattcagtttctagtatgccaagaattgtattcagaaatgaattttgaatttcatcaaatgcttttataacctgttggggatgaatctgtttttcccccttgtcttcctcttgaagctgttaatgcagtcctcactgcaggaggtgagtggccagcaggtgagtgggcatgacctcctgagctccacctcctgtccatcaggtggcagcattagattctcataggagcacgaaccctgctgtgaattgtgcatatgagggatctaggttttgcttctaatgagaatctaatgcctaatgatctaagatggaacagtttcatcccaaaaccacccccacccccacagctgtggaaaaattgtcttccatgaaaccagttcctggggccaaaaagtttggggactgctgtaataaattatattaatagctcatcagtgttggatcatggttgtttttgggggataaccctgagttgtcatgatatgttgtttttagacatcattgtccattttggtattggagttattcacaggctagctgggagcttcttagcttttgcaaatgttctctggcaaagggtggccccgtgggagttggtcggcctctctgggaaggtatctggtaaccagacctaagctgtgcttttactttgttccgtgactgcttgtctctccacgttcttacttggctccatctgcaaattcatgttctcctgcaaaagtgtccgtttcatgagattttcagaatttttggaagaagtaatagatactgttttctcttgatgtgctgttctatgtcacttctcttttactgatgttttgtgtgtgttttctctttttcttgatcatacttgtcagaggttatctattttaccagggttttttgtttttttttttgtttgcatgtttatttttgctaaataactagatttgggttttattaatttaacaaaaagtggctctttttctgcaaatagagggaggagacagagacgatggagttgcgaagcctgggcatggcgcttaggggaaggctctgtgccatgcagcccctgcaccctgggggctttggggacctctaccgagcgacttaatggacagaagctggaagcacaacctgaggggctgggcctccccattgggttgacatcagcaggaytgaggaagccaggaagcacacacagaaggcagggaccttgaggctagaaggagagcaggaggcaagaagagctgggtcttggagggccagtcctactaggcttgtgcgggggtgaaaggagctgtccctgttattacagtgttgggggaatttcctgggactttgtttgtagccaaatacaaagtcagtgtttatcatctttccaatatgtattgggggaaatgtgtcttccttgttaggttcagagttctgtagctttatgtgctgcataaagaagttttccagctgggcgcagtggctcacacctctaatcccagcactttgggaggctgaggcaggtggattacctgaggtcaggagttcgagatcagtctggccaacatggtgaaaccctgtctttactaaaaatacaaaaattagccaggcgtgatggcgggcgcttgtaatcccagctacttgggagcctgaagcaggagaatcgcttgaaactggtaggcagcggaggttgcagtgagccgagatcgcgccactgcactccagcctgggcgacaagagcgaaattccatcttggggaaaaaagaagtttccttcagtgacggactgacagaccccacttatgatggtcaggccataagattgtaatggagctgaaaaatttctcacttcatgagtgaaagaagccatctaatgtagcacaattactttttaaaaataaaaatatgtttataaatttaatgcagcctaactgtactgtatttataaagtctatggtagtgtacagtcatgtcctagaccttcacattcacccatcactcactcactgactcacccagagcaactgccagtcccgccagctccactcatggtgcctgccccagacaggtggactttttgttgttgttgttgtttttgagacggagtctcgctttgtggcccaggctggagtgcagtggtgcartctcggctcactgcaagctctgtctcctgggttcactccattctcctgcctcagcctcctgagtagctgggactacaggtgcgcgccaccacgccaggctaatttmttatatttttagtagagttggggtttcaccgtgttagccaggatggtctccatctcctgacctcgtgatctgcgcacctctgcctcccgaagtgctgggattacaggcgtgagccactgcgcctgggcgacaggtggacctttttatcttttttgttttttccgcaaatgttttgaaggcaacaatttagatttttttttctttctttcttttttttttttttttttgagacagagtcttgctgtgtcacccaggctggagtgcagtggcacaatctcagctcactgcaacctccgcctctggggttcaagcaattctcctgcctcagactcctgagtagctgggattataggcccgcgccaccacgccaggctaatttttgtatttttagtggagacggggtttcmccatgttggtcaggctggtctcaaactcctgacttcatgatccgcccacctcagcctctcaaagtgctgggattacaggcatgagccatcacgcctggcctaaaaatcttttatactgaatttttactgcagctttcctatgtttagatgcacaaagactttgcattgtattacagttgcctatagtatataggacagtctgtctaccgtacgtatacatatacacgtaactatatgctgtgcaggtttttctagctaaggagtcatgggctgtcccagagagccgaagtgtggaggaggccattccatctaggtttgtgtaggtgcacgctgtgatgtttgcacaatgatgacatcactgaatggcacatttctcagaatgtatctgtccttaagcaacccgtggctatttgtctttaaatgagacttcctaatcgtgattgaaattctctttggcccttttttcttcttcatctgtcagtttgtgagttctgctacgtagtgttcccactcaactgacccttatttcttgttcgttagaggtaaacggtctcaactctttgaactgattcatttagtttttagctccatatttagccatgaggtgtgttgattgcttcctcttaacattgctgactacgccttactgaccgagcgtctgctcaccgtggatgaagaagattctgctcccgtacccaagaccccaactcggttcccatgcatgtcctactcccgccttcccggagagtgtgtgtcctgattttactgggttgccactgttacagccgagtccccacgctcacagccagatcacgggctccacgatggctgttccttttccgtgtaccttttttgagttaaaaatgttatttttttttkgtttgcttaatgtttacatgcttatccctgagtcagcaccatgcgttctgccggtatctaaaactcagcttgggtactcagatgtgatacctgaattccacctgcggaactctcagagctgcttgatctgctctgttaagaccaaggagtagagctgccatccctgagactccctccccactaccccnnnnnnnnnnnnnnnnnnnnnnnnnnnnnnnnnnnnnnnnnnnnnnnnnnnnnnnnnnnnnnnnnnnnnnnnnnnnnnnnnnnnnnnnnnnnnnnnnnnnnnnnnnnnnnnnnnnnnnnnnnnnnnnnnnnnnnnnnnnnnnnnnnnnnnnnnnnnnnnnnnnnnnnnnnnnnnnnnnnnnnnnnnnnnnnnnnnnnnnnnnnnnnnnnnnnnnnnnnnnnnnnnnnnnctggctaatttttgtatttttagtagagtacagggtttcaccatgttggccaggctggtctccaactcctgtacctcagtgatctgcccacctcagcctccccaaagtgttgggattacaggcatgagccaccgcgcccggcctttttttttttttttggagacagagtctcactcttgtcgcccaggctggcatgcagtggcatgatctcggctcactgcaacctctgcctcccaggttcaagtggttctccttcctcagcctcctaagtagctgggattacaggcttatgccaccatgcctacctaaattttatatttttagtagagatggggtttcaccatgttggccaggctgttctcaaactcctgatgtcaggtgatccaccctcctcagcctcccagaatgctgggattacaggcgtgagccactatgccccgccccaagttgcttttaattttatgtttgtttgtttgtttgttttggttctggattggatcttataggccacctttagatgtctggggtcccttggaccacccccagccaggttcactgggaggcctcataggacgtggcaggagctgacttattacagcggaaggacatggagcacggtcagcacagggcagggcacggggcagagtctggaggaaacaggtgtgagcttccagcatcctttccacgtgcagcccacgggacgcgctccattgcccagcatcgcattgtagcgacaggagtgaaatgtcccaactagggaagcccttcagaacctcagtgcccagggtcgttccggggctggtcttacagcagcctctgcctggttcttgctcccagtgtctgggcacagctgaggcccagattctcatgtcaccctctgctggtagagggaggcacagttgcctcggtacggggagctggtggtggaagctggggagtgactgctgctgccttgtttgtgtccatgtttgtttgccatatacctgtcactcagcatgtctcatgtatttcttcttcttttttttttttgagacagagtttcgctcttgttgcccaggctggagtgcagtggcgccatctcagctcatcgcaacctctgcctcctgggttcaagcgattctcctgcctcagcctcccgagtagctgggattacaggcacgtgccatcatgctgggctaatttaatatttttattaaagatggggtttctccatggtggtcaggctggtcttgaactcctgaccttaggtgatccgcccagctcagcctcccaatgtgccaggattacagatgtgagccactgcacccggctgtctcatgtatttttaacagctctttaaagatataatgcagggctgagtgcggtggctcacgcctgtaatcccagctctgtaggaggccaaggnnnnnnnnnnnnnnnnnnnnnnnnnnnnnnnnnnnnnnnnnnnnnnnnnnnnnnnnnnnnnnnnnnnnnnnnnnnnnnnnnnnnnnnnnnnnnnnnnnnnnnnnnnnnnnnnnnnnnnnnnnnnnnnnnnnnnnnnnnnnnnnnnnnnnnnnnnnnnnnnnnnnnnnnnnnnnnnnnnnnnnnnnnnnnnnnnnnnnnnnncgagcgagactctgttatcagaaaagaaaaaaaaagatcttcacatactattcagattgctcacagtgtgcaattctgtggtttttagtatgttcacagcyctgtgtacccatcactacagttaatttcagaacatttatcttctgtggcacaatcataactcactgcagcctcaacccccctggactcaggtgatcctcccacctcagcctcctcagtagctgggactgcraatgcgcaccaccacacctggctcatttttttgtttgtttttgatttggggtttttctttaagagagggtctcattccatcacctaggctggaatacagtagcaagatcttggctcgctgcaacttctggctcccaggcttgagcgatcctcccacctcgccctcccaagtagctggggccacaggtatgcaccagcatgcccggtttttgttgttgttgttgttgttttgttttgttttgttttttgtatttttagtagagatggggtcttgccacattgcccaggcaggtcttgaactcctgaactcaagcagtatacccacctgggcctcccaagatgctgggattacaggcatgagccacctaatgagcacggctactttatttgtagtttttgtagagacaagcttttgccatgttgcccaggctggtctcgaactcctgggcttaagcaatcctcctgccttggcctcccaaagtgctggaattacaggcataagccacaacccctggccagaacattttttataccccaaaaagacacctggtaccctttagctgtcagccccaacttccatctcccccaacccctggctaccactaatcttccttctctgtagattgcctgtcctgagcatttcatagaattggggccatagactgtcacttagtgtaaggtttccagagtgtatccaacttggagcatgcctcaggcctcactccttttcatgactgaattattccattggtgatgtgctgtattttgtttatccattcctcattgatgggcaagttgttcgttactgaatcttggctgttaagaagaatactgtgcctcgcgtggtggctcacrcgtgtaatcccaacactttgtggggctgaggcaggagatcacttgagcccaggagttcaagaccagcctggacaacatagcaaaacctggtttcacaaaaaatacaaaaagtagccgggcttggggaggcatgcctgtagttccagctacttgagagggtgaggtgggagaatcgcttgagcctgggagccggaggttgcagtgagcagtgattgtgccactgcactccagcctgggtgacagagtgagaccctgtctcaaaataaatacatgaaataatactgaattgcctctgaaacacattttcaagcaaacctgctgttttcagccttcatccacggccactggtagagacactcaggccacgccacggagcttttgtggggtgttaaggcaggctgttcgcctgtccccagtgctgcattcagcctcggccttcctgggtcggctgtgtcgggtccccgtgtgcgtctcatttccagcccctcacgttctgtggctgtgtgccgcctcccatctttctcctgcggattcatgctgtggacagcattccttcactgccattccagtcgggggctgttgcaggagacacagtgctgtcctcacccgggaggcctcacctcagagctctgtgccggcttgctgggtgagcaagattttcatctacattttaccgttttttttaattttttactttttattttattattacttttttttagacagagccttgcactgtcgcccaggctggagtgcagcagtgcgatctcggctcactgcagcctgcacctcgtgggctcaagcgattctcccacatcttcctcccaagtagctgagactacaggcgtttaccaccactccccgctaattttttgtatttttaatagagatgggggactcactttgttgctcaggctggtctcaaactcatggcctcaagtgatcaacccgcctcagcttcccaaagtgctgtggttataggtgtgagccaccgtgcctggccagcttttccttttaagatgcatggtatttgggattattgtttctctgtagtgtgaggtagcagtcccattttccctttttccccgtacagacgtcccgtggcccttgttaggcactgtggccccgctgactgctgtttggggcatttccctccttggctgtcaggattgatgctgccggccatagcgtcagacacggtgtctgcatgtggatgcagaagcacccggtttttccccctcgctctggaggagcgggctggaacctctcgaagagaccgaggcttatgttggggaagtgaggctttcctttagctgctccgtggcatctgggggatcaggctgggatgggacgtgtgagtgtctttactgtttgtgtgggtgttggtgggcatggcscagactgcaggccccacagagggtagcaatgcctcaatgagctgtgtactgagcctggtggagcctgtgagctgccgagggtccctggccagcttgccccagggacagcttgtcactcatgtccggtgactgagcagtggtggcacaccccaggggagaactgagtgtgttggaagaggctcgtgtgactctttttgggagggcctgaggggtccccaggctcccgctgacctgcacattccctgtgctgtgtgtgtctgtgctttgtaacttcagggccccatgcagtctgtgtagcacgtgccttgcagcagccctgagacgaggcaggtccaggccaggccccattttacagtgaggctcagagaggcccccagcctggcagagcctccccgcttcctgccttatgtgggtggctctggacctagctttgcagcctgggctgccaccggtgacctgygagcttgagcatcttttcacgtcgttgctgggtcatcctccagcgaggtgcctgttcaggtctggtgaccatttccactgtgccttttctggctgacatgtcagagttctttatatgatttgaataaagctctgttagctaaatgtgttgcaaatagctttttcggtctgtgattatcttttgagttttacaaattgtttttgaagaacagaggttctggattttatgtggttcagtttgccaatctcttcctttatggattctgtttttaatgtcttagttaagcagtctttcctcactaacaggtcaaaatatgtattctgaatttttctggaagcttcacagttcaacctaaaatctttcctttaggtcattaatccacctggggytgagttgtgtgtatagtgtgaagtgctgtcccctctccttgttctcagatgagggccagctaccctgcaccctgcatgaagagcccggcccccctgttcacccatgcaactgccccctgagcccctcagtatccttcatcaggggtctgcttctcaccctctctctggttccaggtggtctgtttgtcagtccctgtgccaataccacactgtcttcattatcatggcttctactttttaaaaatcacctctattgaggtatactttatatggaataaatgcatacacttcaagtgtgcagtttgatacatttggacaagcatatataatcttgtaacgctgcgccagtcaagactgagaacagtcccagcaccctagaaagtccccgtgctccacaggcaacccccgctgccctctcaagcccccggcctggtttctgccactgtagaccgagcagctctgagtgtcctagtgcccatgatcatcagccgagcagttctgagtgtcctagtgcccatcatcatcagccgagcagctctgagtgtcctagtgcccatcatcgtcagcctggcagttctgtctgtcctagtgcccatcatcatcagccgagcagctctgagtgtcctagtgcccatcatcgtcagccgggcagttctgtgtgtcctagtgcccatcatcgtcagccgagcagctctgagtgtcctagtgcccatcatcgtcagccgagcagctctgtgtgtcctagtgcccatcatcgtcagccgagcagctctgtgtgtcctagtgcccatcatcgtcagccgagcagctctgagtgtcctagtgcccatcatcgtcagccgggcagttctgtgtgtcctagtgcccatcatcgtcagccgagcagttctgtgtgtcctagtgcccatcatcatcagccgggcagctctgagtgtcctactgcccatcatcatcagccgagcagctctgcgtgtcctagtgcccatcatcatcagccgagcagctctgagtgtcctagtgcccatcatcatcagccgagcagctctgtgtgtcctagtgcccatcatcatcagccgagcagctctgagtgtcctagtgcccatcatcatcagccgagcagctctgagtgtcctagtgcccatcatcgtcagccgggcagttctgtgtgtcctagtgcccatcatcgtcagccgagcagctctgagtgtcctagtgcccatcatcgtcagccgggcagttctgtgtgtcctagtgcccatcatcgtcagccgggcagttctgcgtgtcctagtgcccattatcgtcagccgagcagctctgcgtgtcctagtgcccctcatcatcagccgggcagttctgagtgtcctagtgcccctcatcatcagccgagcagttctgtgtgtcctagtgcccatcatcatcagccgagcagctctgagtgtcctagtgcccatcatcatcagccgggcagctctgagtgtcctagtgcccatcatcatcagccgggcagctctgagtgtcctagtgcccatcatcatcagccgagcagctctgtgtgtcctagtgcccatgatcatcagccgagcagctctgagtgtcctagtgcccatcatcgtcagccgagcagctctgagtgtcctagtgcccatcatcgtcagccgggcagttctgtgtgtcctagtgcccattatcgtcagccgagcagctctgtgtgtcctagtgcccattatcgtcagccgagcagctctgagtgtcctagtgcctctcatcatcagccgggcagttctgagtgtcctagtgcccctcatcatcagccgggcagttctgtgtgtcctagtgcccattatcatcagccgagcagctctgagtgtcctagtgcccatcatcatcagccgggcagctctgagtgtcctagtgcccatcatcatcagccgagcagttctgtgtgtcctagtgcccatcatcatcagccgagcagctctgtgtgtcctagtgcccatcatcatcagctgagcagctctgagtgtcctagtgcccattatcatcagccgagcagctctgcgtgtcctagtgcccattatcatcacccgggcagctctgagtgtcctagtgcccctcatcatcagccgggcacttctgagtgtcctagtgcccctcatcatcagccgggcagttctgtgtgtcctagtgcccatgatcatcagccgagcagctctgagtgtcctagtgcccattatcatcagccgagcagctctgcgtgtcctagtgcccatcatcatcagccaagcagctctgagtgtcctagtgcccatcatcgtcagccgagcagctctgtgtgtcctagtgcccatcatcgtcagccgggcagttctgtgtgtcctagtgccnnnnnnnnnnnnnnnnnnnnnnnnnnnnnnnnnnnnnnnnnnnnnnnnnnnnnnnnnnnnnnnnnnnnnnnnnnnnnnnnnnnnnnnnnnnnnnnnnnnnnnnnnnnnnnnnnnnnnnnnnnnnnnnnnnnnnnnnnnnnnnnnnnnnnnnnnnnnnnnnnnnnnnnnnnnnnnnnnnnnnnnnnnnnnnnnnnnnnnnnnnnnnnnnnnnnnnnnnnnnnnnnnnnnnnnnnnnnnnnnnnnnnnnnnnnnnnnnnnnnnnnnnnnnnnnnnnnnnnnnnnnnnnnnnnnnnnnnnnnnnnnnnnnnnnnnnnnnnnnnnnnnnnnnnnnnnnnnnnnnnnnnnnnnnnnnnnnnnnnnnnnnnnnnnnnnnnnnnnnnnnnnnnnnnnnnnnnnnnnnnnnnnnnnnnnnnnnnnnnnnnnnnnnnnnnnnnnnnnnnnnnnnnnnnnnnnnnnnnnnnnnnnnnnnnnnnnnnnnnnnnnnnnnnnnnnnnnnnnnnnnnnnnnnnnnnnnnnnnnnnnnnnnnnnnnnnnnnnnnnnnnnnnnnnnnnnnnnnnnnnnnnnnnnnnnnnnnnnnnnnnnnnnnnnnnnnnnnnnnnnnnnnnnnnnnnnnnnnnnnnnnnnnnnnnnnnnnnnnnnnnnnnnnnnnnnnnnnnnnnnnnnnnnnnnnnnnnnnnnnnnnnnnnnnnnnnnnnnnnnnnnnnnnnnnnnnnnnnnnnnnnnnnnnnnnnnnnnnnnnnnnnnnnnnnnnnnnnnnnnnnnnnnnnnnnnnnnnnnnnnnnnnnnnnnnnnnnnnnnnnnnnnnnnnnnnnnnnnnnnnnnnnnnnnnnnnnnnnnnnnnnnnnnnnnnnnnnnnnnnnnnnnnnnnnnnnnnnnnnnnnnnnnnnnnnnnnnnnnnnnnnnnnnnnnnnnnnnnnnnnnnnnnnnnnnnnnnnnnnnnnnnnnnnnnnnnnnnnnnnnnnnnnnnnnnnnnnnnnnnnnnnnnnnnnnnnnnnnnnnnnnnnnnnnnnnnnnnnnnnnnnnnnnnnnnnnnnnnnnnnnnnnnnnnnnnnnnnnnnnnnnnnnnnnnnnnnnnnnnnnnnnnnnnnnnnnnnnnnnnnnnnnnnnnnnnnnnnnnnnnnnnnnnnnnnnnnnnnnnnnnnnnnnnnnnnnnnnnnnnnnnnnnnnnnnnnnnnnnnnnnnnnnnnnnnnnnnnnnnnnnnnnnnnnnnnnnnnnnnnnnnnnnnnnnnnnnnnnnnnnnnnnnnnnnnnnnnnnnnnnnnnnnnnnnnnnnnnnnnnnnnnnnnnnnnnnnnnnnnnnnnnnnnnnnnnnnnnnnnnnnnnnnnnnnnnnnnnnnnnnnnnnnnnnnnnnnnnnnnnnnnnnnnnnnnnnnnnnnnnnnnnnnnnnnnnnnnnnnnnnnnnnnnnnnnnnnnnnnnnnnnnnnnnnnnnnnnnnnnnnnnnnnnnnnnnnnnnnnnnnnnnnnnnnnnnnnnnnnnnnnnnnnnnnnnnnnnnnnnnnnnnnnnnnnnnnnnnnnnnnnnnnnnnnnnnnnnnnnnnnnnnnnnnnnnnnnnnnnnnnnnnnnnnnnnnnnnnnnnnnnnnnnnnnnnnnnnnnnnnnnnnnnnnnnnnnnnnnnnnnnnnnnnnnnnnnnnnnnnnnnnnnnnnnnnnnnnnnnnnnnnnnnnnnnnnnnnnnnnnnnnnnnnnnnnnnnnnnnnnnnnnnnnnnnnnnnnnnnnnnnnnnnnnnnnnnnnnnnnnnnnnnnnnnnnnnnnnnnnnnnnnnnnnnnnnnnnnnnnnnnnnnnnnnnnnnnnnnnnnnnnnnnnnnnnnnnnnnnnnnnnnnnnnnnnnnnnnnnnnnnnnnnnnnnnnnnnnnnnnnnnnnnnnnnnnnnnnnnnnnnnnnnnnnnnnnnnnnnnnnnnnnnnnnnnnnnnnnnnnnnnnnnnnnnnnnnnnnnnnnnnnnnnnnnnnnnnnnnnnnnnnnnnnnnnnnnnnnnnnnnnnnnnnnnnnnnnnnnnnnnnnnnnnnnnnnnnnnnnnnnnnnnnnnnnnnnnnnnnnnnnnnnnnnnnnnnnnnnnnnnnnnnnnnnnnnnnnnnnnnnnnnnnnnnnnnnnnnnnnnnnnnnnnnnnnnnnnnnnnnnnnnnnnnnnnnnnnnnnnnnnnnnnnnnnnnnnnnnnnnnnnnnnnnnnnnnnnnnnnnnnnnnnnnnnnnnnnnnnnnnnnnnnnnnnnnnnnnnnnnnnnnnnnnnnnnnnnnnnnnnnnnnnnnnnnnnnnnnnnnnnnnnnnnnnnnnnnnnnnnnnnnnnnnnnnnnnnnnnnnnnnnnnnnnnnnnnnnnnnnnnnnnnnnnnnnnnnnnnnnnnnnnnnnnnnnnnnnnnnnnnnnnnnnnnnnnnnnnnnnnnnnnnnnnnnnnnnnnnnnnnnnnnnnnnnnnnnnnnnnnnnnnnnnnnnnnnnnnnnnnnnnnnnnnnnnnnnnnnnnnnnnnnnnnnnnnnnnnnnnnnnnnnnnnnnnnnnnnnnnnnnttttgttgtacttatttgccacttgtatttcttgttttgtgaaatgaacattcagattttttgcccatttgtttaagtgtttgtgttattcctgagttgtaagagcctgttgtttgttctgggtataagtcctttatcaggtgtacttgccaacacgatattcctatcctgtgccttgcctttctgtttcctagacagtaccatttgaagaaccaaatgttgttttttttggtgggggtggggggtttcttttctttttyttttttttttttgagacattgtttgctctcgttgcccaggctggaatgcaatggcctgatctcagctcactgcaacctctacctcccagattcaagcgattatcctctctcagcctcccaagtagctcggattacaggctcccaccaccatggccggctaattttttgtatttttagtaaagacggggtttcaccatgttggccaggcckgtctcgacctgacgtcaggtgatccaccctcgttggtctcccaaagcgctgagatgacaggcgtgagccaccatgcgcagtctagaaccaaatgttttaattctgttaccattttttttctctagtcagtgctttttgtgtcctgtcttaaaatttttcacctagcccaggcagcaaagattttcacctgcattttcttcaagaagttttatagttttaagatatatgctatttggaattgctatttctagatggtatgaggtagtagtcacgttttttccatttttcctcatacagatacctcgtttccagcaccatttgttgaaaagagaacccttaatttattaaagtatgcagtgcttttgtcgaaaatcaactcactttgtgtgtgtggttcttccccaggactctctcttctgtcccactcttctctgtttcggtctttatactgttaccatgctgtcttgatcattgtagctttatattgaatcaggtgatagaagttacccaacttttcttctttttcttttttccaaaattgttttggctatcctaggaccctttgcatttccttatgaatttcagaatcagcttgtcagtttctagaaacattttcattggaactacttgaatttctaaattaatttgggaagaagtgccatcttaggcaaactgagtcctccaatccagtgccatggtaaggtgctccatttatttagatcagtctcatcctatattttcttgtagttttcaacgtattggttttgcacacattttgttaaatttattcctacatattttgtggtttgggatgctattataaatgattttttaattttccacttatttgttgcaagtatatagaagtacaattagctgttgtatattgatctcgtatcatgtgactttgttaaattcattcatttctgtagtttgtttctttatttttcttcttttccttccctccctccctccctcccttccttccttccttcttttctctccttttttcttttttctttcaataaaaacaaggtattctgtgttgcccaggctggagtagagtggctattctctagtgatttttttctttttttttgagatggagtttctctcttgttgcccaggctggagtgcagtggcgcaatcttggctcactgcaacccccacctcgccagttcaagtgattctcctgtctcagcctcccgagtagctgggattaaaggcatgtgccaccacacccggctaattttgtagtgattttttttttctttgaacagggttatttagagatatgttacttattttccaaataattgagaattttttaaatagattctattgctcaggatttttcattcaattctataaggcccagacaacataccctctaatattttagtctgttaaaaaatgttggagacttattttacgccccagtatatggcctaacttcatgaatatttcatgtacacttaacgaatgtagcattcaatagttataaaagtcccctccrcaagctggaaaccctgggatgccagtgtcatggctcagtccaagtccaaaggcttcagaaccagggaagtcagtggtgtcactcttggtcctgggccaaaggtctcagagccctgaggagagaggaggtgctggtgacatctgggagtccaaaggtcggggggcctggaggtgtccaaggacgggggaggaagagtgtatcccagctccagcaaacagatggacatattcgccttatctttgtttttattttatctgggcccccagcctattagatggtgcccaccctcatggagggtagatcttcctcacctggtcagtcacctctggaaacatcttctcagacatactcaaaataatcctttaccgggtttctaggtgttccttaatcggtcacctttgacctttgacacctaaaattaaccatgacacccacacccacctctggctgctttcaagtttctattttcttgcctttgattatcagccaaagttttgctgtgatataattagaatttgtggcttgatatattttgttaggctcagaaaattggccatgatcttttcaaatattgcttgtgttctgttgtctttcctatcttcttctgggtctctggttacacatgtgttcagtcttttgcaattttcaatgtgtcccttatgctttcatccatattttccattattctctaagcttcaatgtggatatttcctactgatcattttccattttactaatcctttcttcatctgtgtctaatttgtctatttcattattggggccttaatttgagttattatgtttttcagttgtagaatttatattttaatctttttgataaattctgattacctgcagaaattctccatattgtcttctaataactccagtattggtatcccctgggtgagggtgggggaggtgtctatttcctgttttttcttttgatcttatctcctagtaacctaaggagtttttctttttttcttggattctagacaatatgtgtgaaaaattgtagagatgacttgaggcttcctttgatgttatcctcaccaaagagcagttctgtgcttctgcctgttggtcaaggatggacagctcgtgttcagtagaggctgagctggtttgaaaccggacttcccagcctgtttctggttaactcttactcctgggatgggacccttcagggaccccacccaaagctggggtgctttttttttttttttttttttcctcttcagatggagtctcgctctgttgctcaggctggagtgcagtggcgcgatcttggctcactgcaagctccgcctcctgggttcacgccattctcctgcctcagcctcctgagtagctgggactacaggcacccgccaccacacccggctaattttttttgtatttttagtagagacggggtttcaccctgttagccaggatggtctcgatctccttacctcgtgatccgcccgcctcggcctcccaaagtgctgggattacaggcgtgaaccaccgtgcccaacctcagggtgctttttttctttctttttctttttcttttttttttytttttttttttttttttgagaaggagtcttgctctgtcacccaggctgaagtgcagtggcatgatctcggctcactgcaacctccacctcttgggttcaagcaattctgctgcctcaacttcccgagtagctgggactacatgtgcataccaccatgcccggctgcgcctctcctcctagatggacactgaattccagtgtttgtccctccagctccatgagtctgagaaggccccacttagcttctcagcctcttagctaccacatccctctcagcctccaccccttgaaccccttgacttccgggcagcaaaagcatcggggccagttgctccaaattgggtctcacctccacacttccttctctttggggtgctggtcctcgctgacttggtggttctctgacacctttaaagaaacttcttaaaacctgggttgttatctgcaggagggttggtcagttacagagtagtcagccatggccataagcagaactccgtttcatccacttctggtgccccccaccccacatgaccccccacacatctggggcactagagagatagtgcccatcagagaattgtcttttgacagtggtcactctcacaatttgccggcaaacattctgggcatatagggctgactcattcgggacttagctgccataggcttggattcttgttggaaacagctgctataatttattctgatgaattactgttccaaagatggtatttctgagctttccaagaacacaytggacatcagttctagttacagtgaaagtgggaggcagtggagaagggaagcactggaagctcagcgcttgtctgatcaggtatatgatttgtagagaccaaaaaaaggtgacttctcccatccaagtactaaccaggcccgaccctccttagcttccgaggtcagacgagatcaggtgcgttcagggtggtatggccgtcgacaaaaaaggtgacttctaaataaacaatccctgtgttcccctggtggtcttctggaggcagctgaagggcacctggattgtgacatgcccaggggccctgggctgtgtgtctaccctcctctggcagggccactgcctggctcacagcccgtgatgagtgtgtggcatgcagtgggcgcacaggcattgattgaatcttttgaagataaaactaagctatctttgttccattctcctgctcagatcacccggaagttcaggctgaattctgaaggcaaacttgagcagacggtctccatggcaaccacgacacagccaatgactcagcatcttcacgtcacctacaagaaggtgaccccgtaaacctagagcttctggagccctcgggagggcctggctactgtgcctcaacggttcggctcctcaacagacagtccctgcggcagaagtgggtgtggccgtgagcctctgcaggctcaagagtgttgtccagatgtttctgtactggcatagaaaaaccaaataaaaggcctttatttttatggctgaggattttgaatattatcacttgcgtaggctgtacattttttttttatctgctgatgtttgttttccaaagcgttccctaagaaattaagaagggggctgggtgtggtggctcacgcctgtaatcccagtactatgggagaccaaggctggcggatcacctaaggtcaggagttcgagaccagcctgaccaacatggagaaaccccgtctctacttaaaatacaaaaaattagccaggtgtggtggcgcatgcctataatcctggctacttgggaggctaaggcaggagaatcgcttgaacccaggagttggaggttgcagtgagccaagatcgcaccactgcactccagcctgggagacaagagcaagactctgtctggaaaaaaaaaaaaaaaaaaattaagaagggatgaatctctttccttttctttcttcttacagttttgacaagatctaaaatatttgtaaatcttctatagagttggccgggcgcagtggctcacgcctataatcccagcactttgggaggccaaggcgaggaaatggcttgaagccaggagtttgggaccagcctgggcaacgtggcaaaaccccatccctacaaaaaaaaatagaaatattagccgagtatggtggtccatgcctgtggtcccacctactcagaaggctgaggtgggaggatccctggagcccgggtggtggaggttgcagtgaaccaagatcacaccactgcactccaacttgggtgacagagcaagaccctgtctccaaaaaaaaaagatggcagtcattttctcattacttttaaagagccgagtctatattttcctacagatggagcattcccaagaggctagctgtgatcttaacatcatcatgtaagttttagtttgtaactctaatacagctttcgtttttgtggggtttttttcactatgaaagtttccaaacatacactaaacccttgtacctgtcacccagcttcagcacctgccagcattttgcccaaagcacttccatcttttcctcccccacttctgcgggaatacacgtaagcaaattccagacatattgtcacttgcccctaaatcctttggtaggcatcacaaaacaacacaaagccattttctttctcttaactcgttgccatatcagaagtctcaccaggcacatggagacgaggctacacgggtgttgggaagcagagtcagaataggtagcacacaggctgcgcagggttaacatccagggtagcaaccgcaggtaccacctccagggcttggggacaaaaagtattaccagggtggggtttcagggacctcagagcttacaggatgtgcttggttctcgcaagaggggcaggagggcctaggactgtactccaggagccaagggggcaccaagggacctggtggctgggctcagagctgtctctgctcccaaagtgatgctgaaataacctgggaacaccagggaggtcccagccccaactcctgcatccagggctccagcacacccagctggaagggtgtgtggaagggcagcactcagggcagagcacagacaagccaagagacaagaagtcaataactgacggcacagtgctgttttcacaaaatgcataagaattctgtaatgttctctaacagtcctattcgtatttcccttactgcctaagaaatatcctcacacgattggattatcaaagctttattcacgtttgtgtttggctacaaagtcttttaggatccttttgatcctaaaagtccccctcttccctcccctgtgcccttgacttgttggtgaagctggtcacttgtcctcgaaggtgtccccagtctggacttagcatcctccttgtagtgtttaacttgttcctctgtcccctctatatcctgtcgtctggaagttggatctaaagttgtggctggaatcacacccggacggtgctcagttcctcgtgtcacagcctcatgtccaattgtgtcactttgttgaagcattaataagcttggatggcgacagcctgacccctttatcgtcagtttcccctcaactgttcccctgacagttttgccacctgtgggtgaccattgctagaaccagaaccttcactgggactgcagaattctcgtcttctgtctcatcagaaggacatttagtggctggaattctctcagaccttccctttatccattagggtaagtcaggttaccctgaagtgcgttcatactagaaaggcagcataagcacttaattatttccctttaatgatcaatttttggagtaagaatgtcctggcaccctccagtggtgccaaaggactgggagttcctcacaccactgcacttacccttcccgcttccctactcatgttacgagcttaatgctttcatgtatacagtctgtcctcagtatccacaggggtgcgttacaggacccacacgggtaccaaaatcagatgctcgagtctcttgtataaaatggcatgggatttgcatgcaacttatgcacattctcacatataccttaagtcatctctagattgcttataatacctgatacagtgtaaatgctctgtacgcagttgttatactgtatatttttggggttttttattgtgggcttttggggaatatttttatttttatttatttatttatttatttattttttgagatggagtctcgctctgttgcccaggctgaagtgcagtggtgcgatctcggctcactgcaagctctgcctcccgggttcatgccattctactgcctcagcctcccgagtagctgggactacaggcgcccgccaccacacctggctaattttttgtatttttagtagagacgggatttcaccatgttagccaggctggtctcgatctcctgacctcgtgatccacccacctcagcctcccaaagtgctaggattacaggtgtgagccaccatgcccggccaggaatattttttatacacagttgaatccacagaaatggagggccaactgtatttgatatcattttaatcaagtgctgcgtatatctttggcaaacaggagatgctcagattatctcgtaattggacagaggagcccctccatccagtgggctttgatgcctccttgctctggggccacagctgcctctgacttttcctgcccagaacctggaactacccatttctccagagccctggttctcgttagtggggagtgggaattggagggagtgggaattggaggccacagactgagcactgactgcttatgatggctgggctgctctacctcccagcctttccatggacaaaaccagaaaattgttctaaaatttattttctcagctaggcgcggtggctcatgcctgtaatcccagcactttgggaggccgaggtggatggatcacctgaggtaaggagttcgaacctggccaacatgacaaaaccccatctctactaaaaatacaaaaaattagtcaggcatggtggcgggcacctgtaatcccagctactcggggggctgaggcaggagaattgcttaaacctgcgaggcagaggttgcagtgagccgagatcacaccattgcactccagcctgggcgacagagcaagacactctctctcaaaaaaaaaaaaaaaaaaaaatttctggtttattttctctgaatcgtgaggttgtattagagatcaggacccttcacccttaactactttagcatgggatatacacatgtatttttgaaaaatatgaattcatactgttttccattcaaatgttaagattataagggtttttaaatattctttgattttacctcttaagctgaaaatcttggttcattacaacattaacattatttgctttattctacatataaatgcatataatcatttcaaaataagcctgggcaacatagtaagaccccacctctaccaaaaaaggtattgttaacaatgactactggtcaaagtttttttctgctagcttttttagacctttccctttgaagatacaaagttaaaatatgatgtaattggattaactactctgcgcttctgtcaccaacttgatacacaagtccatttgtttaaattctagaaattgttataatttgttttgtgaatacaaatcatttgactggctttcttgtcagaactgtaaaaccaggcacatttgctccacacaggcctctagcacagctaccgagtgctccggtaagctcgccgtgggttagctcgccgtggattagctcaccgtgggttagctcgccgtggattagctcgccgtgggttagctcgccgtgggttagctcgccgtgggtaagctcgccgtgggttagctcgccgtgggttagctcgccgtgggtaagctcgccgtgggtaagctcgccgtgggttagctcgccgtgggtaagctggccgtgggttagctcgccgtgggtaagctggccgtgggttagctggccgtgggttagctggccgtgggtaagctggccgtgggtaagctggccgtgggttagctggccgtgggttagctggccgtgggtaagctggccgtgggttagctggccgtgggttagctggccgtgggttagctcgccgtgggttagctggccgtgggttagctcgccgtgggttagctcgccgtgggttagctggcggtgggttagctcgccgtgggttagctcgccgtgggttagctcgccgtggattagctcaccgtgagttagccagcagatcccctcatgctgggccttgggttgtttccagtctttggccaatcaaatgtcagagttggacccagcacctccgttgggactgcagagtgcttgtcttctaagtctggttagaagggcatttccacatccttgtggattctggccatcgtatcttaaggatacatttctggaagtgggattgccagtcggcggggagaggctcatctggcttgtctgggtgttgtccctgtccccaaggggccaggcgttctgcatccccacagcattgtaggaagtccctgcccccctcagcagccgaatctggtgtcaaatttggatttgggtcaatcttgtaggtgagaaatggagtcttggggtggttttggtttgcatttctctctctcttttttttttttaatcattttcttgattttccaaactcatgagctcgtttgaataaggaatattaatcctaatatttctcattttaagttataatttttattgaggtaaaatatacataaaacaacatttttatcagagtcctatagatggttaaaaaaattcaccattttaaccatctcttaaagtctacaatttagcagcatttaatacattcataacgtacaaccatcacttctgtgtgcttccaaagccttcatcacgccagaaggagaccccgcgcccgttcaacaccatccccccaccctcagtccccgacagtcactgccctgcttcccactcaagtcaccgacactttgaaaatgtgctatgttataaaacttttttcccagtatacattttgtcttttatcactcctgggttttaagtcatatttaagaagattttgcccactccccggtgatgaaggaattcactttttcctagtacttttgacccatttggaatttgtcttagtgtatggtatgaagtgcagattcattttcgtctttctccaagtggttaacgtttaaccacttgtattaacaagtccatcctttcctcaccggtatcatatgctaccttatagactgaatgttctaggcactggggtctgtccccgggttttcatgtccctgggcctgcttgcctacatgggtcctggtgtcatgtggttccattacggaggccaggagatggttcaggggcagaggacctctccatttcttttgcagagttttcctggctatttttacactcttgtgcacttcctctctcacatgaactttataattagttttctagatctggggaaaagcatgcggcgtttttataaggattacattacatttataaatttactttt

SEQ ID NO: 8844 - DNA, 20809 bp, Homo sapiens
tcctcgacatctgttaataaagccgtaggcccttgtctaagtgcaaccgcctagactttctttcagatacatgtccacatgtccatttttcaggttctctaagttggagtggagtctgggaagggttgtgaatgaggcttctgggctatgggtgaggttccaatggcaggttagagcccctcgggccaactgccatcctggaaagtagagacagcagtgcccgctgcccagaagagaccagcaagccaaactggagcccccattgcaggctgtcgccatgtggaaagagtaactcacaattgccaataaagtctcatgtggttttatctactttttttttctttttctttttttttgagacaaggccttgccctcccaggctggagtgcagtggaatgaccacagctcaccgcaacctcaaattcttgcgttcaagtgaacctcccactttagcctcccaagtagctgggactacaggcgcacgccatcacacccggctaattgaaaaatttttttttttgtttagatggaatctcactttgttgcccaggctggtctcaaactcctgggctcaagtgatcatcctgcttcagcgtccgacttgttggtattataggcgtgagccactgggcctgacctagctaccattttttaatgcagaaatgaagacttgtagaaatgaaataacttgtccaggatagtcgaataagtaacttttagagctgggatttgaacccaggcaatctggctccagagctgggccctcactgctgaaggacactgtcagcttgggagggtggctatggtcggctgtctgattctagggagtgagggctgtctttaaagcaccccattccattttcagacagctttgtcagaaaggctgtcatatggagctgacacctgcctccccaaggctttcatagatcctctctgtacattgtaaccttttattttgaaatgaaaattcacaggaagttgtaaggctagtacaggggatcccgcataccgttctcctccttttccccgttgtgaggacagtgcactgtattcactttcaacatccaaggtctgtgttgagagggtgagttgtgcggcccagcttgccccaagcccgtcttgccatcacgaaggatttcctgactcagctgaatctagctcaacaaagcaaaggactaactaagctgcagattttctctccgctgggcttagcctacattatttacacctgttttcagctggatgggaccaaactggggccttgacttctggggtttccacgtgatccccaaagaggagacatccattcattcactcaggtatttgcttgtgcacctactgtgcgccaggtgccagatccaggaattgaagcccaggaacaactcttgcagtgagctccccgggtttttgttttctgaacggtgggaagacaggtcagcaaatagccatgcacgtctgcacatgtgtggctggtgtctgcaggagtaccgagaagacggtgagctctgccctggatggcaacaggaaagggcatccctgtgcagctgtttgtcctggcacaggtggcaggctgccagcgggaccaggaagggaaggggaggatgcacaggtcggagggaacggaacgggcactgcaggtgcgctctgcgatgtgaggaaggaagcaaaggctggttccgggatgatgtcggagaagccttgcagcctagggcactgcccattccacgttacccagtgagtcaaagcctcccagaaagacatttagtcactcaaagccagtgcaggtctcagctttgtccggggaggaactttcactctagaaaacacgaactcatttccctttgaggaagttgtttctccaggatatcatttccagccaccatccaggatgctgggcaggtgctgcagtgcccaaggcacggctgccgaagaagcttgtcccttagaaaccccttgtggcctcggaggcgcctgcctgcctccctgagaatggaaccctgttgggccgccaggctcgctgggcaggtgctggggaaggctgggtcaccgtgctgagcccctcacaggcctgggagttgtgcttggggaggagagctcccagctctttggctgcctcccaatcatggccacatctcacaaacaataccactgtccacgaaaaatgaaaaggtgcctggttctaacccatggccccaaccatgaaagagcccttagaatgtgggggtttgactcgaacagtggctttgagtctcccaggggggattagtgtcctaatgccctgagttaatgaattgacttgttggacagggaaactcagtgaggttcattttctgtggggggacgtttgtcaaatgctgtgaaatcagttgtagcatacgcgacgctcagctgctccgacagtgactcagccacggctccagctgcttccccagccctgtagtggaggtggcagatggtgtcatcagcctggcgcagagggctgtgcccactggcatcacaagggccaggcctgctggtcctccagccactggatccaggtagttacatatgggtttaaaagaagagaggcagggccagttgcggtggctcatgcctgtaatcccagcactttgggaagccgaggtgggtgatcatttgaggttaggagttcaagatcagcctgaccaacatggcgaaacccagcctccactaaaaatacaaaaaaattagctgggcatagtgctgggtgcctgtagtcccagctactcaggaggctgaggcaggagaattgcttgaacccggaaggcagaggttgcaatgagtcaggatcatgccactgcactccagcctgggcaacagaacgagactctaaaaaaaaaagatcaataaataaaataaaaataagagaggcagggtgggagtattacttgaggccaggagtttgagaccagcctgggtaacaaagcaagaccctgtctctaccaaaataataatttaaaaaattacccgggaatggtgtgacatgcctgtggtcccagctactctggaggctgaggtgggaggaacactcgcacataggaagttgaggctgcagtgagccgtgatcacaccactgcaccactctagcctgggtgacagagcaagacctcatctctggggaaaaaaaaaaaaagaagaggcttggaagccacattgttttttgtcacttataactagagtttcgtccatcaaaagcccattctgcactgatttcagtgataggggtctgatgctggcttggaagagggcctgacagcttagagacaggcttggagttccaagttgatgaaagaacgatgaataatgaaaaataatgtgttgttctaaagtagtgccttttcatactgagctagggtataatttgggtccatttcaagggaaatatactagcagaattcatcaaagtagcccctcgaagactggtgcctgctgcctacgggacaatttaatcagtggttccagctgcacatctagagttgggaacactgaacccaggctttctcatgcagatggggtgtggattgctaaggtggctgtctcctagcgctgcagcatgagtgaaacacgtgtccattctacagagacgcggctccgtgatgctgaaacctccttctttttttttttttttgagacggagtcttgctctgtcgcccaggctggagtgcagtggcgatatcttggctcactgcaacctccgcctcctgggttcatgcaattctcctccctcagcctcctgagtagctgggactacaggcgcgtgccaccatgcctggctaatttttgtatttttagtagagacagggtttcaccgtgttagccaggatggtctcgatctcctgacctcgtgatctgcctgcctcggcctcccaaagtgccgggattacaggcgtgagccactgcaccccgctgaaacctccttctagataacagcggcgttaagcatttttttttttttttgagatagagtgttgctctgttgcccaggctggagtgcagtgatgcgatctcggctcactgcaacctccacctcccaggttcaagcaattcttctgcctcagcctcccgagtagctgggactacaggcacacgccaccaggcccagctaatttttgtatttttagtagagacggggtttcagtatattggccaggctggtctcgaactcctgacctcatgatccacccgtctcagcctcccaaagtgctgggattacaggcgtgagccactgcacctggccaaaacctcctcctagataacagtggcgttaagcattttttttttttttgagatggagtcttgctctgttgcccaggctggagtgcagtggtgtgatctcagttcactgcaacctctgcctcccgggttcaagtgattcttctgcctcaggctcctgagtagctgggataacaggcatgagccaccactcccagctaatttttgtatttttagtagagacagggttttgccatgttggccaggctggtctggaactcctgacctcaagtgatcctcccacctcggcctcccaaagtgctgagattacaggcgtgagccactgcacctggcctttttttgttttttaagacagggtctcactctgttgatcacagccacagctcactgcagcctcaacctcctgcctgggttcaagcaatcctcccaccttggcctcccaggtagctgagaccacaggcacaagccaccatatctggccctacgtaagctttatgtgggtgcaataacagatctcaaaccagctctcagctcaagagaaggggaagctgggcacagtggctcacgcctataatcccagcactttgggaagccgaggcaggaggatcacttgaacccaggagttcgagaccagcctgggcaacatagggagacccctgccctccctgtctctgaaaaaaaaaaaaaaaaaaaaagaaaggagaggctgggcttggtggctcacacctgtaatcccagcactttgggaagcccaggcaggaggatcacttgaaccctggagtttgagtccagcctgggcaacatagggagaccttgtctctaaaaaaataaatagagtgagagagagaaggggaagtcaccgggaggacacacatggagcacgcagcccaaatggggctcctctgttctccctgcagagtcagttcgtacctttcacatgcacaaaggtgttgatccaaccgaagcaatattgattcttgttatattgctttattgtggggtcagtgtcagagtaccacgagttttcatcacgcaccgttctttccccagctgcagtgtgtttagggggggaacgaggccccaccccctatccctatcgcctctgcctttataacggctgctactctctgagcacctgttgagttctttcaccttccagatctaatgtgctatccccacccctagagaacagggctgctggatgccacatggctcccagagaggggctgtggtcagggaagccccagctccaagggggctggaaaaccccagagctgcccacgtgcggcaacacagtctggtgctgcaggtgtgaggacggctacaaaatacctgagccattctgtcactctgtctgaactctgtttgaaatattgtttcaataactgctaggctggtttttccttcctgactatattcctcaaaccaacaagagcctagcagaggaaagcatggccaaaacgccccaagaagagagccttggcttcacctccaagggccaccatccgggaggatgtcctcagacctctgatcccctctctgcaggctctgcccagccctgtgtggcaacccagaggaagcctccccttcgtttgagatttaaccccagaccttaggcgatggctgcccagcctgtcccttccgcctgtgtggctgcccacgcgggcgttgctcatggggctagtcctgggtggatgggtgggggcctctcgccggctcctctgcctcccacccccactggcaccccacgcctgtcctagaaggttctttctgcctgttttctccgtgagtgactggacaggcagaggccggccttgctggagggggcatttgtaattatgagtgaatccaaaacaaggttttttccttccgcagccccccgcccggctgtggggcccagccactgcacttcaccggatgccgtctggttggtcctcaggactgatacagaccaggaccccagggccagcccgtgccaggctcctatgcttccaggagcacgggtgggtggtcctgctgcctggccggccatcctcctggggtcggtctcyggccgatcctccctcctcctctcaagccctgcacagcccggccaggcaggtgcatcttgtttggctgctgaggagccgggggttcagggaaattaaggaacgtgcccagggacccggggccagcccgtggggacgctgggattggagcccaagccccaggttcgccgcgcggctctcgacttcctctcctttcccccaggggcgagctcagcgaccgcagagaggtggggtcgatctccctgcgaccccagggggcccgcgaggccagtgcgcgggcaggagcggggacgtgctcagaagagccgggcgccgccgcgcccgcccgccccccgtcccccggctcccggctccgcgcgccccccgccgcccccggggccctgctacccccgacccgtccccacccgccggccgcccccatggcccggctgggcgcgctgctcctggccgccgccctgggtgcactgctcagcttcgcgctcctggccgccgcggtcgccagcgactactggtacatcctggaggtggcggacgccggcaatggcagcgcctggcccgggcgcgcagagctgctctcctcgcactcggggctctggcgcatctgcgaaggtaaccggccaccgcgccggccctcctccctccgcgacctcgtccctccgacacccccttaaccccgccctgctcgtgttgccccgccagacccccttccaggacccctctcttgcatcccgctctgccccagggtgtctctccgctccctccccatcaccctccgtcttcccccaaaactgacagcccaagggctacaggagggagggagcccagttcggggcccctcacagccggaggagggggctgtggggcgacagtgggggagggaagcctagaggtgtgtagttggggggcctcatccaagtcaccaggggttgtttcttgatcacgctccccggggtttgggcctggcagccccttgtccccgtccctgtcaggcactgtcagagctgttcaccccacacctcctgatgccgcgggggcaggggttccaaatgtgtacagaggcttcagagtccggggagagagaaggggatcccagcaggctggagggtccacagggccccctccgttccccccagctccctcctccggagctggggccagcctggggagcttccccttcacagcgcgagggctggcagggcaggggtgtgtgtgtgagtgagcatgtgtgtgcatctgaatatgtgtgcatgtgctgaacatgaacatgtgtgagcacctggctgtgtatgtaaatatgaatatgtgagtgtgagtgtatgtagttgtgtgtgcatgtgaatatgagtgtgtgagcatgtcagtgtgcatgtgtgtgcatgtgagagtgtgtgggcatgtatatgagtgagtgcatgtgtgggtggtgcacatgtgctggtggcttcctcagtgcaactggggaggagttaggagccttgtgttcatccaacagactgcctaactgtgctccaaagacctcctgacatgcacctgtgtgcacgtgtgcacacgcctgtgcctatgcaggtggctctgcacgcgtgtgagaaccagagagtatgtatgcccacatgacacgagtcaggaagattccagagcgaggcttcccaggagcccgttttgtacaccctttttcctttcaggcaaagcctgagttccacacacaaacgcattacaaggacccctgcctgagggactctgagggggcctccatggagcgtttgaaagtttaaacatgcacctgtgcaggcataacttgcacgtgaaaataaacaaggtgaaggctgggcccggtggcccacgcctgtaatcccagcactttgggaggccgaggcgggtggatcacgaggtcaggagatcgagaccacagtgaaaccccgtctctactaaaaatacaaaaaattagccgggcacggtggcgggtgcctgtagtcccagctacttgggaggctgaggcaggagaatggcgcgaaaccgggaggcggagcttgcagtgaaccgagatcgcgccactgcactccagcctggggtgacagagcgagactccatctcaaaaaaaaaaaaaagaaaaagaaaataaacaaggctaaaggtcttgggccttttcatcccacttggagtcccagccctgagtttcagcagaagagaagctggcagggccctgtggtgccagggggtcccctgggctcgggtaggctgctgggtgcaccacagcgtccaggccccaggcttcgaggcctatgtttcccagggcagaayggctgcatcccgctggtcgacccttttgccagtgagagcctrgacgtctccacctcggtgcagcacctcatctgtgagtcctgggtggggccacctccccatcctttccaaatattcaggsaaggcagatcccagccatccccatcyccatcccgcagcactgcttccactgcccytgcgtttccaagaggacgtttccaygcagacctgtcccagtgctgtgctgctgtccctaaccacaggtgcccagctcccagcctatcctgttttcccctgtctcagtttccctctcagtggtgatggctcatccctttgttattggggaagccaggcagctcccagcttggctggatcctgcgggccttgcagactcctggctccccatttaggactcgattcttccagatggcctgctgtctacctggctggcaccttccacctggcgggttgggggacatgtgaggcctggggatgggggctgggagtgttctggggacgcctcccctcctggccttaggaagcccctgccagagtcagagggggccactgggagggtccagtggtgtccacagagatgggcgtcagccgcttttcctgagaagacgaagcaccacgtcactgtcctccggcagacaagtgctgaagggcccacctggaccagaattctcacctgagccccctttcctgcagtgctgcaccgtgcagtcattgtggtcctgcccctgagcctggtccttctcgtgtgtggctggatctgcggcctgctcagctccctggcccagagcgtgtctctgctgcttttcaccggctgctacttcctgctggggagtgagtctggggccctgggggaatggctccaaagatgggagctgggccacaggtcccgggagtggggtgctgcctctcctgttgccctcgtcccctgctcccttctgggcgggtgctgagtctggcgatggagccgtggcaggcagctccctgtggttccagaaggtacscatgtatatttgttctcacgttgctataaagaaatgcctgagactgcgtaatttataaagaaaagaggtttaggccgggagcagtggctcatgcctgtgatcccagcactttgggaggctgaggtgggtggatcatctgaggtcaggagttcaagaccagcctgaccaacatggtaaaaccccatctttactaaaaacacaaaaattagctgggcttataaagaaaagaggtttaattggctcatggttctgcatgctgtagaggaagcatgatgcttggcttctggggaggcctcaggaaaatgacaatcacaggcggaaggccaaggcagggagccagcatttcacatggctgggacaggaggaagagagtagggaggtgttacacacttttttttttttttgagatggagtttcgctcttgttgcccaggctggagtgcaatcgcatgawctcgactcactgcaacctccgcatcctgggttcgagcaattctcctgcctcagcctcctgagtagctgggattacaggcatgcgccaccacacccagctaattttgtatttttggtagagacggggtctctccatgctggtgaggctggtcttgaactcctgacctcaggtaatccacctgcctcagcctccctaagtgctgggattataggtgtgaggcaccgttcccagctgggtgctacatagtttttttttttttttttttgagacggagtctcgctctgtctcctaggctggagtgcagtggcgcaatcttcgctcactgcaagctctgcctcccaggttcatgccattctcttgcctcagcctcctgagcagctgggactacaggcacctgccaccacgccyggctaatttttttgtatttttagtagagatggggtttcaccatgttagccaggatggtctcaatcttctgaccttgtgatcctcctgcctcggcctcccaaagtgctgtgattacaggcatgagccaccatgcccagccctgggtgctacatacttttaaacaaccagatctcagaactcactcactatccagagaacagcaccaagggaaatggtgctaacccattcatgggaagccactgccatgatccagtcatctcccaccaggcgccccctccaacactggggattatcattccacatgcgattcgggccgggacaccaaaccctagcaccgtgataggagcagggcttctggttgtgggtcagagcctgggacagggaggagcaccggggtccaagcttcttggtgcggggggcatgagggcctccagggcaaccccaggacctgctctactgggtcagatcatgcgggggggcctggggccagcccctcaccacacccttctccttcctgtactgtcctggtgggaggagcaagggttccggggtttggcacagatgaggcagggccaggcatgaaggcaggtgagacagggcaccagaggcctcagctctgaccccagcacaggctgagactgtaaccggtaaccacccatccactgacgcggctccagctcygactacatgccgagtgctggccaagtgctcctccgaaggctcctccgagggccccccagtcccagctgcaggtgagaaatctgaggcctggagagggccgagggcctgggctccccttcacccccactggtgctgtctcctcagtttccaccgactgcccagcactggctgttgcggaaggtggactaggggctcctgacagtctgtcctcagccgcccctgtcaatcaaggctaggcccgagccaggccctgatgtctcaggccagctccactgtcaaggctgtggccacaaggagcagaccatccagggctgggggcaccctccctgtttctctgggaggcctctgtcactgaggaggcccgactgggtgcagagattggggaaaccagcagccttggtattggtcacaggccacatgagaacaacagtgaagtcaaggtctcctctagacaatgaaatcaggaagaatccaaatgacctgaccctgcggcccatctgtgagtgttcaaaatccaattaagaggaccttcgggagccagcgactagagtgtaattgggttgggattgtaaccagaagaacttacagggacacggaccctctgcattgtgcctgggagcgaaggcaccggctagggggtggaggggccggaggtagctggtggatgggtgggggttccactgcgactccagcctccccaggcagagggggcctccatcctagtatgagggtcagctgtgggccgaagcacagagggctctcaggatgtcacaccaaaggcacctgcccagggtcagctcggccctcacccctcactagcactgcaaggagggggagggagatagagggccccagatcgattgggtgcccttccctgagacaggatcttggggggcctgggggaccgacagggcccacggtgacagagtcctttagagtttcccagcttgaggttgcaggtgccagccgcagaggcctcctttaggaggtctgccaggagctgagcctgggccccatcaccagggatttgggaggtacttcaggtcccagtttgggagcttactcttcaccttcattttgggagaaaggccgtgtcctcggccaggctacaggaggcagctggtgtttggagagggctcagctggtggggcggcctgccaggaagtggggccttgggctgcagctgcagccagtgctacaggcagagacaggcagagacaggcacctcctgccgcacggtcagcccccgctgctgggggctgacccccacccctgcttctcccagggaccgcttcattcaatttggcttcacattcttccccaaaataaatccataatttctgttgctacgctgcccagccgggcaggcatccgtgtgtcctycctccctcagcctccccatgccttcttctccccactctctgtcccactcttcttcccaagtttggttcccaggaggaatcacagaagaccaggctgtgttgtgccccttcactgggcaccagtgagatccagacctggccctgaatgtcagcttgggtcagttgccttcttttggctgggcagtgcccagaggggaccctgtgcacccaggaagtgcctgtggggaaatcagggccacctgcccccctggctaacattccctacagtcrgcgccaaggacaggctttctcatcagcctgaagctgtgggaagggggtggcactccgggctggttcctccaagctcagtggacaggaaaatgccctggaggcatgggccgagtcccctacctagctcgttgctggaccctgaactgccggatgaagcctggtgcccgccaccctgtgcaaagcccagcttcattcctttgacaacagctttgaccatgtggagagcgggagggaggagagaggagggcccagggcaggcatcctcccctggggaagggcctgaaactcagagctgggaggacaggggggctctggaaggggagtcagagggagggggatgttagccccggaggtagggagggcaaaggtgtgaggaagaggaggcgggggtgcagggcagggactcactctgatcagagcactgggcaacgctgctgccagcagaggccatggctctgtgtgtgtgkgtgtgtgtgtgtgtgtgtgtgtgtgaatgtgtgcaaatgtgttcgtgtaggtgtgcatgtgcatgtgtgtgctgggggccatggagggtacagagtgtgtggggggcagttatgtgagtgggaaccatgttgaggggcaggtggcactgtttgcaggaggctttatgggatgaggtctctgaggtttgaggactgaattggagcctcttaaagctccactccgccaaatgcagttgactacctttagccctgtccaaccccaagcaggaggtggtgtctgggagaggcggccaggttgacagccaggcagggctaaccatgacaggaagggcggtgtgctgcctgcagctctgcctgaatgctagcggggccrgggatgctgaggccatgtctgcaggaccacctgggcctgggcccgctagagcagacaccgagcagctgccctccccatctctcccccaggtgtcctgacactggcgggggtcagcatctacatcagctactcgcacctggcctttgcrgagacggtgcagcagtatggcccgcagcacatgcagggcgtccgcgtcagcttyggctggtccatggccctggcctggggctcctgtgccttggaggcattcagcggaaccctcctgctctcagctgcctggaccctcagcctgagccccccaatctgtggtcatcwgagtccccagcaggtgggagggaggtaagagggggctgggtttccctttgcacctcccgggattgggcggtcagggccagggccccttgagagtctgggaatcccttctctgggcctcgctggggtcctggccaggaaggggctgggggtgacaaggggtggagggcagagccaagaatccagctcctcatgtttctctgtagatatttggggaggctcccctgccccggcaggcttgttagggactaattggttcaaccgcctcttagagatgagaagagccagtccagaaagaggaagtaagtggcccaggtgacacaggctgagtggcagagttgggtgggggcacctctcaagggtgtggcctgaactcgcccctcccccagcaggctagtgagtcactgctgcccccattcctaaggacctgggagaaaagtaggtgcctgttaaatgccgcaggactgggctccatgctcctctccagccccgcaatggccctactcaatgactaccctttatccattttacagagggggagactgaggcccagagcggcagagggacccacccagatcgcctggcgccagagagatgccgtctcaggccaaggcctccctggcctctgttctgtccactctccccgaagggcaggcttggtggagaagaggctgatgagagggcccgagagcccctccgatttgcaggggtggggggcaaggagctgagcgatccagatgtacccctctgccccctcccttgttctcaagcctgctaggtacttttcactgagcacttccgggaagagcaggcacccagatctctgtccttgtcctggcacaggctgctgctgcttccggcccccgacccttcctctctgcagcaacccgggggaggtatgccactgtgagtgccctggtgggcacactgagctggcagagatggaagtcccagaagggtggggtgggggtgtcatgccatggtggaggagtttggggccactccttgcctgcctcaaagggggcctggctgagggtgcttcttgaccacaggggccagggctgcctagggtggcgcagggctgggcctggagtttgggatgcaggcttgttaaacacagggcagaaccccaggttgggaggggctcagcttgcaggcccaggcccgcaggcccactgctggtcccagggtgagacaggtgagaagagggatggccagcacacacttgagtccccttgggccacaaaggctggggcacgcccaccgttatgcagatggacagttgaggtggctgcaggagaagggttcccagggcctgtacaacacgtggaagcactaaacggccccgtttggggtttgggggcccttcccgagtcttgagaggtcttgagaggtgtgctggggaaggtggcagcctcttgtagcttgatcttcctccaccctgccccacccctaggtctctttattgattcaaaggttaaggaagctcctgggggcttgagggggtggcacagttttggtggggcccagtgaggacaaatctggggggtgagcagggcctcctcttcctcctggtgtttgaacgtttaccattccatgtgggaccattgtgccaatttgtccttacgtaaatcacttgtgctgtgtgcagtataagccttttatttttcttagaacttttcaaaataggtaacacatgcctgtctgtcataaacagtacaaacgtgagcaaacactgtcaccagctgtgcgcgtgtctgtctgtccatccagaggtgttctgagagcgtgtgtgcacgtgtgtgtgtgtccactgtgaagtcatctgtagacatacaagcctacttcttattcccagatcagcacagggagtggggaggggggcctgggtctccgttttggaaacgggggctggcttcgtgggcatgtcctctcagcttgggaggaaaggtgtggcggactcttcctctcctcctcctggcccccaacttctgctgatgaggcttctcctgggggtttgctgggaagccagggatgtgagcctaacttcaggcctctcacggcagatgtgcttgggctctggggataggacactggggaagacacaccggggaggggctgctgggaccaccagagttcccggagagtgtgtgtggtggggagggtgtgctgcttgacccttcccttccagaacagagctgcccaccttgcctccacgtgttctggggcgtgtggaacttagccaggccaggtaacttcttcactctctcattggccagccacatccctcaccctctggttggttagtggactccctcacgctctgattggctagtcaactccttcactctgactggccagccacatccctcaccctctgattggctagttgactccactctggccagttgatgccccacactctctgattggccagtcagtgttccttaccctctgaatggccagttaactccctcactctctggctagtctccacagtgattggcccaagggttctgtctgtgttcatggttctctgagtgtcaggctttgcagctgtgattaagaggcggatgagtgcctcccagggaagagacagtgcatggttcaaggtcacccagaatagacaacatgacatcaggctcaaatggtgctgcgtcgtttacagcaagaggagagagcctgtgcaccaaaaccgcttgcaatggtggttcccacggtgggatccactggcccacgtgggcctctttcttcaattttttcttagaatttttcaaaataggtaacacgtgcccttgtgccacaaatagcacaaaggcgagtaaacactgtcaccagctgtgcgcacgtctgtccatccagaggtgttctgtgtgtgtgtgagcaagcgtgtgcacgtgccagaaacaagccctgactcagaggcccttcccccagcatcgaaggcgcttgctcctctcgccacagcaaagccccttctccagggatggcccagctccgccaggtcctgggcccactggcatcccactcgggcatgtttatctgcaccacctggtaggtgcccctgccaggggcctgacctctgtgaggacaggggcctctcatcagctcaggccctatgcccaaccagcatttataaatgcagtaggcagcccgcaagagagcccccatctgtcctcatctcctggtgctcacgcctctgtaggccttaccacactgagtcagcgctgacttgggtgtcaagtaggaagtaccagcgtgtgagggggtcataaaaaggcagcttctgcctcggtctcagactgctcaccctaggggaagcaagtcatcagactgtgaagacactcaggaagccctgaggagatgctcacatggacaggactgaggcctccgccaacagcagcagcagcgtgtcagctgtgtgaggacaccacctgcgagaggattattcagataatgcagttctcactgatgtcttgacggcaacctcgtgagaaactccaaaccagaactttccagctgtaagccactcccaaattccgcctctcccccgctttttttttgagacagggtctcactctgtcacctaggctggagagcagtggctccatctcggctcactgaggcatggcccttctgggctcaagtgatcctcccacctcagcctctcgagtagctgggaccacaggtgtgagtcaccaggcctggttactttttttgtttgtttggttttggttttttttgagacagagtttttgctctgtcgcccagtctggagtgcagtggtgcgatcttggctcactgcaacctctgcctcccgagttcaagcgattctcctgcctcagcctcccaagtagctgggattacagatgcgtgctaccgtgcctggctgatttttgtatttttagtagagatggggttttaccatgttggccaggctgatctccaacttctgacctcaggcgataccccatgcctcggcctcctaaagtgctgggattacagacgtgagccaccacatccagccacctggctactttttgtgtttgtagagacggagttgcaccatgttggccaggctggtctcaaacttctgggctcaagcagtccacctgccccggcgttccaaagtgctgggattgactacaggtgtgcgtgagccaccacacccggctcactctccaattcctaacccacagtgctatgggaaataatgattgttgctttaaggcagtatgttttggggtcatttgttatgcagcaatggataaccaatataatgcacttttgctggtgcttgccccagacagggcagtaagggagacacggaattacaggggcttagagttactggcttccttctttttttttttttttttgagacggagtcttgctcttgtcacccaggctggagtgcaatggcgtgatatcggctcaccgcaacctccgcttcccgggttcaagcgattctcctgcctcagcctcctgagtagctgggattacaggcacctgccaccatgccctgctgatttttgtgcttttagtacagatgggggtttctccatgttggccaggctggtcttgaactcctgacctcaggtgatccacctgcctcggcctcccaaaatgctgggattacaggcatgcgagttgctggctttcttttgattctctgagttaccaccttctccagcacaggacagcagttctggggccctgggaactcctgtatacggatcttccacagtatggatctggattcttctaagagatggagggacagagggaaactcccctttgcctgccacgtggactcttctccccttacactcactgcagtccaagatttccaccgtcccctccctccctcccttccttccttttctttctttcatttctttcttgagacggagtttcactcttctctggtgcccaggctggagtgcaatggtgtgatctcaggtcactgcaacctctgcctcccaggttcaagtgattctcctgcctcagcctcccgagtagctgggattacaggtatgtgccaccacgcccggctaattttgtatttttagtagagatggggtttctccatgttggtcaggctggtcttgaattcctgatctcaggtgatccacccacctcagcctccctaagtgctgggattataggcatgacccaccacacccagcccatgctgtggtttctcatagctcttcctctagtccaggccccctcctgagctctgtgcttacattcctggcagcttcttaaccacctcttcttggggtctcaaagttaacaatcttaagctaaagtctctactttaccattctaaacaatcctccttctgggattcctattaagggctttctaaagcactgatctgactgtatacctcccctctttaatacacacacacacacacacacacacacacacacacacacacacacgcagagatttatatacatatatacatatccagaatgaaatagacaaaaatattaatagttattcttagatgataaaaatacaggtaatttttattttcttcttcttcttcttttttttttttttttttgagatggagtctcactctcttgcccaggctgaagtgcagtggcgggatctcggctcactgcaacctctgcctcctgggttcaagcacttcttctgcttcagccccctgagtagctgggattacaggcacgcaccaccaggcctggatacttttttgtatttttagtagagatggggtttgctatattggccaggctggtctcaaactcctgacctcaggtgatccacctgcctaagcctgccaaagtgctgggattacaggcatgagccaccatgcccagcctctttattctttttaatattatcacaagttatttatttatttatttatttatttatttattttttgagatggagttttgcccttgttgcccaggctggagtgcaatggcacgatctcagctcactgcaacctccacctcccgggttcaagtgattctcctgcctcagcctcctgagtagctgggattacaggcacatgccatcatgcctggctaattttgcatttttagtagagacagagtttctccatgttggtcaggctggtcttgaactcctgacctcaggtgatctgccctcctcggcctcccaaagtgctgggattataggcatgagccaccgtgcccagccattatcacaagttatttatacttcctttctcttgttcttgatcagtctcattagaggtttatcaattttattactcttttcaaagaactatcttttgtttatctggatattttctcttgatttatctccctcttcactaattctctctccagctgtgtctcatctactattcaacctatctactgagttcttaagttatcatatttttcagttctagaatttccatgtggccttcttatagttccaagattcctgccaaattttttttatcttgacttataattccttgaatattttattttttatttttttgagatgggggtctctctgtgtcacccaggctggaatgcagtggcacaatcttagctcactgcaacctccacctcctgggaggctcaagcaatcctcccacctcagtcccccatgtagctgggtctacaggtgccacatctggctaatttttgtacttttaagtagaaacagggttttaccatgttgcccaggctggtttcaaactcctgggttcaagcaatctgcctgcctcggactcccaaaatgctgggattacaagcatgagccaccacacccagcctagaatatttaatttaattaattaatttatttatttattttgagacggagtctcaccgtcacccag

SEQ ID NO: 8845 - DNA, 17915 bp, Homo sapiens
ctcccagacctctggatccccagagcccaggaccctcagtccccaggatccccagaccccaggatcctcaggccccaggactcccaaaccccaagactcccagacctctggatccccataccccagaacccacagacctcagaaccctcacatcctaagacctgcatgaaggggtggcctgcccctccacacctgtgggatatctcatcaggtggaatgagagactgagaaaagaaataagacacagagacagagtatagagaaagaacagtgggcccaggggaccggcgctcagcataccaaggacctgcactggcaccagtctctgagttccctcagtatttattgattactattttcactatctcagcaagaggaatgcatcaagagagcagggtgatagtggggaggaggtcagcaagaaaacatgtgagcaaaggaatccgtgtcacaagttcaagagcaggtactgtgcctggatgtgcacgtaggccagatttatacttctctccacccaaacatctcagccgagtaaagagtaacagagcagcattgctgccaatacgtctcgcctcccgccatagggcggtttttctcctatctcagaattgaacaaatgtacaatcgggttttataccgagacattcagttcccaggggcaggcaggagacagaggccttcctcttagctcaactgcaagaggccttcctcttttactaatcctcctcagcacagacccttcacgggtgtcgggctggggggacgatcagatctttcccatcccacgaggccatgtttcagactatcccatggggagaaatcttggacagtacctgactttccagagcagaggtccctgcggctttctgcagtgcattgtgcccctggttactcgagaatggagaatggcgatgacttttaccaagcacactgcctgcaaacattttattagcaaagcacatcctgcacagccctagatcccttaaaccttgattccatacaacacatatttctgtgagctcgaggttggggctaaagttacagattaacagcatctcagggcaaagcaattgttcagggtatgggtcaaaatgaagttttttatgtcttccttttctacatagacacagtaacagtctgatcgctttttcttttccctacatcccagaccccaggactaccaaactccagggcccccagactgcaggacccccagatcccaagactcccagacctctggatccccagacttcagaaccaccagacccctggacccccagaccccaagactctcagacatctggatccccagacccctatacccccccaccaaacccccatatcccaagacccctagatcccaggacccccaaacctccggatcctcagactttaggacccccagacctcaggacccttagattccaggactctcagacccctggatccccagacctcagagtccccaaatctcaggaccccacagacctcagactccaaggcccccagctcccccagacccacctccaaaactcactatcccagaccccaggcctgcctgtcccccaccacctgcagcctcgggtctggcacttcctcatttctttatttccaagaggcctcagaactgggcgtggaggacgtgcagctgcatgaggctcactgctggctgggctcctccatccctctgctccttataaaagaggccccaagagctcccctgctccctctgctgtctactgaggacacagtgagaagacggtcatctgcaaactaggaagtgaatctgctggtgccttgatcttggacttcccagcttccggaactgttgttcataagctaccccagtttacggcatatttgttatagcagcctgaacaaacatttggagacatctgctctctacccagggctgctcccaccacagggcctttgcacatgctgttcccactcctggatgctgttccccacatcccttcctccttactccctaaggggttccttgatcatcccattgaaaagttgcttctgcggccaggctcagtggctcacgcctgtaatcccaacactctgggaggctgaggagggtggatcacctgaggtcaggaattcgggaccagcctggccaacatggtgaaaccccgtctctactaaaaatacaaaaagttaactgggcatggtcccatgcgcctgtaatcccagctacttgggaggctgaggcaggagaatcgcttgaacccgggaggtggaggttgcagtgagccgagatcgcatcactgcactccagcctgggcaacaagagcaaaactccgtttcaaataaataaataaataaataaataaataaataaataaataaaagtttcccatctcatttcctgcccttatttttctttgcagcattcccaccacctgcacttgatatattttcccgatggattctgcctgttgtctgtttccccaactacagtgagaggtggggggagggggggctgggatttttgtctgttttattcactgctgtgtctgtggttcatagtacctggtatacaacaggaacttcataaaggcttacagaggaaatgaatgagtctttccttataggttcatagagatttataatttcattttcagaactttgtggcatgctaggatggatgaactgaactgttactaatgtaaccaatcctttaagttatttcctttttttttttttccttcttcttgaggcagaggatcactctgcactctgtcaccccaggctggagtgcagtggcacgatttcagctcacttcaacctctgccttccagactcaagcgatcctcctgccttaggttcccgagtagctggaactgtaaggatgtgccaccactcccagctaatttttgtgtgtgtgtatatctatctatatatatatataaaaatttttttttttggtagacatggggtttcaccatattgcccaggctagtcttgaactcctgggctcaagcgatcctcctatcttgacctcccaaagtgctgggattacaggcatgactcactgtgcccggcccattttattttttttcatgtaacaaacaatgctgcaatgaatcactttgagcctggagcatctttttgccttctctctctctctcttttttttttttatatgaagtctcgctctgtcaccaggctggagtgctgtggcgcgatctaggcttactgcaacctccaactccctggttcaagtgattttcctgcctcagcctcccgagtagctgggattacaggtacatgccaccacgcccagctaattttttgtatttttggtagagacagggtttcacagcgttggccaggattgtctcagtctcctgaccttgtgatccgcccacctcagcctcccaaagtgctgggattacaggtgtgagccaccacgcctgactttgccttctcaaaaaaacaaacctgcaacatacacacaacataaaattgaacattttagccaatttatttatttattattattattttgagatggagttttgctcttgttgcccaggctggagtgcagtgccgtgatctcggctcaactgcaaactctacctcccaggctcaagtgattctcctgcctcagcctcccaagtagctgggattacaggcatgcgccaccacacccggctaattttgtgtatttagtagagatggagtttctccacgttggtcaggctagtctcaaactctggacctcaggtgatccgcccacctcagcctcccaaagtgctgggattacaggcatgagccaccgcggccggcccagccatttattttaaattattttttagagatagggtcttgctctgctgcataggctggagtggagtggcacaatcacggctcactgcagtcacaaccttctgggctcaagggatcctcccacctcagcctctgaagtagctgggactacaggctgaagccaccatgcccagctaatttttaaattattattattattattattattattattattgagatggagtctcgctctaacgcccaaactggagtgcagtggcatgatctcagctcactgcaacctctgcctcctgggttcaagcgattctcctgcctcagcctccctagtagctgggattacaggcacgtgccaccatgcccagctaatttttgtatttttagtggagacggggtttcaccatgttggccaggctggtctggtactcctgacctcgtgatccgcccaccttggtcccccaaagtgctgggattacaggcatgagccaccacgtccaggctgagccacatttttttattcgttagtcagttcacactgtaaacatgcaaatattcaggcagggattcccagaagtggacttgctgtgtcagcaggcacatgagtttatcattccggtggcctgtgccagggtgccctccaccagtgctacaccatggacgcaccccacagcctggctggcacagaatgtcattgcattgttggatttttgccaatttgattggtgaagacaaacagtttgtgatttgcagttttcttattaagtgtgaacttttttttttttttgagacaggtctcactctgttgcccaggctggaatgcagtggagtgatcttggctcactgcagcctccacctcctgggttcaaacaattctcctgcctcagcctcctgagtagctgggactacaggcacataccaccacacctggctaatttttgtattttttaaagtagagacggggtttcaccatgatggccaggctggtctcgaactcctgggctcaagcgatctgctcacttcagcctcccaaagtgttgggattacaggtgtaagccactgcacctggcaagaatgagcatctctggacatgttgaaaagcagtttcccgctttttcttcaaggtctccgttcaaagcctttgaccatttcttggagtttggcgatgtgaaggacagaggccgaaaagaggggaaaacgtgggggagtggactcccagcctcccagatcccggagaagcctctgtgcatttgacagctgtggacatggtgtcacacgcagttaaggtggcacagtgagtcgggctggcataggttgtacctggtccacctgacaccaggttcaggtgaggccttctcccagcccacccctcctcagtatcatttttgtcactactacccctccagtctgcctcaggcccccatctgcttctgggacctcagcctcctccccaagttgcccaccccagacaccaggctcactccagagggacttcttgagccagtgcccctctgcccacgcacctgccttggctccacatggacctcttcccccaccaccaattccttctatcctctccactcctaaccatgctatcccagccagctacattttcccaagctgctgggagccctcctcactgtcccctccagcatagaggtgccactgtgcaagaactcagtgggagaggcttggaggagcttggagagccaatgataggtttggggaatcttagtgaactcctactcatgcgttgaagccccaactgtaatgcctcctcctccaggaagccttccaggaccctgtctttccctctggaccttccttaactgcatgggactaggagtgtctatgtccagctctgtcctctcttaagatagctccttgaggacctggtcagggctgaggcctcttgggggcccagcgtgggtgatgcttgttgaatgaataaatgactgcatgagctgggaaccagccaagctgagatcaagaagcgagttgatgaggtggcagtcggttggggtgctaatagaggacatgaagtcactgggttctagcaagagggaagcgggactctggtccacccctccctcttgccctccatccacctctggtgagaaccttgaggccctgcaagggggcggatctctgtcttcattcttcccctctgcactccacccagacaccagttcctcttccccctgagtcgctgggtgcagagccagaggaacgccagcgaccccagcagcgctgcggacggtgctggccgtggccgctgcggcccccgtgtccaggtgggccaggacgcagcctctgggcgccgtcgcttttccagcatcgcagaggcaaaagcgtggcagtgggacccaaaaggtaggactgaggctctagaacttgcacctgtgcagggactgcaaaccagacctgggaggaccctttcagcagcccccactccaccctatcccaggacttcccagcgacccgccgttctgggagataccgggagcgtgatcagggggcggggccgtttccaaggcaaccgcttatttgcatagggtcccgtcctggccaacgagggcgccccaaatgttcaggacatagaagaaggggttaactggcccggatctcctcctcgccttccaagcccgctaagcactggggttatctacccattccccagaaggggagactgaggcagcccaccagccaaaggaggcgaccagactggggctgcgttttaccatttcagaagcggcttgagctggtctgagctataataataaacactggcggtggaggcgagggcgaccacagggctgaggtcagggctaggattccggtgtctctacgtaggttgcttgaatggggggcaccctggcatggacgctgctgttgccgctgctgctgcgggagtcagacagcctagaaccgtcgtgcaccgtgtcctccgcggatgtggactggaacgcrgagttcagtgccacgtgcctgaatttcagtggcctcagcctgagcctgcctcacaaccagtctctgcgggccagcaacgtgattctccttgacctgtctgggaacggcctgcgagagcttccagtgaccttctttgcccacctgcagaagcttgaggtcctgaacgtgctacgcaaccccttgtctcgtgtggatggggcgctggccgcccgctgtgaccttgacctgcaggccgactgcaactgtgccctggagtcctggcacgacatccgccgagacaactgctctggccagaagcctctgctctgctgggacacaaccagctcccagcacaacctctctgccttcctggaggtcagctgcgcccctggcctggcctctgcaactatcggggcagtggtggtcagcgggtgcctgcttcttggacttgccatcgctggccctgtgctggcctggagactctggcgatgccgagtggccagaagccsggagctgaacaaaccctgggctgctcaggatgggcccaagcccggtttaggcttgcagccacggtacggcagccggagcgcccccaagccccaagtggccgtgmcatcctgcccctccactcccgactatgagaacatgtttgtgggccagccagcagccgagcaccagtgggatgaacaagggtaagtaagccactgagacacctgccaaagtggtgaataataaggctccacacccagatggccgaggttcaaatcccagctctgccgcttgaaggctgtgggatcttaggtgagtagctttacttctctgagcctcagtctcctcacctataaaatggggagaggactggacatggtggctcacacctgtaatcctagcactttgggaggccaaggcaggcggatcacttgaagtcaggagtttgagaccagcctggccaacacggtgaaacccagtctgtactaaaaatacaaaaattagccaggtgtggtggcgggcgcctgtggttccagctactgaggaggctgaggcaagagaatctcttgaacctgggagtcagaggttgcagtgagccaagttcatgccattgcactccagcctgggtgacagagtgagactccatctcaaaaataaaatcaataaaataaagtaaaatgagggagaattacagcccccatcatagtgtgttggggtaagaattaagtgagttcccatatatgggacaaacttcccccccttatgacctgtaaacccagtttctggcggccaaggatggggagacaggaggcaactgcttgagcggagttggggctccgcggtggcggtcagcagcataggcccaggtcccatgtgacccaaggctgtctctgaacctccatttctgtctccatagagtggggacagccccccatttccccatgacacacatgagatactaaagaggtgccctacaaagtcccatcaccactagatgatttttttttttttttttttgagatggagtctggccctgtcatccaggctagagtgtagtgacacgatctcggctcactgccagctccgcctcccgggttcatgccattctcctgcctcagcctcccgagtagctgggactacaggcgcccgccaccacgccaggctaattttttgtatttttagtagagacggggtttcaccgtgttagccaggatggtctcgatctcctgacctcgtgatccgcccacctcagcctccttaagtgctgggattacaggtgtgagccaccgcgcccagccgacatttttttttgagacagtgtcattctgtcgccctggctggagtgcagtggcaccatcacagatcactgcagcctcaagctcctggcctcaagtgatcctcctgcctcagtctccagagtagttgggaccacaggcacatgccgccgcacccaactaatttttgtatttttcatagagacgggggtcttgctatatttctcaggctggtctcaaactcttggcctcaagtgatcctcatgtcttagcctcccaaagtgctggcattatgggtgtgagccaccgccaccggcttctggatgattttgctgggcttagacaaatgagttgaacttttctaggttggtgtggggtgcggtggctcatgcctataatcccagcacttttcgaggccaaggcgaggtcagatcacctgtggtcaggacctcaagaccagcctgaccaacatggtggaaccctgtttctactaaaaaatacaaaaattaggccgggcacggtggctcatgcctgtaatcccaacactttgggaggccaaggcaggaggatcacgaggtcaggagttcgagaccagcctggccaatatggtgaaaccctgtctctactaaaaatacaaaaattagccgggcatggtcgtgggtgcctgtaatcccagctacttgggaggctgaggcaagaagaatcacttgaacccaggaggtggaggttgcagtgagcccagatcgcaccactgcaccccagcctgggcgacagagcgagactccgtctcaaaaaaaaaaaaaaagaaagaaagaaagaaaaaaagaaaagaaaagcttttctaggttggaaaagggaatggagggaatttcaaggggtgggaccctcaggggcagagacccagaggtgggaaagaacagagaatttgctgtgaatggtttttgagaagggatgacttgaaagctgaggcctgaggggaacagggagggccaagcaggaaggggccgcggccatggctgtgtttgggcagcagagtccgtgccaggaggtggggaggctatcggaaggctgttggtgagaaaggagaaaatatgcaaagcagatgtcaacatggctcaaaagcagaaatggtctgaggcagggtgttgaagacactggactcgcaaaagcagcttgtgctctgatgttcatcttggcctccctgtccccgaggcttccggatcagcctcctttatgtactggcctccagaaacactgtgtttagaattgactgtgtcatttccaccctgcatcttacagttacagacatggaggctctgggaggcagggaaatgacttgtccaaggtcacatagccagtcaaaaaaggcaggacacaaaccctgcgtcccagacctgttcgtccccctacaaccacttaggggttggtgggcaattcgtactagagtataattgactgatagatgctgttaacacaaagtagcccttttgcctttttttttttcccgctctgtcgcccaggctagagtgcaatggcatgatctcggctcactgcaaccttcacctcccgggttcaagtgattctcctgcctcctgcctcagcctcccgagtagctgggattacaggcgcccaccatcacacccggctaattttagtagagacggggttttgccatgttggccaggctggtcttgaactcctgacctcaggtgatctgcccaccttggcctctcaaagtgctgggattataggcgtgagccaccgcacctggcccagtggccctttttacaagaggagctgggttggaattagaatgttcaggaggcaggaaaattctctggaggtcttgctgaccataacaaatattcctaagtagctacctgctccttgaccaattctatagatgcagaaactgaggctcagagacttgcttttatatatgagggccacaaagtcagttgcttcagtggtgaaaacatttcccatcggaaggagcacagagtgtgggtgcagccacttgtgtgcatgtgactgacgtggccagagcttccgatttttcaagaggaaacaaaaatttagattttaatgtaataatgaacagctacctcaatttctgttttttttgagacggggtctccctctgtcatccaggctgcagtgcagtggtgtgataacggctcactgtaggctcgacctcctgggctcaagcggtcctcccacctcagcctcccgaggagatgggactccaggcacacgtcaccacgcctgaataattttttaattttttgtagagatggggtctcaccctgttgctcaggatggtctcaaactcctggcctcaagcagaccttctgccttggcctcccaaagtgctgggattacaggcatgagtcaccgcgcctggccgctatctcatttttaaggaaggaaaaagggttcagggtcctcagaccgcagcgttacacccacagaaccttccctaaatcactgccctcccgcagcctcctcagagagaggtggggttggctaggagtcagaacgctagcccgtgccagtttccccatatgtaaatattcggggtggactgagccactctgaagctttctttttttttttccttctgagatagagtcttgctctgtctcccaggctgaagtgcaatggcacgatctcggctcactacaacctctacctcctgggttcaagtgattctcctgcctcagactcccgagtagctgggactacaggcctgtgccaccatgcctggataatttttgtatttttagtagagacgaggtttcatcatgttgtccaggctggtcttgaactcmtgatctcaggtgatccacccacctcagcctcccaaagtgctggattacaggcgtgagtcagagcacctggcccrctctggactttctcaaagctcatgtgcctgtcccctgagtcctccccstcccacacttacccctggtctgtctgtccccccagggctcacccttcagaggacaatgacttttacatcaactacaaggacatcgacctggcttcccagcctgtctactrtaacctgcagtcactgggccaggccycaatggatgaagaggagtacgtgatccccgggcactgagcctaagatgtcctaacctccacccagaaccccttcagtccctgctgggtgactcagggcgtcctaackcctccatggcctcagtttccccatctgaagaatgggkacaggaaaggattgtccttgaggccccaggaagctctgccgccccctccctgtccctcatgccgctcctcagctccctcagctcctagagggggaagaggagagacccccaacaaggggacaggasggtcactgtgccaatcctgtcatcaccctcctgtggatgtacaggcagtgctcaataaatgcttcgaggctgatgaggctgctggctcagggtgcgtgggttcctcaaggtggggatttctgagttctaagaccaagtctccatctgagactcccaaattgctccccacctcccatccctgtttttttttgttgttgttgtttgtttgtttgtttttgaaactgagtgtcactctgtcacccaggctggagtgcaatgctgcggtctcagctcactgcaacctccgcctcctgggttcaagtgattctcctgcctcagcctcctgagtagctgggattacagcacccgccaccatgccgagctaatttttgtatttataatagagatggggtttcgccatgttggccaggctggtctcgaactcctgacctcaagcgatctgcccgcctcggcctcctgaagtgctgggattacaggcgtggccactgcgcccaggcacattcctcccttctgcccctctcagggccccttcccaggtccctgatctccaggcttggcctccagagcagcccacaccacccccaaaataaaaaaatgtatatattcctttagctctaatattctgagaaaatctttcaagaccctggtgcaatgccacctcctttgagaagctgtccctggtttcttctcaggcagagttaatgactcacagatgtctgtatttcaagagttttttcaggctcatgcctcaactgggtttcctatcagctggtcccagcccaatcctccaacctgggggagatagaactagagacaagtaccctcagtcctgggagatcaagcctgggccaaagggaagaatgggagcacagtccccacatggagacaattgaatgagtttgaataaggctgcatgtaagaggggaatctgcagtgggttttgaaggatgcataggagtttgagaattggagaggaaagggcatgctggctgggtggaccaacttgtgcaagagcctggagaagcacagagaaggcacaggcccagccctataccttgcaaaggcaacagctgttgtttggggaaagactcagtgacaccatctgctgccttttggtattgagtttaattttgaagcctcctaggtgcccattttcaacagctttgctgtgactgaagtgagcctgctcccatctcagggcctttgcacttgctgtttgcatttacttgcaatgtccaccctcaactaccccctccccgactccttttcttcctccaggtctcagctcaaatgtgacctccctccccagggaggcctccccatccaactatctagatcacctctgcctccgttcactaatgaactgatgggttgaatccccagcacaaatcttactgcaatcaactactttcttaggatttactcatttgtccccttcactcaaccaggctccgcaaagtggggtggtccttgtgtgtctttttacagctgtgtccggggcctggcataaagtgggcactcactgaatacgttaaggggaacctgcagtcattcaggttggcctgtgggtgatggcattcccagcagatacacctcactgctggaagtgggtactctgtccctcaagacacccatcgccattcctctcagagattcaggatgggcaggcagtttggtgtggagagggggctggactcagcacacctcaaaattccaacatcctaaacaggaagtatatataacctgggagatgtggtgtgcatgaaaatattcttcacaacttatttgtttctccctactctttatatgtgaaagaatgaggtgtcactaacatggaagtgccacaaacaggaggggtgatgggactaacccctcaggttggggacagtaccacaaaacaaggcacttggttgcagatagacttggctctgagctgcctgtgtttggaaaggtgactcccaagtggggagagcaacaggatggtgatagagacaaagacagagacagatcctctgcctcagaccccaaagagagaagttttgaggaatgaggaaagatggagggaagctgagacttaaaaaggtatggggtctcagctgtttccaaaacagaaacaccagcctgggcaacatggcgaaactcagcctctacaaaaaatacaaaagttagttgggcatgatggcatgcacttgtagtcccagctactcaggtggctgaggtgggaggatcgattgagcccgggtggttgaggctgcagtgagctgtgattgtgccactgcacttcggcctgggcaacagagtgagaccccgtctaaaaaaaataaaaagaaaaaagaaacagcaataaggagatagagaaatagagacagagagtcagggagtcaggaatggccaaggctgcccttagagcccacaggtgtcgtaagcaccttccaatggcttggcatctccgagaacaccttgccactcattccttgagcctttccacttaccccctcccaggtctcctagagaaactgaggtcagggagaggaggatcttctcaaggtcaccttcccttatcctggacaccacagggaacagttcagacagctttatttttatcaccagagttttaaataaatacacagttccatcagaccagcccccgagtccccaagaaggtcaccccaataaattaataataaataacagacttatataaatacagctgtttgggcaggaatcgggtgtctcaggaaccttgagcccattccacagggcaggacaactgaggtcgcgtcccccgcgcaggtgcacagtggaaggaccaggactgctcatatgcagtggcagtctttggctaacaagtcatcataggtctggagcgacaccccggtgtcggtcttttgaatgagcaccatgggattgtagctggcgggcacgcagcagggcgctggcaccgtgtcgggcttcaggcggtgcaggctcgtcttgatctgcgcgtgcatgtttgccgcccggaactggctcgggcacgcgccgatgcacatggtcacttgcacctcccgtggcgacagcacccaatcggcccagcccaggtcttccagcgacgcgcggaccgtgtgcagacggcagcaacgcccgggcccgagcggacagtggtccccgttgcgcgcacgcgctctgcggcgccccctggcggcttgcggccgcaagtgcaactccagctggggccgtgcggacgaagattctgccagcagttggtccgactgcgacggcggcggcgacagtcgcaggtgcagcgcgggcgcctggggtcttgcaaggctgagctgacgccgcagcggtcgtgtcacgtcccacgaccttgacgccgtcggggacagccggaacagagcccggtgaaggcgggaggcctcggggagcccctcgggaagggcggcccgagagatacgcaggtgcaggtggccgccggatcccagccgcactgtgggaagacagatagggaagctggtcacccacaggcctaccgttttccaggaacgagggtgcccatttcccctaacacgccaagctggatctcaccacggcggcggcgcctttgcacaagttatttcccctaccaagagcatttctccgtgcgggcgcggtggctcacgcctgtaatcccagcactttgggaggccgatgcaggtggatcacttgaggtcaggagttcaagaccagcctggccgatatgtggccaatatggtgaaacgcccgcttctactaaaaataccaaaaattagctgggcatggtggctggcgcctgtgatcccagctactcgggaggctgaggcagaagaatggcttgaatcggggcggtggaggttgcagtgagccaagatcgtgccactgcactccagcctgggcaacagaggaagactccctctcaaaaaaaaaaaaaaaaaaaaaaaaaagggcatttctccccttgaatctcctgaatctcagtatggctggctcctcctcttccttccagcctgcctaaaataggaagcaccctattttatttccttgtgtatcattcatattccctacttagaatcttagcttggttgacactgtgcctggcacacaataggtgcttagtaaatacttgaaggaattaatgtatatctgatattcaggcagcctgagattccaaccatggctctgcttttcttctggcagtcaaaaacttacttgcttcacttatttatttatttattatggtcttgctgttacccaggctggagtgcagtggggcactcatggctcagtgcagcctcaatctcctggattcaagtgctcctcccgcctcagcctcctgaataactgagactacaggcacacaccatcatgtctggctaattttttttaaacatttttggtagagatggattctcgctatactgcccaggctgcaatgttctggcctaaagcgatgctcccaccttggcctcctaaagtgctgggattacaggtgtaatcccgagaaatgaagagtgccaaacccatcacattccagactactgagcctctaggaatcacagcccctcaggctggtacaagtgttagggagactggggagactggggtttgagggtgccttaacctagttgctaggcttagcaagggtgagaggtttgccggagtcacacggcacagatgggtttagggcgggctaagagtgtgcccctctgcctgccccctcctgggtcccaccacagcccagacctcatccagtgccctgcacccctggagcctccatggagggcacagagatggggaaaatactctcctcctcccctaacaagtcgctcgttgcatgtgactttagcagtgccttgacaagcgatttcatcagattcagaaccagctccagctggctctgcccatcacaaacttctatccatgcaccacacccccattgtttctcttggatcctggccccagcccaggtcagggaccatgcccacaccgcacgcccgaccccgtccccgggtttcccaggtgctgtgcacattcaggagggtccctggcatccctgtacctcagtttccccatttgcaacttggggacaggttataacctcccacgttgtgggtgcaaatcaggcatcggctaccccatcagacccaaggggatccaggatattcctacccagggcacagatggggcaactgaggctcaaaggtaggtctgggcttttcaagatgaggaatccctgattagatatgggggctgcttggggggtgggaggggatctctaagatttcacttaccttctggcgtgagtatccggactgcaggggccgggacgaggtcggtgttcgaatcttcccagctctggttggcccgcagcctggttagcaggtcctcgtagcgtttccgcaactctcggaatctggagtcttcggagtgcaactctgagggtcccgggaaacttgcgcggctcgcctcggccagagacagggcgcccccatgcggcagccacgagagcaccagcaacaccaggagcatctgagagccattcaccgtcctgagttcttgcccgggcatggctgtgcaggttgcggctctgagctgggactgaccagatgctgccggaccggcctttatagtccccggactttgtccgtctccgcctgctcagtcccgccctcctccccctgcctgcagagtaaacactccaatgaccacagctgggcggggtctgggggtgtatttagggggaggatctttaggtgggggcgctcctagtaaagctagggcacatttctgggcctcagtatcctcttcctcgatatgaggacaccattccagcctgggagtctttttggaggaaaaaaagacattgttactatgtgaaaaattccagacaagagtttaagaggtggctgtctatgcccatgggatttcctctcttctctttttggttggggtcaaaggctaaagatggtgaaaaacaaaggaagcagaggagaacgggctagatggagccaggaagggcaaccttgatgtgtcatgcctctctgccatgcct

SEQ ID NO: 8846 - DNA, 13487 bp, Homo sapiens
ttataattcaagatgagatttgggtagggacacagagccaaaccgtatgagatggggtcttgctatgttgaccagtctggtcttgaactcctaggctcaagcaatcctcctgcctcagcctcccaaaatgctggaattacagatgtgagccaccgtacctggcatccagcagatatttctactgcatttctccaggaatgagtgggttggagatgaggagattctggaacttctgtcatttcctcccaacaattctgggactcatgttcactctcctgggataggggaaactgacttaaagtgattttcaaatggcattcctgttgaaagagttaatatatgtacatgcatacaacatacacacacatttgtgtatgctacataccatggaggaaagccagtcctggtataaattgtataacttcaaaataataatggaattatgatttcattttaatactgatttcaattaaaaattttaatagactattttttagaggttttaagtttacagaaaatctaggtagacaacacagaaaattcccattaacccctgtattagtctgctaggacttccataacaaaatactacaggctgagtagcttaaacaacagaaatttgttttcccacagttctggaggctagaagaccaaggtgcccacaagtctggtttctggtgatgcctatttaccttacttgcagatggctgccttctccctgtgtcctcacatggcctttcctctgagcacctggaggcaagagagtgagctctggtgtgtattcctctacctaggagacaccagtcctattgaattagggcctcagccttacgatctcatttaaccctcattgcctccctttaggtgactaggtgtgagggtggagccctcaagagactgccttctctccatctgctgtttgtagtgggaggatacctccagagaggctgctgctcattgagctgcactcacatgaggatacagactttgtgaagaaggaattggcaacactgaaacctccagaacaaaggctgtcactaaggtatgtgctacaagcatccttggggaagaagggcatgagtaggcaggggcatttttatatctttagaggataggcaaagggaagaccaaaatttcagaggtctagcacaagaagtaaaatttttttttaaatctttgcatttcctcagagcccacaaacatgcatgtgtcttagtggctgcccatgctctggctgaggagagcaaaccgtgccatattctctgcaggcctttaggagagagtgaaaactcctacaagagtgggaaggtagataagagaagatcctttataataccaggcatctgggaagatctgtccttgtgctgggtacagggcttctatcaggtaactgaaggacacctgggtgctgttcttaaggaaagaagccagcgagcaaactttcatatgactaaagaagttgctggtgggtgcctgtagtcccagctactcaagagcctggggcagaaggattgcttgcgcccagaagtcagggctttgtgtgagatcacacctgcgtataactactgtactccagcttgggcaacatagtgagaccctgtctctaaaaaaataaataaattgcttgcttgcttgcttgtgctttcaaatcatagaaaagtagcagagtggagaggggtgtctgaatgtaaagcaaacaaatgccttggaaaaatatgtctggattgaaattgcattgaatgtatatatcaatttgagaagaattgtcaagttttataatttttatgtaactgaattgcatttttattagttttattcctagtaatgctagtaattttcattgctagtataattgggatcatttttctattgcatttataaagttattttttttctggtgcttaggaaagcaattaaaagaataaactgatgaatatcatgcagatatatctctaaaacaataagcaaaatacaaagggaaaaacaatatatcatttatgtaagttaaaacaatatatcatttatgtaagttaaaacacacaaaaatatatattgtttatggatatatataaatatgtaaaagtacagggggaaattgtttggaatgatacataccaaattggttttagttgttgtttctgttatggggataagttgtgtagttaaagggaacattagcttcatctctattgcatcagaaataaaaaaagaaagagggatggaaggaagagagggaatgagggagggagaaaagaagggagaaaaaaagaaggaaggaaggaaaaaaaaataacccaaagcattgtgagaatatgttagcagctgctaattctaggtgatggaactatgggtatttacattttctttgtaagttttggcttttctcatctcagctgactccctttggtttacataacaaaatacaatagactgagtggcttaaacaacagaaagtgttgtttaacatacttctaaaggctggaagtccaagaccaagctgccaatgcagttgatttctggtgaggcttctctacctggcttgctgatttcagccttcttgctgtgtcctcacatggtctttactccatgcacaaggggagcaaaatttcttgtgtctctttctcttctgttaaggacactagttctatcagattagggccctgccttttttggttttgtttctgttttcttttttttgagacagagtctcactctgtcacccaggctggagtacagtggcttgatctcgactcattgcaacccctgcttcctgggttcaagaaattgtcgtgcctcagcctcccgaggtagcttggattacaggcatgtggcaccatgcctggctaatttttgtaattttagtagagacggggttttgcactgttggccaggcttgtctcgaactcctggcctcaagcaatccgcctaccttggcctcccaaagtgctgggattacaggtgtgagtcactgtgagagccagggccctgcctttataacctcatttaaccttttttttttttttttaattttaatttttttttttttttttgagacagaatctcactctgtcgcccaggatggagtgcagtggtgtgatctcggctcacagcaacctccacctcttcggttcaagtgattcttctgcctcagcctcctgagtagctaggattacaggcatgcacccgccatgcccggctaatttttgtatttttagtagagacggggtttcgccatgttggcaaggctggtcttgaacccctgacctcaggtgatctgcccaccttggcctcccaaagtgctaggattacaggcatgagccacagctcccggtctatcatttaaccttaattacatctttaaaggcccaaatagtctcacccactccaaatagtcacacccacaccggaggttgagcacttcaacacatgaatttggggaggacacagttcagtccataacatccccctaatttttaaaaaataaaaatgtttttaaggagtgaatgtcttttatgtgtctctgtgaccaggtcccgctgccttgatggattatacacttgacctcagtgtgacaacagtgaccgactactactaccctgatatcttctcaagcccctgtgatgcggaacttattcagacaaatggcaagttgctccttgctgtcttttattgcctcctgtttgtattcagtcttctgggaaacagcctggtcatcctggtccttgtggtctgcaagaagctgaggagcatcacagatgtatacctcttgaacctggccctgtctgacctgctttttgtcttctccttcccctttcagacctactatctgctggaccagtgggtgtttgggactgtaatgtgcaaagtggtgtctggcttttattacattggcttctacagcagcatgtttttcatcaccctcatgagtgtggacaggtacctggctgttgtccatgccgtgtatgccctaaaggtgaggacgatcaggatgggcacaacgctgtgcctggcagtatggctaaccgccattatggctaccatcccattgctagtgttttaccaagtggcctctgaagatggtgttctacagtgttattcattttacaatcaacagactttgaagtggaagatcttcaccaacttcaaaatgaacattttaggcttgttgatcccattcaccatctttatgttctgctacattaaaatcctgcaccagctgaagaggtgtcaaaaccacaacaagaccaaggccatcaggttggtgctcattgtggtcattgcatctttacttttctgggtcccattcaacgtggttcttttcctcacttccttgcacagtatgcacatcttggatggatgtagcataagccaacagctgacttatgccacccatgtcacagaaatcatttcctttactcactgctgtgtgaaccctgttatctatgcttttgttggggagaagttcaagaaacacctctcagaaatatttcagaaaagttgcagccaaatcttcaactacctaggaagacaaatgcctagggagagctgtgaaaagtcatcatcctgccagcagcactcctcccgttcctccagcgtagactacattttgtgaggatcaatgaagactaaatataaaaaacattttcttgaatggcatgctagtagcagtgagcaaaggtgtgggtgtgaaaggtttccaaaaaaagttcagcatgaaggatgccatatatgttgttgccaacacttggaacacaatgactaaagacatagttgtgcatgcctggcacaacatcaagcctgtgattgtgtttattgatgatgttgaacaagtggtaactttaaaggattctgtatgccaagtgaaaaaaaaagatgtctgacctccttacatatgcaaaaatataccttcagagactgtcagtaggctggaagaagtggatattgaagttttgacatcaatgatgaggctccagttgtctattcattgactgatggtgaaatggctggagtgattctgaatcaaggtgattgtgattatagtgacaatgaagatgatgctattaatactgcataaaaagtgcctgtagatgacatggtgaaaatatttgacaggcttatggaaggactacagcagcacgcattcataacagaacaagaaattatgtcagcttataaaatcaaacagagacttctagacaaaaaccattgttgatgaggcagatgcctctagaagagacgtttaaaagccatcaaacacaatgcctcatcttccctggaggacccacttcctgatccctcaactgtgtctgatgtttcttctcatgtaagaaataaaaaataaaaataaaaaaaaatatattggtatgtaactacaggaaaaaaataaaaaatatatagtggacagtaacctttcaatcaaaactcagtatcataagtagagactgaaaacttgccgttattgattgttgttattaacagctgatacaggtattctgctgatgctactgctgcctagttaccatgaacacgttttttcactattaatggtgcgtcatattttttacttttaagtacttacgtgtgagtaagtgtaagaaaatgattgcttatcagtagtatcaatgatttactcaatatctgaatcaccttgattcagaaccatttcagctgtttcaccatcagtcaatgaataacagcctcattgatgtcaaaaacttcaatatccacttctttcagcctactgtagactctggaagtatactttttgcatatgtaaggaagtcagacttttttttttcacttgacatacagaatccttcaaagttacccctagttcaacatcatcagtagacaaaatcacggggcagaggttgtgccaggcatgcacaactatgtctttagtcgttgtgttccaagtgttggcaacaagatatatggcatatttcagataagttcagagtcaggaaagatgatggtgccaaacaaccacaagctgggcacggtagctcacccctgtaatcccagcactttgggagactgaggcgggcagatcacttgaggtcaggagttcaagaccagcctggccaatatggtgaaattccatctctactaaaaatacaaaaattaacctttctgcctgtaaatgccattgaagaagcaccgttagattctctcttctcactgccgtcctgtctaagtcagagtctyctaaaaagcctgaacagctgaggaagctcttcattggagtgttgacctttgaaacaactgatgagagcctgaggagccattttgagcaatggggaacgctcacgaactgcatgggtaatgagagatccaaacaccaagcgctccaggggctttgggtttgtgacatatgccactgtggaggaggtggatgcagccatgaatgcaaggccatgcaaggtggatggaagaactgtggaaccaaagagagacatctcaagagaagattctcgaagaccaggtgctcacttaactgtgaaaaagatatttgttggtggcgttaaagaagacactgaagaacatcacctaaaagattattttgaacagtaagggaaaattgaagtgattgaaatcatgactgactgaggcagtggcaaaaaaaagggctttgcctttgtaacctttgacaaccatgactccgtggataagactgtcattcagaaataccgtactgtgagtggccacaactgtgaagctaggaaagctctgtgaaagcaagagatggctcgtgcttcaaccagccaaagaggtcgaagtggttctggaaactttggtggtggtcgtggaggtggttttgatgggaatgacaactttggtggtggaggaaacttcagtggtcgtggtggctttggtggcagccatggtggtggtggatatggtggcaggggggatggctataatggatgtggtaatgatggaagcagttttggaggtggtggaagctacaatgattttgtcaattacaacaatcagtcttcacattttgggcccatgaagggaggaaactttggaggcagaagctctggtccctatggtggcggaggccaatactttaccaaaccatgaaaccaaggtggctatggcagttccagtagcagcagtagctatagcagtggcagaagattttaattaggaaacaaagcttagcaggagaggagagccagagaagtgacagggaagctacaggttacaacagatttgtgaactcaacaaagcatagtggtggcagggcttagctgctacaaagaagacatgttttagacaaatacttatgtgtatgagcaaaaatcttgaggactgtatttgtgactaattgtataacggttattttagtttctgttctgtggaaagtgtaaagcattccaacaaagggtcttaatgtagattttttttttttgcacccatgctgttgattgctaaatgtaatagtctgatcatgatgctgaataaatgtcttttcttttctaatgtgctgtgtaaggttagtctactctgaagccgtcttggtaaatttcccccagcagtgtgaagttagaattctttcaggctgatgcaaggttctatttggaatttatatacaaactgcttgggtggagaagacattgtcttcagaaaccttggtgtagttgaactgatggttattgttgtgacctgaagttcaccactgaaagagattacccaagcaaaatcatgtaattattggttataaatatgattgttggcacatcctatgcaatatatctaaattgaataatggcaccaggtaaaattatagatgggaatgaagcttgtgtatcatccattatcatgtgtaattaataaatgatttaattgtcttaaaaaataaaaatacaaaaattagccaggtgtggtggcttgtgcctatagtcctggctacttgggaggctgaggcaggagaatcacttaaacctgggaggcagaggttgccctgagcagagatcacgcccctgctcttcagcttgggcaacagaatgagactcagtctcaataaataagttaaattaaatttataaaactactgtgatggttaatacggagtgtcaacttgattggattgaaggacacaaagtatcgatcctgggtgtgtctgtgagggtgttgccaaaagatattaacatttgagtcagtgggctgggaaaggcagacccacccttaacctgggtgggcaccatctaacagctgccagcatggctagaatataagcaggcagaaaaatgtgaaaagagagactggcctagcctcccaaactacatctttcttccgtgctggatgcctcctgcccttgaacatcagactcaagttcttcagttttggaactcagactggctctccttgctcctcagcctgcagatggcctactgtgggaccttgggatcatgtgagttaatacttaataaactcatatatatatatatatatatatatatatatatatatatatatattccattagttctgtccctctagaaaaccctgactaatacaactaccttcaggctatgtgtataaggtatatataaaacataaatgaattctgtgtttagacctgggtcccaaccccaaaatatctcattatgtatacacaaatattccaaaatctaaaaaacaaaacaaaacgaaacaaaacaaaaaaccaaaatctgaaacacttctgatcccaagcatttaggataagggatattcaacctgtaagttaaaatatttaactatgattggaagtttgtctatttttcattttaattatgtaaatttttgcagtatatatcttgaagctacgttattaggtgaatgcataaatagtattgttatgactttttattgaattgactcttttagcattatgaaatgcctctttctctccagtaatacttcttgtcttagtatctactatgcttagcattaatatagccacactggtttttcttttgattagtgtatatgttgtgtatttccatgttctttcactttaaaccaaacaactctcctatatttaaatattataatatattatatattaatattatattattatattttaatgttatttaaatattcttttgtaagcagaatttagtttgggctcttcttttctcacagagagagagaggattttattgccacaaagacaaaatcatttttaggtaaaatattctgtgggattccattatagagcatacaaagggttgatttcagatttcaaaataatttttatcttttattttctggtttaacaatgtaatttcaattacagaggacacactcttcaaggctaatggccttgaatccaatcattttgagaaaacatccaaatggctttttcttaaaatgttttaatatgtgcttatgatatttataccatccctcaaaaaagtgtaggcttctgaaaaacataaaaagttctcttttttcttctgctctagacataaattcacttaattctgaatattctgtgagctccattattatgttgagatcagcaataacaaaagacaaattcctcattcttaatttccagaatctgaaatacaagttgaaatctaaccccgtggcaatttcctgataatctgtgtttttgtacaacctttgtactcttttctgtcatctcagtggttaaggcctctgttttcttggaatacagtctgtatcagcaattccacattcatggattcaaccaaccactgaaaatattttttgtattttttattttttttaaaaatacaaagtcaaaaatatagtataatgactacttacatagcaaataccttgtattaggtaatgtaggtaatctagagataatttaaagtataaaggagtatgtgaaaatattaagccattttatattagagacttgaacatcctcctgtacttccgggggttctagaaccaattccccatggataccaagaagactgtaatttcttacattgatgtcggtaagcatacttagaaatggaagttctgattctaaatgtctaaggttacttcctagatcttttgaaggctgccatccttcagaaattggtatatttcttgaaatttttggactctggaggtctcttctcagggtgtaagtagctctgctatgggcatcttcccaagcacatcaagccagggtgcactcctattgaaccagctcttgagcttggtgggggaggtgggagagcaagaagggactccatgacccagcatatagaatttcacattcacataatattccaggggtattatgtccctgcacacattgccataactatctctaagcagtgcctacacttggagagagtttgttcattttaagcagaagccaaagagtaccaccttttgtatttttatttatttatttttaattgttttattttatttcattttttttgagacagggtctcattctgtcacctaccctggagagcagtggcaccatctcagctcaccccagcctcaacctcctaggctcaagtgatccgcccatctcagcctccagagtggctgggactacagccaagttccacaacacccagctaattattgtatttttgtagagacagagtctcctcatgttgcccaggctggtctcaaactcctgggctcaagtgatctgcacaccttggcctcccaaagtgctgggattacaagtgtgagccaccatgcctaggtgtcttgtatttttaaaatccagtataacaatctttgcctcttaattgtactgtttagtgcatttacatttaataaaattatataaagcaacagcacaaagaggggataaatggaggtgtaaacagagttaaacatttttatggttcttacattacttgacaaatatttaaatcctaacttaagattaatcacaataggttagagatgagtattgaaatttctaggataaccagtaaaaaaaaagtacaagtacatataaatacaaactaatggaagaaaaagaaattagaatgatagttgactaatataaaacaagccaaaaacaaaaacaaaacaaaacaaaacaaaacaaaacaaaaaaccaggaaatggggatagcaaatagaaaacaaaaagcaagatggtagaattaaactcaaccatatcagtaacaggtatcaacccaaagctctcatatcattgagttgctaggccaatcctgaaacctcctactgttagaatcctttgttttagatgaaggtaaaacttacataaaacttaccagttaatcattttaaagtgtatagttcaggagcttttagtacattcacaatgttgtgcagatatcaccactatctagttccagaacttcttcatcaccccaaatggaaatccattaagtggtcacactctattccttctccctccatcccactccaagcactaatctgctttctgtctctatggatttgactattctggatatttcatataaatggaatcatacaatatgggacctctagtgtctagctcttttcgtttagtcaaatgacactttttttgtgagcaaactgaaccttgacttttaactttggtagtaccaaatgaggtatgttggactaaccattctattgtggagagagaaaaagctggacaaaaattaaaaatatgtatgtatccaattacttgaaagttaatggataattataaaatcttggaaaagacataaatccagcatttgggtctgtttttcccctggagatattgccaatttcagacaaagcttctgcaagcctgagaatctcagtagcatttttgactgactcacaggggtaggagattaaaattggacctcagtactttccaaaaatggatgctggcaaatctcttctgtcttaggatgggtcccttagagctataccttaagattagtgtaaatcagacatagggcagcccttgaaggaactggcacctgacttccagttttctcaatccttagaaattggtttgaggcaatctcaggttgctatcattcccccaggaaccagacagaatcaaatattaatcctctctagaggaagataataccattctatttgtcaatcattactacagttttctgattatttttgaaaaatttattgtgtttttggcacatgataaaaatagccaggcacatgaagagacatgacaccatacacaagaaagaccagaggcaaaaaacagaaggggcagaactacaggagcaacagatacagaagggtcaagattaggctttaaaaacaactatgctaaggagaaatgaactggccaagttggaaatgaaggctctcaaaattttcatgctcagtagttggatcacacctgtgaatagccactcattacactctagcctaggcaacatagcaagctcctgtctcaaaacaaacaaacctttgggaggctgaggcaggtggatcaacgaggtcaggagatcgagaccatcctggccaacatggtgaaaccccgtctttactaaaaatacaaaaaattagccaggtgtggtggcacgcacctgtagtcccagctactcaggaggctgaggcaggggaatccgcttgaacccaggaggcagaggttacagtgagccgagatcatgccactgcactccagcctggtgtcagagcaagactctgtctcaaacaaacaaaaaccctaaaaaacaaattaaaataaataattatgctttctatgttcacctagataaagaaaaaacttggccaggtgcagtggctcatggctgtaatcccagcactttgggagaccaaagcagctggatgacctgaggtcaggagttcgagaccagcttggccaatatggtgaaaccccatctctactaaaaatacaaaaattaaccaggagtggtagcatgcacctgtaatcccagctactccggaggctgagacaggagaattactggaaccaaagaggcagaggttgcagtgagtcgagatcgtactacgccaggcactccagcctgggtgatagagcaagattctgtctctgaaagaaagaaagagagagagagaaagaaagaaagatcttgataattttggcagagaactggaaatcataattttttaaaagagcatatttgaaaggcactaaatagaaaatttgaaactaaaaagtaaaataattaaaattaacaactctatggatgagattttcagtaaagtggacaaagctaaagaattagtgaactggatgataggcaagaagaaaatatcatgaataaagtgtggagggacaaaagaagagaaataaaaatataatagagagagtaagaggcatacagcataagatgatagagtctaacatatgtttttaagagccttaaaaggagaatagagaaacaatgaggcagaatcaatattaggaaatataatgactgagaatgttcctgcactgaggaaagacataaaaagacaaattgaagcagtcctacaatcccaagtagaattttaaaagcctgacacctatgcatacca

SEQ ID NO: 8847 - DNA, 21502 bp, Homo sapiens
gaggatcctttgagtccaggaggttgaggccgcagtgagctgtgattgagccaacatattccaagctgggcaacaaagtgagaccctgtctcaaaataaaataaataatgaaaatgagtaaaggacttgaatagacatttcttcaaaggagatacccaaatggccgggttcagtggctcacgcctgtaatcccagcactttgggaggccgaggcaggcggatcccttgaggtcaggagttcgagaacagtctggccaacatggtgaaaccccgtctctactacaaatacaaaaattagctgggtatgctggcgggcgcccataatcccagctacttgggaggcggaggtgggacaatcgcttgatcccgggaggcagaggttacagtgagccaagaacacgccactgcactccagcctgggcaacagtgcgagactctgtcttaaaaaaaatatggctgggcacggtgcctcacatctgtaatcccagcactttgggaggccgaggtgggcggatcatgaggtcaggagatggagaccatcctggctaacatggtgaaaccccgtctttactaaaaatacaaaaaaattagccaggcatggtggcgggcacctgtagtcccagctactcaggaggctgaggcaggagaatcgcctgaacctgggaggtggaggttgcaatgagccgagatcgcaccattgcactccagtctgggtgacagagcgagactccgtccccaaaacaaacaaacaaacaaaaaatatacatatgtcacacacaaatggccacaaagcacttgaaaagatgctcaacctcattagtcactggggaaatgcaaatcaaaaccacagtaagataccattccatatccattaggatggccatggtagtaaataaataaataaataaataaaaataccaagtgttaaggatgaggagacattcactgcttttgggaatataaaatggtcactgtgagaagaagtccagcagttcctcaacaagtttcacgtagagttgccatatgactcagtgggtatgttacatacccaaaagaagtgaagacaggtgttcaaataaaagcttgtatgtaaatgttcacagcggcactattcacaatatacaaaaggggccgggcatggtggctcacgcctgtaatctcagcactttgggagaccgaggtgggcagattgcttgaggccagaagttcaagaccagcctggccaacatggtgaaaccccatctccactgaaaatacacaaagtactggccgggcacagtggctcatgcctgtaaccctagcactttgggaggccgaggcgggtggatcacctgagacctggagttggagaccagcctggccaacagggttaaaccccgtctctactaaaaatacaaaaattagccgggcgtggcaggtgcctgtaatcccagctacttgggaggctgaggcaggagaatagcttgaacccgggaggcggaggttgcagtgagctgagatcaggtcagtgcactccagcctgggtgacagagtgagagtccgtctctaaagtaaataaataaataaatattttttaaaaatacaaaaattagggggtgtggtggtgcatgcctgtagtcccactacttaggaggctgaggcaggggaatcacttaaacctggtaggcggaggttgcagtgagcggagatcatatactgcactccagcctgggcaacagaacgagattctgtctcaagcagacaaacaaacacaatatatacaaggtagaaataaaccaaacgtcctcagcaggtgaatggatgaaccaaatgcagtgtgatttttccattaaaatgaatgaaattctggggccaggcgcggtggctcctgcgtgtaatcccagcactttgggaggctgaggcgggcggatcacctgaggtcaggagttcaagaccagcctgaccaatatggcaaaaccctgcctccatgaaaagtacacaattagctgggcatggtggtgctgtaatcccagcaactccagaggctgaggcaggagaattgcttgaacccagaaggcggaagttgcagtgggccaagatcgtgccattgcactccagtctgggcaacaagagtgaaactccatctcaaaacaaataaataaaaataaagaaataaataaaaatagtgaccagggtcttgctatgtttcccaggctggtctcgaactcctggcctcaaaccatcctcctgcctcaccgtctcaagtagccgagaccacaggcatgtaccaccatgcccagcttttaggattttattggtatgaaatacccagaacaggcagatccacagagacagaaagtaaattcattgttactcaggagctgaagggatgggggaaggggaggtaaatgctttatggatttgagattttccatctggggagtaaaaagttctggaactaaacagcggtgctggttgtataattccgtgaccgtactaagtatcacttcatactttaaaatggctaaaatggtaagtttcatgttatgcatgttttcccacaataaaaaaaaaaacaaaactcagcagtagagaacaatttaaaaacgggcaagagatgtgaagatacatttaacccacgacaacatgcaaatggaaacaagcacctggaaagaggttcggaatcacccgccactggggaaatgcaactaagaccacaaggaggtgttgccgcagagagaatggctgaaggttaaaaatagcgactgcagggatgttgacagtgtgcagagaaagtgaggccgggcgctgtggctcacgcctgtaatcccagtgctttggaaggccgaggcaggtggatcacttgaggtcaggagtttcagaccagcctgggcaacatggtgaaaccctgtctctactaaaaatataaaaattagccagtcatagtggcaggcacctgtaatcccagctacttggagggccgaggcacaagaactgcttgaaaccgggaggcggaggttgcagtgagctgagatggccccacggcactccagcctgggtgacagaacgagactccctctgaaaaagaaagaaaggaaggaaagaaaggaagaaaggaagaagaaaggaagaaaggaagaaaaagaaaaaaagaaagaaagaaagaaagaaagaaaaagaaagaaagaaagaaagaaagaaagaaagaaagaaagaaagaaagaaagaaagaaaagcaagcaagccagcaagccagccagccagccagccccacattgctggcggggctgtgaaatgatgcaaacgctggggaaaatattgtggctgatttaacagacggatacagtgcatgactcgcaaccacagcagaacatcaaagggcttgacggccatttctccgtccactccatgatgtataaatggctcacagacacttgagaacatgctccacatcgctggccattagggagatgccaatcaaaaccgcagcgagacaccacgtcgcacccaccggcatcgttagtacgcgacaaacaaaaagccacaaagtagcaagtgttggcgaggacaagaaccgtgtccctgctgcgctgctgggaagacagtttggcgtttcctcagaatatttaacacataattactctgtcacccagcaattccctcataactatacaccaagaacgcttgaaaacgggatcgggaagcgccgtttgcacacccacgttcacagcagcgttactcgccgtcgccccaaaggggaggcagcccaggtgtccatcaagatgcccacagatgagcggacgcggtcgatgcggtccctgcacacagcgggacacagttccccacaaaagggaaggagattcccacacaggccaggccgcggcggcgaaggcggaggatgctgcgctgagaatccagccggtctccaaaggacaaatcccgtgaggctccccctgcgcgcagtccctggaagcgctgaatccacagacagaaagtggacggggcgccggggctgaggaggggagggggcgtttgatggggacagagcttcattctgggaggacaggagagtctgagaacggattttgggaggacgggagcgtctgtgaacggattttgggaggacgggagcgtctgtgaacggattttgggaggacgggagcgtctgtgaacagattttgagaggacgggagagtctgagaacggattttgggaggacggaagagtctgagaatggatttttggaggacggaagagtctgagaacggattttgggaggacgggagcgtctgtgaacgattttgggaggacgggagcgtctgtgaacgattttgggaggacgggagcgtctgtgaacggattttgggaggacgggagcgtctgtgaacggattttgggaggacgggagcgtctgtgaacggattttgggaggacgggaaagtctgagaacggatggtggggatggatgcaccgaatgatcctgaatcgcgcacttcaaagcagataaaatggcaacaccggccccccaacagtcacgccacgctgaagctggagacgaactcgccccagcaaggtgctccaggggcctccggaactccggccgcagccccttccccggggccccccagtccccccccaaaccctcccccaagccctccggcccctccgcccccgcaggctccgaggcttcgcggtgcggttccctctgcgggtcccaggcccgcgctccgttcgccccccaggccgggacgtccccctcccccagccggccgaggggcgccagcgcggcggagggggcgggaggccgggccggggcgacagctgggggggcggccctgaccttcccgggatcgctgggcgcggccgggccgtcccctttccgggcgccgccataaaggggccttgcgggggcccggggccgtggccgcagcgctcagctcctgcgccccgaccccgccatggccccccggcccctcctgctgctgctgctgctcctcgggggctccgccgcgcgccccgcgccccccaggtgagccgcccgccaggcccgcccgccccccgggcccacccgcccccagtgcgccctgaccccgacccccgaccgcccgcagggcccggcgacactcagacgggacgttcaccagcgagctcagccgcctgcgggagggcgcgcggctccagcggctgctacagggcctggtggggaagcgcaggtgaggccgggtggggtggggggtcctggcgtggtgccccagcagcaacgcgcgaccccccagctccaggactaactctgttttggggcggggggcagcgagcaggacgcagagaacagcatggcctggaccaggctcagcgcgggtctgctctgcccgtcagggtccaacatgcccatcctgcaggcctggtgagcacccgccccaccgcagaccccactccagaccccaccccagacccctccttctgtcctggcctccccgggtcagcgctggtggccactggaggcccaattccagcagcggggccggggtctccagccccagccctcagaccctcacgtgctgtctctgcaggatgcccctggacgggacctggtctccctggctgccccctgggcctatggtttcagaaccagctggcgctgctgcagaaggaaccttgcggcccagatgaggaaggaaccccctcaccacctgcccggcccaggagcgcagctgcatttggggtggggggcaggatgggggagagggggaggggtggtacttggcaccaataaaggaggaatcagacccagacgctgggagttgtctgtgtccactcagtgtaatcgaggcaacccctgtgtagcggggctgagggatggatggaggcccatccacccaggagggactgaccacacccagctgccctttacacctgcaggcacggcggcccctcatccttatctctggcatcagggccacctcctgtacctcgactaagtactgcagggccccgccccaccccttgtcatccattaggaaacattctggggctcgggggatcccggacaccctctcagctcctgcccgggggcccatgtggtcagtgtttctgtaaggggtagtggggagggtgtgaaggggccaggggggctcaggcgggcagraagaggggagggtggaggtgtcacctggggtgccaggaatccactctggcgtgaggactccggaccctctgtctcgtrtggcctcggaccagtggcttgacccctcagagcctgtggagcacggagcgtgcagggcttgaaggcgaccatgagggcaccgtgcagggttaggacactgagcccagccccagccatgagaggccagaagcttcggcgcacaggcctggaggaggagaactccacctacccctcacgacagcyacttcctcgccccgaccctacccagtggcctctccctagagctgggggcttctggggggccaatgaaaagagcagggcaagtgtcgagtctcacctcaccccctctgtcgggcaccagggccccccaggaactcccagctgcccctcacagccccgccttagcctcagtcactaaggccctgtccagccccgccctgagaagccgacttgtctctggggcaggcaggggtgtccccaggacacagtgaggagagccttttccttcagaacctgctgtcaggcagggagggaggtgctccctggggaacacccgggttctgagcctcaaggggtggccttaggaactttgcctgagggagatcttaggggaggagccaagccagggcagcctgggctagggaggcaggttccagacaccccgacaccaagggccgagcccccgcccccagcccccagcttctctcccacaccctagccctgcccctgccctgcccctacccccacggcacccatgagccgctctccagtcccttctgccctgtgcctcggtgcctgtgacctgagccccytggttgacccctgcactcagtccaacttgggccaaacgacygcccctccttctggcagtgggctggaccagccggccagcgggagcccccttggcagaagccggtcgtaaaggatcataaactgggcggcgtctggctggggcgaaggtcgctgaggtaggaactgcgccagtcctagacgccagacccgctcagaccctcctgccaggtgacagccgccaagatggggtcttgggccctgctgtggcctcccctgctgttcaccgggctgctcgtccgacccccggggaccatggcccaggcccagtgtatgtgcgggcaggggtaggtgggrcacgggcggcggkgagccaggggctgggaggcactgatccctcctctgcaaccttacagactgctctgtgaacaaggacatctttgaagtagaggagaacacaaatgtcaccgagccgctggtggacatccacgtcccggagggccaggaggtgaccctcggagccttgtccaccccctttgcatttcggatccagggaaaccagctgtttctcaacgtgactcctgattacgaggtgtgggcggcaggcgggcgggatatgggggtcccgggagaagggcacctgcatcctcaggccacacctcccttgggggcctaggagttctatgcctgcgggcatccactgacacccatgcttggtggtgcctgccctagaaggctgggccatttcgggatgaagctgcctgggcccacaccctcagcactgaccactgatgatggggaccctgggccagcgcctgcccacttggcctcagtctccccacctgtggggcaggacggtgactgcagacctgtctacatccacaggagaagtcactgcttgaggctcagctgctgtgtcagagcggaggcacattggtgagtccccgccccgctctccccgccccacccggccacctctgctgggctctgccctgccggtccaggaccagtctttgatgacgtcagctagggtgtggtttcaaattccacccccccgagggtgatgcccacatttcctccagtccagactctgccctgagctgtggagtccccgtcactgaccccttgtccagcagacaccccatccagtgtgcccaagactcccacccactccctcaaccatccacaagggaggcacctttatcctgccagtcacggggaccaccttggttcccactcgccctccctccccacgtgtcccccacagccccccactggtaaatctgttggctgtgccccagctcgacccagaaatccagagtctgtccacctccagtcccatcagggccgggacaccagcactcattttgggaaacttccagcyggcccaccggcttccctgttgccctttgctggccccagtccactccacgtggcagaacagcccctgtggatgttgtaaaccaaggctgcccagcccaccccagccctccacggctcctttctcaccgagtcaaacccagacatactgtgcagaggctccactgcagcctcagggctcccgccaggcacgcccctccctcaccggctcaggactgcagtcttcagagaaatcccaaccaccctatgccctgttgcatcccagccccgctcccccaacatcctgcttcttgaccggcggcatttttttcggctttattaaggaaaattgcagaatcctgaggccagcacaggccccctcacctaccagcacacagcaggctctgtgccctccatgcaccacggcacgtcacctgcacatatcttgggatatgtctctgaaagagagagactcttttttgagacagagtctcactctgtcacccaggctggcgtgcagtggagcgatctcggctcactgcaacttccgcctcccgggtccaagcgattctcctgcctcagcctcttgagtagctgggattacaagcatgcgccaccacggccggctaatttttgtatttttagtagcgacggggtttctccatgttggtcaggctggtctcaaactcctgacctcaggtgatctgcccgcctcggcctcccaaagtgctgggattacaggtgtgagccaccgtgcccggctgacaatccagtttcttcacaaataaatctccaggaaaaaagatgggagaaagggaaaggtacagatgaacagaaactcaggagaattaccaaccaggtccataatgtgggccctgattcaaacaaacaattgttaaaaaacccttcagagaccacggggaatgtggcatcctggacatttgaggtagaaagtgaccgcttttcccaggtgtgacaacgacattgtggttatgttctaaaaagaagagtcctggctgggcgccgtggctcacacctggaatcccagcactttgggaggccgaggcgggtagatcacctgaggtcaagagttcgagaccaatgtggccaaaatggtgaaaccccgtctctactaaaaatacaaaaattagctgggcatggtggcaggcacctgtaatcccagcactttgggaggccgaggtgggcagaggccgaggcaggagaatcgcttgaacctgggaggcagaggttgcagtgagccgagatcacaccactgtactccagcctgggtgacgacagagcgagactkkatccaaaaaaacccaaaaaccaaaaaacaaaaacaaaaaccaaaaaaaaaaaaaaacagagaaaagaaaatggattgtctttcctcacctgagattctgctggctgcatccccaagtacctgcattatttttctgtggagcacctgccacctcctggctttataaagtcctttttgtctgttgttataagtcctgccaggacaggcaccaccaggcagagatttgtctcttgtgatctctgaatcccaacgcctagagctgtgcagcccctgtagccccccaacaactgaatgagcgagtggacggatggccgtcgaggggtgcaccccactcacggcggggacgggtggccgttgaggggtgcacctcactcacggcggggacgggtggccgttgaggggtgcacctcactcacagcagggacgggtggccgtcraggggtgcacctcacttagggcggggacaggtggccgttgaggggtgcacctcactcacggtggggacggatagccgtcgaggggtgcacctyacaacggggaggggctgtgggagaggctgacggccacatcctgcaggtgacccagctaagggtgttygtgtcagtgctggacgtcaatgacaatgcccccgaattcccctttaagaccaaggagataagggtggaggaggtgaggccagcgaagcygcggggactgggcacgggggtgtgggagcccagggtgagggcaggaggtgagtggtggccgggggctcaaccacagtgggggtccacaggggccaagagtgtggccggaccaagcccctctccctccccaggacacgaaagtgaactccaccgtcatcccygagacgcaactgcaggctgaggaccgcgacaaggacgacattctgttytacaccctccaggaaatgacagcagtcagtgccgcccaccctgccccagcacgagcccctcgcctctgacacccacagccgccctcgccctccaaggctcttaggctctgtcctccctgaccctccccagggtgccagtgactacttctccctggtgagtgtaaaccgtcccgccctgaggctggaccggcccctggacttctacgagcggccgaacatgaccttctggctgctggtgcgggtgagcaggtcaccccagccccgagtcccacacacttgaggccccccggccccagctgctcccaggcctgatccagcacagccgtctgttgcaggacactccgggggagaatgtggaacccagccacactgccaccgccacactagtgctgaacgtggtgcccgccgacctgcggcccccgtggttcctgccctgcaccttctcagatggctacgtctgcattcaagctcagtaccacggggctgtccccacggggcacatactggtaatggggagggaggggcagtgcacggggcagggccttctaggcaggctggacacagggacggccaggatcaggagaggaagggcggggtcggggtcagggggtggggccgatttcggtcgtgattttgaaacaaatgcagactctccttggaaaccaacccttcccatcttgagcggtgagggagcaaaccctgaacacacagggaggagcgtgggccccagagccaggcggtctcaggggcctggggaggtgggctggggccctggagctcttaagggatgctgacatctctgccctgctcacagtcaccactgggcccacacaggctgtctgcaaaccttcctggcaccaaggcacctggggccaccaaacagtacatgggaggcagaaatgcagaccccgggagcccccacttcctaaatgtttgcttacccgtcaagacaagccttgtgcaaatgggactcagtatctttgggcmactggactcattcattagtaagggacccacaggggtgttactgattgtgatgctgggacaagggactgtcctaggcaggcagggacgcccggccaccagcgggactgggcccctcctcagccaaccctgcccttgatggggagtcagaggggccaggctggggccatccaccccagccccacgacgtgccctcccttccgccatccytgaagccatctcccctcgtcctgcgtcccggacccatctacgctgaggacggagaccgcggcatcaaccagcccatcatctacagcatctttaggggtgagtggggcccagccctcaacaatgccctgtaccccctctgtccctgtctccatccccaccttgggcagagctggctgggtccctgggcctcagggggccggggctgagcacttccatcatcctcccaggaaacgtgaatggtacattcatcatccacccagactcgggcaacctcaccgtggccaggagtgtccccagccccatgaccttccttctgctggtgaaggtgaggtgggcacctgcatggggggcagggcagagggggaagggtggaaggtagggcggggggtcagggctggggggccggggcagggcccccgccaagtctgcacctgcctttcctgagccccagccttcagcgccagctccaccttcaaccccactagtcactgctgcctcccccgcctccagggccaacaggccgaccttgcccgctactcagtgacccaggtcaccgtggaggctgtggctgcggccgggagcccgccccgcttcccccagagmctgtatcgtggcaccgtggcgcgtggcgctggagcgggcgttgtggtcaaggatgcagctgccccttctcagcctctgaggatccaggctcagracccggagttctcggtagagagtrcatccaaggcctcccctctgtgggtgggtcagggctgtacgtgggaggcagcctggccggggactcaatgagaccctgtccaggacctcaactcggccatcacatatcgaattaccaaccactcacacttccggatggagggagaggttgtgctgaccaccaccacactggcacaggcrggagccttctacgcagaggtgcggggcagggcaggcgggcatctccaagggtgtggggcttaaagatgtgtctaggagggacaagccccttcctgccccaggttgaggcccacaacacggtgacctctggcaccgcaaccacagtcattgagatacaagtttcygaacargagcccccctccacaggtaagcccccctccacaggtgagcccccagggttctccaaataagccccttcggtggctcctttcccgcggtaggtgtgcaaggggcgggcagaggcaagcccaagcactgttcccggcccccagatgtccccccatccccagaggctggaggaacaactgggccctggaccagcaccacttccgaggtccccagaccccctgagccctcccagggaccctccacgaccagctctgggggaggcacaggccctcatccaccctctggsacaactctgaggccaccaacctcgtccacacccggggggyccccgggtgcagaaaacagcacctcccaccaaccagccactcccggtggggacacagcacagaccccaaagccaggaacctctcagccgatgccccccggtgtgggaaccagcacctcccaccaaccagccacacccagtgggggcacagcacagaccccagagccaggaacctctcagccgatgccccccagtatgggaaccagcacctcccaccaaccagccacacccggtgggggcacagcacagaccccagaggcaggaacctctcagccgatgccccccggtatgggaaccagcacctcccaccaaccaaccacacccggkgggggcacagcacagaccccagagccaggaacctctcagccgatgcccctcagcaagagcaccccatcttcaggtagcacccactctgttgccttccytccctgactccggtcattggctggtatgggaaacgctgtaggaaggktccaccccaggctgacctggcctgaccatgaaatcccaaagaggagtctgtttgggactgacagacacagacaggcccaaggcccccagtgaggtaacctgtgatgtgtgtaggacagaggccagatgtggggtccagcgaatcccacgattcccacggctgccgctcaccctgcaagtccctgcacytcttgtgagctcctgtgagcagcttggcctcccgggggggagggggtgggcagggtctcgatgggacacacaggccccttgagccagggtcagcagagcctgagatttgggagacagcccaggcctgggtggaacccaagtgtcccaagcctggcacaggttggcaygggaaatgcctggggcactcaacagtgcggggatgatgacrttttccactgcgatgccaggtggcggcccctcggaggacaagcgcttctcggtggtggatatggcggccctgggcggggtgctgggtgcgctgctgctgctggctctccttggcctcrccgtccttgtccacaagcactatggcccccggctcaagtgctgctstggcaaagctccggtgaggcccaggatggagaacagggcaggcgaccaggcaggaagtgggggacrggggacaggagaggggagggcagaggracagatgtggagacggaggggtgtccagcgtggaatgagggtgtgcagggccaaggctgcagagacccagggaccccgctgacgcctcgactcycgcctgcaggagccccagccccaaggctttgacaaccaggcgttcctccctgaccacaaggccaactgggcgcccgtccccagccccacgcacgaccccaagcccgcggaggcaccgatgcccgcagagcccgcaccccccggccctgcctccccaggcggtgcccctgagccccccgcagcggcccgagctggcggaagccccacggcggtgaggtccatcctgaccaaggagcggcggccrgagggcgggtacaaggctgtctggtttggcgaggacatcgggacggaggcagacgtggtcgttctcaacgcgcccaccctggacgtggatggcgccagtgactccggcagcggcgatgagggcgagggcgcggggaggggtgggggtccctacgatgcgcccggtggtgatgactcctacatctaagtggcccctccaccctctcccccagccgcacgggcactggaggtctcgctcccccagcctccgacccgaggcagaataaagcaaggctcccgaaacccaggccatggcgtggggcaggcgcgcgggtccatgggggtcccattcactcagtcccctgtcgtcattagcgcttgagcccaggtgtgcagatgaggcggtgggtctggccacgctgtccccaccccaaggctgcagcacttcccgtaaaccacctgcagtgcccgccgccttcccgaggctctgtgccagctagtctgggaagttcctctyccgctctaaccacagcccgaggggggctyccctyccccgacctgcaccrgagatctcaggcacccggctcawctcagacctcccgctcccgaccctacacagagattgcctggggaggctgaggagccgatgcaaacccccaaggcgacgcacttgggagccggtggtctcaaacayctgccgggggtcctagtccccttctgaaatctacatgcttgggttggagcgcagcagtaaacaccctgcccagtgacctggactgaggcgcgctgggggtgggtgcgccgtgtggcctgagcaggagccagaccaggaggcctaggggtgagagacacattcccctcgctgctcccaaagccagagcccaggctgggcgcccatgcccagaaccatcaagggatcccttgcggcttgtcagcactttccctaatggaaatacaccattaattcctttccaaatgttttaattgtgagagtatctgatattcttgactgaacaatgtaaaaaacccaaagggggctgcgcacggcggctctcgcctaaatcccagcactttgggaggccgaggtgggcagatcacctgaggtcgggagttcgacaccagcctgaccaacatagagaaaccccgtctctactaaaaatacaaaattagccgggcgtggtggttcatgcctgtaatcccagctactcgggaggcttaggtaggagaatcacttgaacccgggaggcggaggttgtggtgggccaagattgtgccaccgcactccagcctgggtaacaaaagcgaaactccatctcaaaaaaagaaacgcaaacggtgcagctgcccctttttcgaggcacgtccacctcccattacccacttccttttttttttgagactgagtcttgctctgtcccctgggctgtagtggagtggctccatctcggctcactgcagccactcccaacgccctccactcctccctactccgcgctggccggggcggggttccgctggtcgcatccaataataagaacaggcggcgcgcgcccttcccggaaactcccgcctggccaccataaaagcgccggccctccgcttccccgcgagacgaaacttcccgtcccggcggctctggcacccaggtactggggaccccagacccacgcggtgcaggccgggagcgagagcctccgtgggggctccgtgaccccggaggggtagagccaagagctgggggagcctgagagatgagggtcgggcggggagggaggcggaggcggaggcggggttccgcggagctgagaaccggacggggtgggatcgaggagggtgcgaagcgccactgtttaggtttcgctttcccgggagcctgacccgcccctgacgtcgcctttcccgtctccgcagggtccggcctgcgccttcccgccaggcctggacactggttcaacacctgtgacttcatgtgtgcgcgccggccacacctgcagtcacacctgtagccccctctgccaagagatccataccgaggcagcgtcggtggctacaagccctcagtccacacctgtggacacctgtgacacctggccacacgacctgtggccgcggcctggcgtctgctgcgacaggagcccttacctcccctgttataacacctgaccgccacctaactgcccctgcagaaggagcaatggccttggctcctgagaggtaagagcccggcccaccctctccagatgccagtccccgagcgccctgcagccggccctgactctccgcggccgggcacccgcagggcagccccacgcgtgctgttcggagagtggctccttggagagatcagcagcggctgctatgaggggctgcagtggctggacgaggcccgcacctgtttccgcgtgccctggaagcacttcgcgcgcaaggacctgagcgaggccgacgcgcgcatcttcaaggtggggaccccagccccgccccgccccgggtgggagagcccgcctaggaccccgcgggcccggcacacgtgttctgtccccctcttcaggcctgggctgtggcccgcggcaggtggccgcctagcagcaggggaggtggcccgccccccgaggctgagactgcggagcgcgccggctggaaaaccaacttccgctgcgcactgcgcagcacgcgtcgcttcgtgatgctgcgagataactcgggggacccggccgacccgcacaaggtgtacgcgctcagccgggagctgtgctggcgaggtgagcgacgccggctgccaagggcgttggcattcgtcctgcttgggcaaaggggaacattctctgggtcagatttgtggttttagaagctgttctgggagaggctgccagcaggcccaggacaggtggagagccacatccccacctcctcaggccacagcctaagggttcacagccaggaagctggtgggggctacaccaggctctccttgtatctctcactctggtgtcggggcctaacgcctgccccattctctctcagaaggcccaggcacggaccagactgaggcagaggcccccgcagctgtcccaccaccacaggtacccttctctctgcctgcctctcctcctgccaggccgcggagctgcttacgttcaccctgacttttccctgcagggtgggcccccagggccattcctggcacacacacatgctggactccaagccccaggccccctccctgccccagctggtgacaagggggacctcctgctccaggcagtgcaacagagctgcctggcagaccatctgctgacagcgtcatggggggcagatccagtcccaaccaaggctcctggagagggacaagaagggcttcccctgactggggcctgtgctggaggtgtgggcgtgcccggggagggggggagcgcgggaggggccagtgcacctggacggacactttagaagggggctggggattggggagctggagaattaggaggggaccaccgttcccactgtcctcccctcctcaggcccagggctccctgctggggagctgtacgggtgggcagtagagacgacccccagccccgggccccagcccgcggcactaacgacaggtgagaggggtaggggttgggaggcctggggcacagggagaggctagggatgaggtgccagcacaggattcccttccggatgcaggcgaggccgcggccccagagtccccgcaccaggcagagccgtacctgtcaccctccccaagcgcctgcaccgcggtgcaaggtgagtgcatcccaggaaggggcagcctgtccccgcccacccccgtcactcacggcttgtccccgcccacccatcactcacatcctgtccccgcccacccccgtcactcacatcctgtccccgcccacccccgtcactcacagcctgtccccgcccacccccgtcactcacagcttggtctccacacagagcccagcccaggggcgctggacgtgaccatcatgtacaagggccgcacggtgctgcagaaggtggtgggacacccgagctgcacgttcctatacggccccccagacccagctgtccgggccacagacccccagcaggtagcattccccagccctgccgagctcccggaccagaagcagctgcgctacacggaggaactgctgcggcacgtggcccctgggttgcacctggagcttcgggggccacagctgtgggcccggcgcatgggcaagtgcaaggtgtactgggaggtgggcggacccccaggctccgccagcccctccaccccagcctgcctgctgcctcggaactgtgacacccccatcttcgacttcagagtcttcttccaaggtcagtgaggcccctgcctggggggctgtctccaggggtcgttgggagcacctgcctgccaggtactcagcagagtccccttcttcagagctggtggaattccgggcacggcagcgccgtggctccccacgctataccatctacctgggcttcgggcaggacctgtcagctgggaggcccaaggagaagagcctggtcctggtgaaggtgagaccagagcctcaaggaggggaggccatgtgctcaggcccactgacagacgcctgatgccctcagagcctcggagagggggaggggaggccatacaccgggtcactgacagacgcccgacgccctcagagcctggggagggggaggggaggacacacgccgggtcactgacaagacgcccgatccctcctggcagctggaaccctggctgtgccgagtgcacctagagggcacgcagcgtgagggtgtgtcttccctggatagcagcagcctcagcctctgcctgtccagcgccaacagcctctatgacgacatcgagtgcttccttatggagctggagcagcccgcctagaacccagtctaatgagaactccagaaagctggagcagcccacctagagctggccgcggccgcccagtctaataaaaagaactccagaacacgtactggcatcttggctggtggggaattgggtccaggctgaacacgggtgaggcccagggagggaggggacctccacggcctccctgcacaccaactcacttctgtcttcaccacacacatcacagccaagctttgactcaaagaacaagacccttgacaggccagtggccgccaaagccactcccaccagctgtgccaagggcagggacagcatttccccatgcaggacacctgtcgccagccctcaggctgccactgctgcaccctgcctccaggaggcaacggtgttgagtgcaaactcgagcaattatttacaagagcacaacataattggaaaagagaaagtaaagatattcctaattcagagccaaaggtacacagcagctgttggcgggaggccacctagagatttatcaaggacgcgccaccccaccaggagcccctcttgatcaccaagtgctttatcttccaagtagtaagtcaatcaagaggtttctaaagataatccatttttgataaattagaatggaaacagtgtctctataatatacatacaaaagtgtccagttttcaactgtgagcaacacaggtgcacagaccaggtgtcagcgcaggaacccgacggcaggcatggtgatgccccccatttcccgccactcccgacagctccccgggcatggccccgattcccgccactcccgacagctccccgggcatggccccgattcccgccactcccgacagctccccgggcatagcccgtgattgcctggcctcagccctcggccccctgcgtgggcggctcctccccggcctctggtttcttgtgcctgcgcatgtgcctgtacttgtccacgtacgccttcaccaggttggccaccttcacggggttgatctctccactcttgctgtggcagatctggagaaagaggtgcaatcaccaaatgccctttcacatccagatgttccgggccagagcccagggccaaagctgggctccctcgcctgccctgctcaggagcaggccctaggtgcagcacgcagacagacggcggcagaggccgccccacctatgtgagacccccgtcctgttcgctatgccgctcacaaggccactgagggtcccacggtgtcggtgggcggggggagcatgggctgagacgtcaccaggcaactgctcacctctgggggtcgttctcccacctgtaagctgggcgtgggctgggtagttttaaattacccagggtgcactgaggcaccctccttcctaagcatctgccaggggcagccacaggcgaacaggcttgaccccaggcctacaggatgtggcaatacagccccctgacccctaacctggctggctgacctcgggcctgcactcatggccaccccaaagtccatgctgacgagacagcagcgacgtaccgcccgtgaccccgagccccacacacaggctcgcacacagcccaccttctgcacggccttgcgcaggatgtccttgtactcctccttggtcacctccctcttctggtagaagggcttgatggccagcttcacctcctccacagcacgctcctgcatgtgcagcttcttcatgtactagaggggacatgtgtgtgatgcggccaggaagggagccgggagtccctctggccagaggcactgtggttctggacacccttgcagttccagaggcacagcgaccagcttccgcccataaactcagccccaacaactttagtttcaaagtaagatgggaacatggggaaagtgggaggaggcaggactcacctcctccttcttggttttctccgcagctagcctgggggccggggtcttctcctccgagttgctggctgcagtggcttgactggctggctctgaggctggggtcagggcagcgggcactggggccagggtctgtgctgccccacagcccactagcggcaggctcccctgaaggatgaactggac

SEQ ID NO: 8848 - DNA, 24882 bp, Homo sapiens
ggataaaagaacccaagtatgagtttgcagcacaatgggaaaggaaagccttggagacaaagagagagggggcgacatagtgttgatgaagaggagcagccattgtaggttgtaggtcggggtcagaggaagcgtgaggtggttgttgaggagaattggcaagttcttgggatttccaggctttatgagtatttccagtgagtctgcacaggtggatgtatgattctagagggccacctttatgagactattctgtgcagattctttgttgggctgcccagctgtttgttggcctagcgcagcccaacgcaacccagccatagtctctgctttggccaatggcctggttgctgggagaaggatgggggaggcccagatgatttgtacagggcccctagatgacccactgcacctgtccccactcgcccccaggtacttgatatttcctaatcctgtctgccttgagcctggtatctcctacaagctgcatctgaagctggtacggacagggggaagtgcccagcctgagactccctactctggacctggcctgctcattgactcggtgaataatctcctcttgcccacaccaaccaagatggcagggcccgtggtgtgggacttgagggatagcaggggtctgtggcagaagaggcaggcccatggtggtgccagggtgggcaggcttgtggcagtgctaaggcaagtgctctggcaatgcctacgtggtcccaggtctgaactgcgatcttccttgctcactccttcagctggtgctgctgccccgtgtcctggtgctagagatgtttagtgggggtgatgctgctgccctggagcgccaggccacctttgaacgctaccaatgccatgaggagggtctggtgcccagcaagacttctccctctgaggcctgcgcacccctcctcatcagcctgtccaccctcatctacaatggtgccctgcgtgagtgtctgtgatgtgggttgatggggcagaggtggggacccagcctgacttggcccaaccctcctccccacagcatgtcagtgcaaccctcaaggttcactgagttctgagtgcaaccctcatggtggtcagtgcctgtgcaagcctggagtggttgggcgccgctgtgacctctgtgcccctggctactatggctttggccccacaggctgtcaaggtactcttctgccccttgttccctcctatgcttctctctccttcccattactgttctctctcctccttctggacctgctgctggtttcctcaaactaagtcttggaccctctactctcaacctgggtcagttgtagttctcttccatttcctgaccttcccacctagactcccactactcacactcccctgagaccctcccccacccacactcccctcagaccccctcccctggctctggctcagctctgccttgctcctagcctgccagtgcagccacgagggggcactcagcagtctctgtgaaaagaccagtgggcaatgtctctgtcgaactggtgcctttgggcttcgctgtgaccgctgccagcgtggccagtggggattccctagctgccggccatgtgtctgcaatgggcatgcagatgagtgcaacacccacacaggcgcttgcctgggctgccgtgatcacacagggggtgagcactgtgaaaggtgagactggagcagctatgagtgggttggttggtgggcaggcttcccagggatgacacatttcttcttcctcctccctgcaggtgcattgctggtttccacggggacccacggctgccatatgggggccagtgccggccctgtccctgtcctgaaggccctgggagccaacggcactttgctacttcttgccaccaggatgaatattcccagcagattgtgtgccactgccgggcaggctatacgggtgagtggatgggggcaggcgtgggatcagggtgagttggctgggctgagcactcacagcttcctcttaaccgtgggcagggctgcgatgtgaagcttgtgcccctgggcactttggggacccatcaaggccaggtggccggtgccaactgtgtgagtgcagtgggaacattgacccaatggatcctgatgcctgtgacccccacacggggcaatgcctgcgctgtttacaccacacagagggtccacactgtgcccactgcaagcctggcttccatgggcaggctgcccgacagagctgtcaccgtgagtatgagtgtgggagggcatggctgaattggggttctgcttcttggcctcctcttgactactgtgctcatcttggttggcacaggctgcacatgcaacctgctgggcacaaatccgcagcagtgcccatctcctgaccagtgccactgtgatccaagcagtgggcagtgcccatgcctccccaatgtccagggccctagctgtgaccgctgtgcccccaacttctggaacctcaccagtggccatggttgccagccttgtgcctgccacccaagccgggccagaggccccacctgcaacgaggtatgggaccctcctgcagatccctggttagatggggccaggtgtctgtcttatctccagggcttagcctcttatagaggctctgaccctgccttgttcccaccccagttcacagggcagtgccactgccgtgccggctttggagggcggacttgttctgagtgccaagagctccactggggagaccctgggttgcagtgccatggtgagggagccagcggggccagggtagatggaggacttcccagaatgccccacagtgaccctaactctgtgctctgctctttcttgcagcctgtgattgtgactctcgtggaatagatacacctcagtgtcaccgcttcacaggtcactgcagctgccgcccaggggtgtctggtgtgcgctgtgaccagtgtgcccgtggcttctcaggaatctttcctgcctgccatccctgccatgcatgcttcggggattgggaccgagtggtgcaggacttggcagcccgtacacagcgcctagagcagcgggcgcaggagttgcaacagacgggtgtgctgggtgcctttgagagcagcttctggcacatgcaggagaagctgggcattgtgcagggcatcgtaggtgcccgcaacacctcagccgcctccactgcacagcttgtggaggccacagaggagctgcggtgcggaagggcctaagaatacatggtgggatggggcagaggcccagtggaccagggctgaagcctctctaaacacccccctctccatcattgcaggcgtgaaattggggaggccactgagcacctgactcagctcgaggcagacctgacagatgtgcaagatgagaacttcaatgccaaccatgcactaagtggtctggagcgagataggcttgcacttaatctcacactgcggcagctcgaccagcatcttgacttgctcaaacattcaaacttcctgggtgagttgttagccaactaggcaggtggaccagggtcagtcttcagctgactgtctgcctctgcccaatttaggtgcctatgacagcatccggcatgcccatagccagtctgcagaggcagaacgtcgtgccaatacctcagccctggcagtacctagccctgtgagcaactcggcaagtgctcggcatcggacagaggcactgatggatgctcagaaggaggacttcaacagcaaacacatggccaaccagcgggcacttggcaagctctctgcccatacccacaccctgagcctgacagacataaatgagctggtgaggttgaagtgttgggtggggcaggtgggtgtagatgttcctctcacagggccctgacttgttctgtgcctggcaggtgtgtggggcaccaggggatgcaccctgtgctacaagcccttgtgggggtgccggctgtcgagatgaggatgggcagccgcgctgtgggggcctcagctgcaatggggcagcggctacagcagacctagcactgggccgggcccggcacacacaggcagagctgcagcgggcactggcagaaggtggtagcatcctcagcagagtggctgagactcgtcggcaggcaagcgaggcacagcagcgggcccaggcagccctggacaaggctaatgcttccaggggacaggtggaacaggccaaccaggaacttcaagaacttatccagagtgtgaaggacttcctcaaccgtgagcctcccacgtgtcccaggccatgtggttgtcccctttggcaactcccggtgtctgtatctcccttggttcatacttgagcctcagggactacactggattagtgtttatgatcccttgactggctcctgagttattgcccatatgtggtcccaggtccatgttcttgagtctgagccccttgtatagtccctgtccttgtgattatatccttatgcctggtaacaaacccctatcccatgtacatgtcctgagtccataccccaaaactgtatcctcatgcccatgctggagaatctatgttcttaagttcttgctgtgtccctatagaggagggggctgatcctgatagcattgaaatggtggccacacgggtgctagagctctccatcccagcttcagctgagcagatccagcacctggcgggtgcgattgcagagcgagtccggagcctggcagatgtggatgcgatcctggcacgtactgtaggagatgtgcgtcgtgccgagcagctactgcaggatgcacggcgggcaaggtctgaccccatccctggcccctatccctgacacctggttttgatacctccaggttctgattcccccttctccccaggagctgggctgaggatgagaaacagaaggcagagacagtacaggcagcactggaggaggcccagcgggcacagggtattgcccagggtgccatccggggggcagtggctgacacacgggacacagagcagaccctgtaccaggtgaggtcttcctaggacatcagtgggacaaggttatgggcatgaaccgtagatctgtgtaacctttggctcacccatggcaggtacaggagaggatggcaggtgcagagcgggcactgagctctgcaggtgaaagggctcggcagttggatgctctcctggaggctctgaaattgaaacgggcaggaaatagtctggcagcctctacagcagaagaaacggcaggcagtgcccagggtcgtgcccaggaggctgagcaggtgggttgaggcagagccagctggagaaggtaggggtggaagatgggcctccactgagctaccacgctaacctaaccctctacatctgcagctgctacgcggtcctctgggtgatcagtaccagacggtgaaggccctagctgagcgcaaggcccaaggtgtgctggctgcacaggcaagggcagaacaactgcgggatgaggctcgggacctgttgcaagccgctcaggacaagctgcagcggctacagggtaagaaatggggcaccagagacacaagactgcgggaaaccccccctaaactgacacctgcccttcctagaattggaaggcacctatgaggaaaatgagcgggcactggagagtaaggcagcccagttggacgggttggaggccaggatgcgcagcgtgcttcaagccatcaacttgcaggtgcagatctacaacacctgccagtgacccctgcccaaggcctaccccagttcctagcactgccccacatgcatgtctgcctatgcactgaagagctcttggcccggcagggcccccaataaaccagtgtgaacccccactgtgttgtctggactctgatttggggcgggcgggggagtctccaggggaacctcgaggttgcccccagcagaacccatgcaccgctaagccacccgagcaccgcctccttccgctcgggcccgccccggagctgcgggtcgctccgagcccattcccgccggaagtgcgtcaccagcttggcgctccgcctccctcggccttagctagaagtcgaaacaaaacaagccgctaaggcggtggcggcggcgccgggacgggggaggggcgcgccggaaccggaaccgacctgcgccggaaccggaacggagagcgggttgccagggcccgaagagggctggctgcggcggtctcgctcggtgagtggagcaggctgcaactcgctggcttggccgcagcggggaggccgcaacgcgcggccgcggcggcctgttcaaggtcacgggccgtgccagtccctacccctagtgccccgcagcgtgccagcccactgatgccggcagggccgttacgctatgcctgtggccagcctcccacctgggagaggactggcggccagcgagggcaacttcgtgggagaggtggtggcgggctcggggttcagaggctgaagctgggtcgcagctcgaccggggcgctgatctgtggtcagtaaccccgcgctgccatttcaggccggctcgggtctctaaacagccccttacccgcctcgacgtccctggggcatgggggagggacgcgaccttcggctggggcctgggtgcaagaaggaggcgycggtggcaggtgtcattaaagatccagcccaccagtaccacatctgacctgtagaagggtatcctgccatccctccttcctcctttacacacttaggggaacacagactagtcattatctgtcctgctactggttcaggccaggcttgaggctgccaggagtcctggatctgtggtcctccccagcctcatctcagtatctagtttcaagaccttcattttggaggaggaaacagtccagaatccactggtgggtctgtgggaaactgtagtggtccttgtggctcagagctcatgagtgaaggcatctgggaaggaaggtgataatttctgttccagtctcaaactggatgcccatcctgccttagtactggagcagggttgctgctgaagaggtagcgtgacatctagatacacttttcagtccctttctgcttgggacagcagctggggagaggactttctcttgaaatgaagaaggaccaagcagtacataggagcaggttcttgccaagggtgggagctggcaggaggcaggtggagtgccttagccccaggactttttctgggcaatggtagaacctgggttgagcctgtttacagccacagagcctggttctcctgcggcttgtctcctgtcctgccttcctcctccaccttctatttctccagtggtgactaagcagccagtgagagtgaaggaaaagtgagcaccctgctcggagtgccagccctgtgggctggagccgtggctcctctccagattggtggagtagcctggtcccaggccatgacttccttgacctggtgccccctcagtgaggctttcacctgtgtgggactgttatkgtgggtatctatgaggcttggccagaagtggttgctgctacttgcattatttattacctcttcagaatatcctgagagtgtccaggggtacttaagagatgagaagatacagctctgtagcattagtgtcctgtgttgctgagccctgggtgtagctaaagagcaagttgttgggtcttggcagtgatcactggcttctttccattaggctgtccgttccttgctggagaatttggccacaaagagytgccaagatagctgggccaggaagaaagcgccgcagccctgacccagacgctgttgccgaccccggggcactctggctgtcgaccaagcggctcaagatgtctggcggggccagtgccacaggcccaaggagagggcccccaggactggaggacaccactagtaagaagaagcagaaggatcgagcaaaccaggagagcaagsatggagatcctaggaaaggtgggagtggcattcccagagtaattgtggccttctctgcctcccatcttattggtatacagattggggtttgggagatgactttcttgttcttctctctgtcctggtttgatgatgagagaagaaggacccatgataacctcagtagagcctcagctttgaagcctgagtacttggctaagatccagaagatggtgctgttggggggcttgccttctttcctttttaaacttttttcttttttttgaacctgttctttttttccttttttttttgagatggagtctcattctgtagcccaggctggagtgcagtggtgcaatattggctcactgcaacgtccacctcctggttcaggtgattgtcctgcctcagcctcccaagtagctgggattacaggtgcatgccaccacgcaaggctaattttttttttttttttgagacaatgtctcactctgtcatccaggctagagtgtagtggcrtcttggctcactgcgggctctgcctcccgggttcaagtgattctgctgcctcagcctcccaagtagcctcagcctcccaagtagctgggattacaggtatgcaccaccacactcagctaatttttgtatttttagtagagacggggtttcaccatgttggccagactggtcacaaactcctgacctcaggtgatccacccacctcggcctctcaaagtgctgggattgcaggcgtgaaccaccgtgcctgtcccttttttttttttttttttaaaggcagggtctcactcttgcacagattggagtgcagtgcaggtgtgatcgtagcttactgcatcctcaaagtcctgggctcaagcagtcctcctacctcagcctcctcaccatgcttgactaatttttcttattttttttttagagacagggtctcgatatgttgcccaggctggtcttgaacctctggcctcaggtgatccttctgcctcagcctcccatgcagctgggatcacaggctcacgccaccgtacccggctgttctttccttcatcgtcagggtcagcatccactcctcaagaggagcagaccaaagagggtcagtaacgaatgggctttttgttgctagggaaggggagggggcacttgcaatttggctcccatctgaagcagtttcattaggctgggtctctgttacctgcttatcaccatcaggagcttgtgaagaccctcatgatctcttggctactcccactccagagttgttgctcgattggaggcagagtgcagaagaggtgattgtcaagcttcgtgtgggagtaggtcccctgcagctggaggatgtagatgctgctttcacagatacagactgtgtggtgcggtttgcaggtgtgtccatctgccctgagcacagtagtatgtttgaatcttctgatatctcctatcctacctcatggaccctgctctgtccccaggtggtcagcagtggggtggtgtcttctatgctgagataaaaagctcttgtgctaaagtgcaaacccgcaagggcagtctcctgcacctgacactgcccaaaaaggtgcctatgctcacgtggccctccctcctggtgagttctagtagtacagggttgggtagggataccagtgtagtcgacagggcctgactgctgtatctttggcagaagaaacctctagggacccaggagctggtgccggggctgcggtgccaggagaatgggcaggaactgtctcccattgccctggagccaggccctgagccccaccgggctaagcaggaggcccggaaccagaagcgggcccagggccgtggtgaggtaggcgcaggggctggccccggggcccaggcagggcccagcgccaagagggctgtgcatctctgcagagggccagagggggacgggtccagggatgaccctggaccccggggtgatgccccacccttcgtggctgacccagccacccaggtgagagctgggcacctgtttgggtgttaggagatggggggaaagggtgtgcactggagtgggagccacctggcagacccagggctgattctttccacaatcttgccattaataggttgaggctgatgaacagctttgcataccaccgctgaactcccaaacctgyctcctgggctcagaggagaatttagcccctttggcaggagagaaagcagtgcctcccgggaatgacccagtctctccagccatggtccggagcagaaaccctgggaaagatgactgtgccaaggaggagatggcagtggcagcagatgctgcaaccttggtggatggtaaaggtgggggtgggcaggcagagccctaggttgggttgcaaagtttgtaggtggatagagagtagcaataggctggaacctgtcctggttggggctgagccatggtctcaatatagagcccgagtcgatggtgaacctggcgtttgtcaagaatgactcgtatgagaagggcccggattcmgtggtggtgcacgtgtacgtgaaggagatctgcagggacacctcaagagtacttttccgtgagcaggacttcacgctcatcttccagaccaggtgggtgggtagatgatggggcaaacaatgcctcaggtgggacagtatgtctcatgctcttcctcttgtccttcctcctatcctgctgtgcctctgcagggatggaaacttcctgaggctgcacccgggctgtgggccccacaccaccttccgttggcaggtgaagctcaggtgggtggtgcccggccccaccactgtgcctgtcctaccccgtgggctccatctccctggctcatctatcctgatgctcattcctcctaagtccctgagttcagccttttcccacaggaatctgattgagccagagcagtgcaccttctgtttcacggcttctcgcatcgacatctgccttcgtaagaggcagagtcagcgctgggggggcctggaggccccggctgcacgaggtctgcacacgagctcccttcattgcccagttccacgtgaccaggacccaaacccctgtcacatgctgctaaccaccagccctctcattccccctttttaaggtgcagtgggtggtgcaaaggttgccgtgccgacaggtccaacccctctggattcaaccccaccaggaggtgctccccaccccctgacaggccaggaggaggcccgggctgtggagaaggataaatccaaggcacgatctgaggacacagggctagacagtgtggcaacccgcacacccatggagcatgtaaccccaaagccagagacacacctggcctcggtgagaattctggggtgggaaggacgaagaatggaggctggagagtcttggggctgttctctcatgtcgtctttgctcctgcagcccaagcctacatgcatggtgcctcccatgccccacagcccagttagtggagacagcgtggaggaggaggaagaggaagagaagaaggtgtgtctgccaggcttcactggccttgtcaatttaggcaacacctgcttcatgaacagcgtcattcagtctctgtccaacactcgggaactccgggacttcttccatggtgagggcagggcctggagcctgggttatgggcagagagagtgcctttgttcctcacacctttgctcggctactattcctagaccgctcctttgaggctgagatcaactacaacaacccactagggactggtgggcgtctggccattggctttgccgtgctgcttcgggcgctgtggaagggcacccaccatgccttccagccttccaagttgaaggtgatctgtgaccactgtcacccttggctggagggggcggggagggccagccagctgggtgtgcagtgggtgctagggcttcatgttcacaccttggctcctgtatccaggccattgtggcgagtaaggccagccagttcacaggctatgcacagcatgatgcccaggagttcatggctttcctgctggatgggctgcacgaggacctgaatcgcattcagaacaagccctacacagagaccgtggattcagatgggcggcccgatgaggtcagggttagggacagagggtgggcatgtctcatgagcatcccagccccyggtactctttggttctcaccactctgcctctcaggtggtagctgaggaagcatggcagcggcacaagatgaggaatgactctttcatcgtggacctatttcaggggcagtacaagtcgaagctggtgtgccctgtgtgtgccaaggtgtgatgggctcccctggaaagagaccccctagttcagctcagctattctggtcacattaggttcagaggcatgtgcatcttaaggtgctacagggcaaggtttgggcaaagaagctggcagggaggccttaggattctatttgggctgaagagcccactcagggtaggcttcctgactgagggaaaagtgatgttagagctcaaaggtgttgtagcagggttgtgggcacatggggtgcaagtgtgaggccaattcgtaaagtggctaagctgagtagggctttgagtgccagaaagaaggattgttatttcctggtggtcctcctgccctgtctagtgtcctgaagcctgagagtttgctggttggctgtgggggccctgagagccatcagaagccccggaatgggctctctgagcatgagcatcttatctcccactctgtgtgcagctacccagtgccacctctacatccacaggtctccatcacttttgacccgtttctttatctgccggtgcccttgccacaaaagcaaaaggttctccctgtcttttattttgcccgagagccccacagcaagcccatcaaggtgaggagtaagcccctaccctctgggctgttctagagaacgtggcccacctccctcactgactgccctttttgccacagttcctggtgagcgtcagcaaggagaactccactgcgagcgaagtattggactccctctctcagagtgttcatgtgaagcctgagaacctgcgtttggcrgaggtatctttgtccttccttgggctatcacatgtgtggatgtgtgtgtgtactcaccacagacgtgtgtacagtcattggcatctacagacatacacatgggctgggcacagtggctcatgcctgtagtcccagcactttgtgaggccgaggtgggcagatcacttgagcccaggagtttgggaccagcctgggcaacttggtgaaacactgtctctacaagaaataaaattagctgggcatggtggtacgtgttatagtcccagctacttgggaggctgaggcaagaggctcacttgagcccgggatgtggaggttgcagtgagcagagattgcaccacagcactccagcctgggtgacagagtgagactctgtctcaaaaataaataaataaatagataaaaaaataaaaatagggccaggcgyggtggctcatgcctgtaatcccagctctttgggaggccaaggctgatggatcacaaggtcaggagatccagaccaccctggcttacatggtgaaaccccacctctactaaaaatacaggaaaagttagccgggcgtggtggcacatgtctgtagtcccagctgctcaggaggctgaggcaggagaatcgcttgaacctgggaggcagaggttgcagtgagccgagatcgcgccactgcactccagcctgggtgacagagtgagactctgtctcaaaaataaaataaaataaaataaaaatagacatacacatgagtatgcctgtgactgtacaaaaacaggcgatgtgctgttattttttctgtgcaacagaagtgccctcagttcctagccattatcagggtttattcccctttgtggtggtggatcccaactgcatttccctttttagacaaggagcttgagctgcaggactatccctatgttcgctctgcctctccctctatcctgctgctctctccttttatcccagttgtgtgtgctagctctccccaggggttcctagcctttagcctgacagtgttggttttcttaggggtaagagtggggaggaggctctttgaatgtggaccctccatgataatatgttacagtcttataaggctatgctagttatagcagggcagagtccctcagtgtggagagctggtgtggttgatatctgcctcacacctggtctttcaggccctctgatgcaccaggctccttatggcattgggcactgaracaggtgccagcagaggcataagcctatttggrcctacagacctcaccactgcccacataracccaaggcagggccaagccttcttaaactctggggcagggctagggaaagggcttatcctcacgtgggatctgtgtgttctctgtccccaggtaattaagaatcgttttcatcgtgtgttcctaccctcccactcactggacactgtgtccccatctgatacgctcctctgctttgagctgctatcctcaragttggctaaggagcgggtagtggtgctagaggtgcaacaggtgagtgggggccaacctgatggcacagcgccctggtgggtggggcacttcttcctggtcttgctgagccagacgacccacccwagcgcccccaggtgcccagcgtccccatctccaagtgtgcagcctgccagcggaagcaacagtcggaggatgaaaagctgaagcgctgtacccggtgctaccgtgtgggctactgcaaccagtgaggacccccatggtctcccctaccctttctttccaccttccatgtgccaccctgctccttcccttcacaccaaggcacatatgcttaagctttctacttgccaccctactttaccaggctctgggggaggcagggctggcgtacccagttcccagggactatgactagcccccagtatggagtcataggagatggggctaagggcctatccttgtcttcctcttcccgtcaggctctgccagaaaacccactggcctgaccacaagggcctctgccgacctgagaacatyggctaccccttcctggtcagtgtacctgcctcacgcctcacttatgcccgcctcgctcagttgctagagggctatgcccggtaagtgcccagtggttggactagagtggtgtaggtgggggcagaggtgctagatgggctggtcaggagtcttacttgcgttgttctctgttgccaggtactctgtgagtgtattccagccaccctttcagccaggccgcatggccttggagtctcagagccctggctgcaccacactgctctccacaggttccctggaggctggggacagcgagagagaccccattcagccacctgagctccagctggtgacccctatggctgagggggacacagggcttccccgggtgtgggcagcccctgaccggggtcctgtgcccagcrccagtggaatttcttctgagatgctggccagtgggcccattgaggttggctccttgccagctggcgagagggtgtcccgacccgaaggtaagatccagtgaaaggctctrgaagctggggaggaggatargggaggatggagggggctgttgtttagggcctggtgggcctggtgaggccctgatgggcagggaagctttgattatcatgttctcacacagctgctgtgcctgggtaccagcatccaagtgaagctwtgaatgcccacacaccccagttcttcatctataaaattgattcatccaaccgagagcagcggctagaggacaaaggtgtctgaggctgtgggtgggagccatggggtgggttgagctggctgttctccacagctgcatgacctctytccctgcgaatctccaggagacaccccactggagctgggtgacgactgtagcctggctctcgtctggcggaacaatgagcgcttgcaggagtttgtgttggtagcctccaaggagctggaatgtgctgaggatccaggctctgccggtgaggctgcccgggccggccacttcaccctggaccagtgcctcaacctcttcacacggcctgaggtgctggcacccgaggaggcctggtgagaacagagcagcaagtagataagggggcaggatggagaagagagagacttgctggtcctgacccaatctctgtccccaccaggtactgcccacagtgcaaacagcaccgtgaggcctccaagcagctgttgctatggcgcctgccaaatgttctcatcgtgcagctcaagcgcttctcctttcgtagttttatctggcgtgacaagatcaatgacttggtggagttccctgttaggtaagcagtggaccttggtaactgtgggtggggtgtgaggaccaggatgggcatcctgagcgcctgttgcctgtctcacccctccctgactggacctgacctgcaggaacctggacctgagcaagttctgcattggtcagaaagaggagcagctgcccagctacgatctatatgctgtcatcaaccactatggaggcatgattggtggccactacactgcctgtgcacgcctgcccaatgatcgtagcagtcagcgcagtgacgtgggtgagggcacacacagccagcaggataggtggtaggggtggtggtgcagactttgttcacactcttcccaccctgctgtaggctggcgcttgtttgatgacagcacagtgacaacggtagacgagagccaggttgtgacgcgttatgcctatgtactcttctaccgccggcggaactctcctgtggagaggccccccagggcaggtcactctgagcaccacccagacctaggccctgcagctgaggctgctgccagccaggtgaggcatgtgggaggctttacagaatactgggggacagttcacagactggggccgggttgggggatatagcttcctctcctccagccacaggcccattgagccttgggattcatgagaattgcagagttctcttaacatcaragctttagccagaggcatccccatgccttggggacactaacaaacatacaagtacactaacatgctgccactggcaagcacattggcacctacttggcacaggtcaggcaactgctctgaacctcactgggcactatgctgtgaatgaactatacctgacactctcctagatttcctctgcacattccccacatgctggcccacacaccctcacttgtgatgtccctgagttctagtgtgcactcaagacaaggcctatttgggctggccatggcctctggtggctgttatactctttgaggtaagcatctgtctttgctgagccttcaggatcttctctttagtgacatggtgtgccataggcccagttagtgggcgtaggcacatctcttttctggactggccgtctcctttctggctccatcctctcttgagccttctctgtcaagcttagagaaatccttgcagaagactggtcaggatctgggtatgggtgggaaggagcaaggagattgctctgggattggcagtcctgttctctatgaatcggtgtcctttggggaggcctggactgaaatactaaccagataactcccctcccacctccatgcggagctgcatgtggattgagagctgtttagggtaggccaaaatgctgtcaagattctcttacccttgtgctcttactctggacagccctgaggttggctgcctgccttcctccttgctgtttgatctagaatgcagggtgttagccccagtcaccccaggtgggactgtcatggctaagggtctcagggacactgggtcctccccacccccggggtgctgatggccgtttccacataccctaggcttcccggatttggcaggagctggaggctgaggaggagccggtgcctgaggggtctgggcccctgggtccctgggggccccaagactgggtgggccccctaccacgtggccctaccacaccagatgagggctgcctccggtactttgtcctgggcaccgtggcggctttggtggccctcgtgctcaacgtgttctatcctctggtatcccagagtcgctggagatgagctcgcctgcaggcagctgctgtgagctggcctacctgcctgccccaggccatgcctgcctttgttgtggggaacacctctgggctttgggcctcagcttatgcatctggtgggagagggtggggaggttgtggcccctgcaggggcagagtatcctagggtgtgtatccatctggctgtctgtccattcatcctgctgctctgacccttggcctcaggcttggccctgcccaagctacttcctgtacttaaaagtgttaataaaaccagactattcaggcccaatctcgtctctctgtctcaacgccgctgctgtctgcgcctgccttgggaccctcccttgggtgccagggctccaagccagcacccccgggatgccaggcggcatgctgggcagcccccaacccctgtcctcgtattctgttgcagggactaggccctggccaggcccccgaggtggcccccacgcggacagcccctgaacgcttcgccccccctgtggatcggccagcccccacctacagcaacatggaggaggtggattagcaggtccctggctgatgggggggactgggtttgggacacccacacagagggccagctccttgccgcttctccttctctaacccagaggacactggctctgtcartgggaagctgaggggtatgatttgggtgtggagacctctcaggttgggacttcttgtcagcttggacccctgaccagtgggctttggcttctccagccgcctccagtgctgcgtgatttgattctgwtgtaccttcaattcttctgacccgcattataaacattataattttattctaaaaattgtaattttttttgcattttggaagtgactgctgctgtttaaatatattttaaaaataaataataagtaagtagacttagtgactgtgatccaccacatgctggggccacctcccctccccatcatttgcggtgtgtatgtgtgtgtatgtgtgtttatatatgagagaccctgaaagtgccctagtctgaagggagatgatggggtcccagctcatgtcctatgggtcatgaagcccccagtgctatcagctctttggagcctacctgctgctctttcatcccactggttctggatcctacataagaggcagcttggtaggcatcgtcaggatctcaatatagccaagggacagaggagtatatgaagcactggagctgacagcgtggagtaaaaggtgcattcaccagagcagcctggggctgacaagtcagggaggacttgggggacagaagtactgggagatcttcctcctcctctcctgtcctcagctttttctttgctgtaacttgaacactaactgcatccctgcaggtaacagagcaggaggaaaactgctgtggggcagatcttgctgccctgaaaagaggacaagcagagaggaccagagtgaatcttgtctgacttctattggagggagggtgctggggcctgccagcctgaagagtcttcccttaagagttcctgaagccttccttctttggccaggcatggggggctcacacttgtaatccccgcactttgagaggccgaggcgagtgggtcatgaggtcaggagttcgagaccagcctggccaagatggtgaaaccccgtctctactaaaaatacaaaaattaggtgcagtggcgggcacctgtaatcccagctacttgggaggctgaggcaggagaatcgcttgaacctgggaggcggaggttgcagggagccgagatcgcgccactgcactctagcctgggcgacagagcaagactccgtctcaaaaaaaaaaaaaaaaaaaaagttgctgaaactggccaagtgtggtggcttatgcctgtaatcccagcactttggggcgaggtgggaggatagcttgagcctaggagttcaggaccagcctgggcaacatagtgagaccctgtctttaccaaaaatataaaaattagctggctcttatggtatgcacttgtagtcccaaatatttcagaggctgagatgggaggatcgtttgagcccaggaggttgctggaccctacctctgtccattccacgactgggccttgctggctgctgcctggtttttccacttggtcatctttgtcttgacttttcctggaagcagtgccaggggcttatgcaggcaagctaacctccagactgggcccatacaatttaacatttctgctttgtgcaagtcgtagacatctagggcactagctggatatcgactggtatgctaccacttgtggcattcttggtgacactggtggggctactgcctcattctatgacttgtagccatggcgtccacagtgtaccatgaagtaaccagggaagggagtgcagatcttgatctcattgagggagccatcactagacctgtaggacttggtgatggtgctacagtgaatctattggcagcatcaggtactgaggaaatagtggcagtggcaggcactctgcatggctttgctcaccatgggcacctttatggtgggctgggtacttgcagcttcaaatttggtgcacggctggtgtggctatggctctgcttcttggtacctgtccttagcaccactggtctgcatcccctgcttaattcctgcacctggcctttctcatgcagtacactgcagggctaggcatctggctggggccacggggccatggagatgtgggaagccccaggacagcattggacctggatagcgatacagcatgtggccctggtctgcacctggcatgtgatcattaggtggtatccagatgtaggcccagacttggaggttggtcattaataatgggatgtgggcacaaaagacacagaatatagataaagactagtcaggatcctgcctattccttgaaggtccagaagtatgagcatcaccaattcctgcaagagctccaatctcaaatttggggatttccaccatcccaccaccagctgctcattctctgcaaccccctacctcagtcccttactaccttagtcccttttctcacacacacacaaagtctctgttctgtttcagccagcaggtcctggaagtccagtgagactgtggaaagatccccaagcacaacagctataatcatgaagctataaccatctcatttgtcccaccctctcacaagctcaataaaatatcctctcaaaggcctgcagagggatttcaaggtctaatttgcttgtggttttcctgataatgctttggcaagagggtaagtgtgggatgagatttttttttcttttctttttttttttttgagacagtcttactctgttgaccaggctggagtgcagtggcacaatctcggctcactgcaacttccgcctcccaggttcaagcgattctccagcctcagcctcctgagtagctgggattacaggcgtgcgccatcacgcccggctaatttttgtatttttagtagagacagggtttcaccatgttggcgaggctgatctcgaactcctggcctcaagtgatccgcccgcctcggcctcccaaagtgctgggattaaaggcctgagccactgcgcccggccaagattttaaaccaaatcatcatagaacttatgtgaggtccctcctggcccagacccgtcccttccctttcctggccagctgtgtccaagtgggcacctgaaaaccggcggacttatggggcccctggatcggtcattccacacattctctacgatggagtctggatgagggatttcctgggcttcatttgttcaactgtttccatgacaactccaaagctgtggcgtcaaaagcgtgacagggactcgcatttgcccccgaggacaattactatattgagatggagttaccagggctgaagtagaaaagtcagagcaaaaccacgcctgtgtcttcctcctgcctcagggacgaacaccttccttccaggtccgtggcaaatatctccaaaagccctgccgcctgccaacaccccttcaagttcccagttccacggaggcggaagcaaagcccccggaaaggccggtttgtccgccctgtgttgtttaaaggggatagacgaccttggagcgccccgccccctcccgccaaggaaggaccccattggctctccccggaggcttcactctcattggtcagcgagtgaatgccgacctgcagactggggcctaagtttcttttagtttccggtgtctctgcaatggcggctctagactccctgtcgctcttcactagcctcggcctgagcgagcagaaggcccgcgagacgctcaagaactcggctctgagcgcgcagctgcgcgaggccgctactcaggtgcgagcccctctgcccccggcctggtttgcagaccatgctgcaacgcagcgcggggcggggtccagatcccgacctgccccgtttgtcccgccctttcctctcactgagcgcggggcttctctcttgacccctctgacctcaggctcagcagaccctgggttccaccattgacaaagctaccgggatcctgttatatggcttggcctcccgactcagggatacccggcgtctctccttccttgtaagctacatagccagtaagaagatccacactgagccccagctaagcggtgagacccctacctgtcctgccagttcgcaccaatgcctcccttcagccaagacccctgtcttccctttttgccaagtcctccagtttctttctagacacctagttctgcacaggcactgaggcatggaaggggtggcctatggtgagactgacacgggaactgtcagggtctgaggggggatccactctcgacacgtgcttctttcttccctgtgttctctagggtggtggtgccagggcttaacttttcaggaggccagactatccttggagtttcatgagattaggaccctgtctgtccacttcttggagcagagatgccacaaactcacgggctctttcttctcagctgcccttgagtatgtgcggagtcaccccttggaccccatcgacactgtggacttcgagcgggaatgtggcgtgggtgtcattgtgaccccagagcagattgaggaggctgtgagtctttccccaggcatcgtctgcctccccagtcctggccatggaaaggagtggctcagtttccctcctcaggaagacccagagtgagggtgtgggttcccagaatatctctaaaggtggctttcctgaaccacatggtttggctttctgcaggtggaggctgctattaacaggcaccggccccagctcctggtggaacgttaccatttcaacatggggctgctgatgggtgagcagggcctggaacggggctatattgttctctctggtcatgccttttcttctgggcacgagtgagaaggaggtgggggaaggaacaggagtgacttaaagtggtctggctgggctcaggctctggttctggtggtcagccaggacctttccttgggaaagaggtggggggagtactcttttttgcctttctgcagctccttgtgcctatgcttctaggagaggctcgggctgtgctgaagtgggcagatggcaaaatgatcaagaatgaagtggacatgcaggtgagcgtgcttcactaagctgaagctggcaaagactctggcatgaacagagcctggaatccactaagggataaaaggcaggaagagggctgggcatggtggctcacgcttctgatcccagcactttgggaggctgaggcaggaggattacttgagcccaggagttcaagaccagcctgagcaacatattgagaactcctctctacagaaaatttaaaaattagccagacatggtggtgtatacctgtagtcccagcaatttgtggggctgtggtgggaagattgcttgaatctaagagatcaaggctgcagtaagctctgattgcaccactgcactccatcctggagtacagaatgagaccctgtctcaaaatcaacaacaataaaaaaaggtgggagggggctgggcatggtggctcacacctgtaatcccaacactattgggaggctgaggtgggcagatcacctgaggtcaggagtttgagaacagcctggccaacatggtgaaaccccatctctacaaaaagtacaaaaattagctgggtgtggtggcgggcacatgcagtcccaggtactcagaagggctgaggtaggaaaatcgcttgaatccaggaggcggaggttgcagtgagcggagactgtgccattgcattccagcctgggcaacatgagcaagactccagtctgggcaacaagagcaagagcattttaagctagcagacccacatgagaagagatgggatgggctaggtaggttttttcagtcagtgctggtagataggccaggaagccttgggttggtgggtaggattagtcaggggctccttgaaagaggatactcctgcctctgcctgattctggtctctgctcaggtcctccaccttctgggccccaagttggaggctgatctggagaagaagttcaaggtagggatgggcatggccctgagtccctgagggtgaggtgaggtatggtgagacttcaggctggggaaggaagtgtctgaccacagggatcccaagaccctatccaagagaaaatttgatgccattttctgaagcacctggggcttctttcaggtggcaaaagctcggctagaagaaacagaccggaggacggcaaaggatgtggtggagaatggtgagaagcttgagactcctgtcacagcattcagctccctgacttctgaacctcctcagaagagtccttacaggctcctcaggcccttggcttactcagtaccctgacttctgtctcaagactgggattcctggtgtttcttttgttccctttgccc

SEQ ID NO: 8849 - DNA, 12854 bp, Homo sapiens
ccataatttctttgaacattccatatacctttatgtgcatatattctcatccgcccctagtccctccagaatgctgtatggtaacaagcagcatggctcctgggattaaaatctcagctggaagttgctgggccagagattatcaccagatgtgtctccagtcctggctcacaggaggaccactttctgattagctccacaggcagtgctggctttgcttgtttctgttaactccctctgcagagccagaggtggcttttcctgatgtctataatggtctggaatgggcagggaaccatcccatcggccacactgtctgtctgggtcaagtccacggtcattcagtgccgctggcattgttggaaagcaggaccctgggctgcagtctgtggagacctgaaacaacctgtgtcagttttcaaccaaagccccagcttggaaaaatgagaactccatttctttccagcttcagaaaacagagtgcatacctctttgatagtggaaaaaagatttacacaattagtttagatcaggtgaggacccactgaacccttgacccaaatgcaagctgaactttctggaggttcacagtttctaatttttcggttttcaagtgcttctgggtctcagccttgattagcagtagaaatgttgatcccttgcagggagagccatccctgcactagcccgcactgctgggagccagtggaatgagtctccaagcattcctgctcctgagcttttggcatttttggtcatgttttttaaacatgaggtactgatggaatatatttgcaaattagcatatttttgcctctgttcacagctctatttttaactgtatcatttatttacttgtctcatcaaaggcacagcaagaatatacccagaaccaagccctatccttggggacaaagagaaaacattctccccaccacccccagacacttgatcatgtaatcagtccttagaggaccttgttgggaggtgttaacagcccctgatgaagccatcagttaaacaaatgagtcaacctctgatctctccaggaacctaaaacagctcttgccatttggtaatgctgggaactcactaccttactaaaataatgcactaaacattgaaaatggatgagttgttgtctattcggacttagtctcaaaaatctgccattgttgtgtttaggtgagtgagtggcctccagcatctagaagtcgatatttgtctgggagtgtcagtcagagctttgtttcttctcaggaatgtgttcatataagcaacattgaaagcattgctgcaaactgagcttgaattcttctcacctcttatgtagcctccgaaatccaagggaaaatgctatcaatgaacggattcagctttcaaatgcctaacttctagtcatcttggcagtctgataaatttaagttttttaagtgaatttgtcatagagtggggtttaggatgccaaatacataactcatttatatttattttttaaaagcttatgatcatcttcttcaacccataaaacatttttcgaatgacaaaacagaaaatgtatacttttataatccagtttttaaaaagtcaaagctatgataatcttgtcatttcagaaaggtaatcccagtgcatatttctccatgcagcttattgacgtaacctaagatgagaagacactactattcatgcctggtcagaaagcacagactggctatgtaacagccccagcagggaagcactgggtgcaagacactggattaaattgagacaaatgtttgcttctcagaatggcagtgaccatgggtgcttgactgtgggtggggatgacagatttcatgctttcctctttcagaatcatgtctccaacctcctttgtatatggcgagtccgtggacgcagccaacttcattcagctggatgacctggagtgtcactttcagcccatcaatatcacccttcaggtacccactcctggagacctcctctgtccgtgggggctaacggaagggcacatgggatgtctctcctacagagggctaagctcttgtcaggagaaacccttctgtggttggctggtgtggtgtgtgtgtgagatctgtaaccacacacagaatgaatccttttcgatgcctggtactctgctgtgcaggcccctctgctttttcaggatttggaaggacaggtccacgtcatgaatgccagttttccccaagaagccctctgtgtggtggaggcctcagccaatgtcccagcccagatgaccccatgaggacccctttctgttctccatcattccccaccttctgggcagggctgcctcagaggatttgctgtgtcccttcctcctgagattttcttgccagctcatccaggagcccactcctcctgcaggggaacagcctttcggaagggcagttttataagaacagaggagtgtgagcccctgtgagcccccacgggaggcacgctgctccctcactgagccatggctggcttgcccaggcacacaggcatcatttccagcaagtccacttggtgtagactgtggacctcatgaaggacactgtttcttctcttagttgggggtcagcaaactttttctgaaaagagccatggggtaatttaggctttgtgggccatttggcctctgcagcatctattcaaccatacttctgtagttcaaaggcagccatagataacacagaaacaaaattttagttccttatagacaatgaaatttgaatttcgtataattttcacatcatgaaatgtaggcccaagcgagaaaggatatcctgaaggtcccagagctgggagaagccgggctggggccaagacctggcggcactggccggaccctgtgtggatgaagtgaaggagatgggcccaactcacccataggacacaacagtccatatctcctcactctctggttctacctcccagaactcttctctgcctcttgcgtccttccccatggagagatggtttcccactctggcattcactgctgtggctaaataataattattttctttccttgtggcctctcctaggtggacttaggggatgacaaataatgacagggtgagggtctagagaatgtggcagtaaaacatttgtgggctctgacaaacaatggtcttcctctccccagagtattctcccagcaacagactgcgaaaccatgatacataacacatgtccccagctcacagaggatgtgccttctgaccaactaagcccctgctgtcacaccctgctcttgatttacaggggagaaagggaaggatggggttagagcttgtttttgagacagtagagtgattgctgtgaacagcacctctgcatttctgaattgcttctcagagttattttatttttctcctttgcttttcgtaattgggtaggaaatagataaagacctgatgggtttatttcatcttagttgtttctactctttcctactcttatagttttgggggtgtcttgcaattaaagatgtagttcagaaaattatttagaagggttcaagtaacacagaccatgtaatgaagagggtatgagtgttgaaagaaggaaaagaagaacaggggttgcacagaatataccaaatgttcttatcaccctctggggaacaaaagaaagaaatctgagggtatgcagcttatccttccagttgtttctctgaaggtaatttttacagtgagtttaaagtttggtattcaggcaaatagttttcttcacatctgacctgaaataggactcaggctagagaatccagccctggggaatgagtgattggcatgtcccttagataaactcctccgtgatccattgcctcaggaagtgcacagcattcaatccagggttgagagagttgggtctgaaagattgatagtgtgtgccattgattagaaggagatccttctgtgctagcaaagcccactttttccttgagaattgtctgactacttatttattggtataatggttgttattgtggttgtcctgcaggaaggtcactaaccagcttggcagtgataatgaccagaaggtgaaaatactgtggaaggaggccaggaatacggagaaaatgtttctatatttccttattccagtaatattgttcctgaaggagaacataagactttccatatgaacagatttttctatgcttttaaaaatcggttattcaacaagctacataattgtttaaaggctccactgccattgtacacaggagaaaggcagaaatactagtcttgggcctgctttttacatttcatcatagtttttaaacagacacattaatttctcgacaataagaggcttttttggcatcaaaatttaaagcatttccccacctgaaaaacaatggccaaaaataatgcagatattacacatgaacatttgcagagaatccagtataaagacatttgttaaaaataaagatggtaatacaagctctcctgtcctcctggctctgatgagtgaaatagtgcaaatcagcatccttttcttcattgcttaccccattcatgcttgaaatgggatttcccagacatgccaggatgtttctttttaattctgtgcactcatgtttcacttcaaattagttatttcagctatggtcagatattccttccttttctatgtcttcaggttgtttggtgaatattgttcttttttgaatcaggagttggcaacccactcatctgctctatcagtttttatctatttattctttgaagtggaaccaactattgcagaaaaccaaagacacagttttctagggaagagctagctggagctagatcttcatacatcctgtcatgtgtgaagacctggtaagatttctggctttttgttggctctgcccttctgacctcaacttcagagttgcagattccctggattctctctctagtgcccaggccaccaagcagcatgtcattccttcctctctcctacttatcctttttaaacatttagttttaaattgacaaaacttatatattttatattttactcatctttttaaaaataacacctttattgagatatgattacataccttaaagttcacccatttaaagcatacaattcaattattttaatatgtttacacaattgtgaacctgtcatcatcatctagttgtagaatatttttaaatttttttcattttaatttttgtgagtacatggtaggtgtatatatttataggatacatgagatgttttgatacaggcatgcagtgcataataatcatgtaaaatgggggtatccatcccctcaagaaatcccttgtgtttcagacaatccaattatactcttttagttactttaaaatgtactattaaattattattgactatagtcaccctattgtgctatcaattgctaggtcttattctttcaatttttttaatccattaaccatccccaccaccccccgccacagccatccccccattatccttcccagcctctggttagcatccctctactctctgtctgcatgagttcaattgttttggttttgagttcaattgttttggttcaattttgtttgattttcacaaataagaacatgtgatgtttgtctttctatatctggcttatttctttccttttttttcttttttttttttgttttgttttgttttttgaggcagtgtctcactgtcactcaggctgctggagtgcagtggtgcagtctcagctcattgcagcctcaacctcctgggctcaagcaatcctcccacctcagcctcctgagtagctgggactagagttacacaccaccacgcctagctaattttttttgtggagagggggtcgggttttagatacggggtttcaccacgttgcccagctggtctcaaacatgcctgcctcccaaggcttattttacttagcataatgacctccagttccgtccttgttgttgcaaaattttggaacatttcaatcacccccaaaagaaatttcggccttttggccagaaccaccatcttccagtaattcgccaaaatgtcgaacacaaagggaaagaggaaaggcacctgatatatgttctctaggctttttagaaaacatggagttgtttttttggccacgtgtatgcaaatctataagaaaggtgacattatagacatcaagggaatgggtactgttcaaaaaggaaggccccgcaagtattaccatggctaaactgaaagagtctacggtgttacccagcatgctgttggcattgttataaacacacaagttaagggcaagattcttgccaagaaaattaatgtacgtattgagcacattaagcactctaagagccaagatagcttcctgaaacacgtgaaggaaaatgatcagaaaaagaaggaagctggcggcacagtagctcacgcctgtaatcctaacactttgggaggccgaggcaggcggatcacctgaggtcaggagtttgagaccaacctggccaacatggtgaaatcccgtctctactaaaatacaaaaattagccggggatggtggcagccayctgtaatcccagctactcaggaggctgaggcagggagaattgttcgaatccaggaggtggaagttgcagtgagccgaggttggcccactgcactccagcctgggcgacagagcaagactctgtcttaaaaaaaaaaaaaaaaaaaagaaggaagccaaacagaaagatacctgggtccaactgaagcaccagcctgcaccacccagagaagcacactttgtgagaaccaatgggaaggagcctgagctgctggaacctgttccctatgaattcatggcataataggtgtctaaaaaatgaaagacctctggactgtttaaaaaaaaaaagaaaaaagaaaaatccttaacccattgacatagcttcttgtattaatttcttattgctgctgtaacaaattactacaacatttgtggcttaaaacaacacaaatttgttatcttacagttctgaagaacagaagtccaaaatgggccccgctgggctaaaaccaaagtatcagggcctgtgttcttgccagaggcaccaggggaaaatccacttcttgcctttgccagcctctaagggctgcctgcattctttggctcatggcccccttccatcttcaaagccagcaatggctggtcaagtcttaggatgttctctttctgatctgacttctgcctcttccctatataaggactcttgtgagtacaatgtgctcacctggataattcaagataccctctttattttgaggtcgcttgattagcaaccttaattccccctggccacataacattcacaggttccacagatgaggacatggacatctttggggggcctgtcatgctgcctgtcctactccctattcttcctgctccccagccctaggcaaccgctaatctactttctgtctctagagatctactcactttttttattcctctgcatattctgtttcttcctcgagtttcatgttcagctttttcctctccctccttgctcttactggtctctgtgacctccatctttttcctcatttctcaggaaatgattgacttctgaagacagaaaatggagaaatgctagggaaaacaagagaggcaaagttttatagaaccaaatgctgagacagaagaggggtacagttgtgcaagtgatgagctgcagattgcctggaaaccaaatcagctggctcatgtagtaaaaacagccctttctgtatattcgatcgcttggttttgggatgacccacttggtccttgagggcctcagttacctcaaactggcaaaggaaagaggttggaccagatctgtgggtctcaagtggtggttcctggaccagcagcagcagcatctcctgggaccatgttataaatatgaatctgccagccccaccctagacctactgagtcagaaactcggcatgacccccactccatacccccccaccaaaatgtgttttaacaagcccctcagatggttctgatgttttgctgaaatttgagaaccactggactagattatgatgtctgagttctcaccaagtgtaatagtctatgagtaaattcctatgcatgtaaaaagaaaagttttagcaggaagaagacaaaatgctgaaagagaatatggtaatttcaaagtttgagatttttagatgcatgttagaagtgtttctattttgttgaaatttcccgtcattcagtagttcactttacttcaagttgtgaccttccagatccgaaccttagagtttctgtatgtgatttcaaagaatcttagaatatatattgcatgacaggaaatggaggtctgctattttccactgagacttgctgtgtgtgttccacacccacaggtctacaacactggcccaagcacccttccagggtcatctgtcagcatctctttccctaatcgactctcatctggtggtgcagagatgtttcatgtccaggaaatggtggtgagttctccatttgttttcactattgctttcagctttgagccagcccattcaaattttgtattccaccctaccctgacatccaccttgagggtttggaaaattcaactcattctaccctttggagacatatctggagaggccaggggacctgtgatacctgaatttctacattgagaccatttggttaatgctgtaagaagacctctttggagatggggaagagttaattacgaaccagctcctgggatggacttcgctggctctgggaacccccagcagcatctgcagttgcatgcgtctgaatgcattttgctgagtgcattttgcacagggaaagtgcctgcagtccatgttgagaggattgtgaaagcattgctctctataggggcacgtgaaggacattcagccaaagggacagtttttccatagatagcttgaaaatcagggcagcaaggcccatatggagcaggtgaatatctgagccgagagttgaagaggacacagcccacagggtggaggttcagaaaacattgtgtgatggtgacagtaatttctggcattgctgccctctgggtcatgtggactgaaaaccagacgcatgtgaatgttgaatgtagaacaggtcactcctcccgagatgccagctcagatgttaacatccctcatgatgttccattccagttccatggcatccccttgtctttgggctctgctgacccagcagaagaaagccgccagtgttccgcacctatgatgtactatggttggaacttagcatgaggtgaacaaaccacacaggcttctggctaccctcttaaatattattaaccatgctgaccatgccacatttccccagcatctaggagtgttctcttcctagagcatgctttctgagttgttcacgtgaacatctacagtgttgcaggagcctttttttttcctatgggcaaaatcatctattgaccaaaacaagacatttaagtcactcagattctgaaggtaccccaaaaccagggataccccttttcctctttactgatcatcgagccaaggaaaagccactggaagggacttgggctcacacttacaaatagctggcttgcatggaaggcattagaagtggtttcctgaagacctggacaactgcctggctatcgttctggctgagtggaccctcagatacccaagtggtgtgagctggctgcactctgttctttgggctctgagaaacaaatcctttggattttcaaaactatatttagaattttcataaagtctgtaacagacttggccctaggatggccaagtctccatctggatagcccagcctgtgatcaaaggctgtgggcatcttcatcgtatggaaaagtaaattcactggcacatctcactaagcaagtaggaaagctctctgtgttcttataaacgatcaccactgagcccagaatgacaacaagagtagaagcataaaagcgagtgcatgaggtgctgtagtgaagaggcgagagtccccagatacttgtttcagaggcccacagctggcacaccctctgccttaaagccctcggcaagggcctcctgtggctccgcccctcccttgctcagcagggcctgagaatgctcactgggtcaggtgtgattcagagctcatgacggtttccactttggccttatgggactttgaatggagcagggctttcattctggggatttgggtggcttggtgcaagtgaaattcagtcctattaggagaaaccagcactcattctctgtactgcactaggaggtgaccctttggcctggtggcattccctccccacccccactctcagccaccaccattccccaacctccaaaggctactgaacagctgggcaccagctggacatgttaagccaactgaagcagaaacagattataggcatggagggaaggctcatctgtcattcctctccacacccttgggaccctcaaattgtttctccctctctaacagtgcccttggtgtctgtattgcctgtgatcatcatccatagagcataatgaggatgggcttactcgccctatgggccctgggctgtcaccctacctacggacccacgtgtggcacagttttctgacttggttcagaattcatttagaagtctctggggctgcttctggggtccctgggcaggaccaacctgcctctagctttcaccaaagagtcttttgtgtttgcccaaagcatttcttgaggtccagctgtctgtaagtggagagtgtctggcttatatatgggaggtttttacggggagcctaatgaagtgtaaccactccaaactcccagccttggctcgtgatcttctttccttgtagctaatgtctctgagcccctctgctgtgcttgtatttaccttaaaaacagagccacggtggtggcctgaggaaagactatcaattttcactgcttcccacccacgggggttgtgtggaccctactctgacttcccacagcacagaaaaaaaaggaaacaggtcactgtggacctagtgtctgtccatcaggaagccaggttgtaatgatcatgaaaataatagaggggaagaatgacagacctttctagtctatctgaaatagcaaaattactagtaacaaatcattcttgatttgttcacaaacactggctcagcaagtacctattacgtgccaggctccaaggagaggaataagtcccacatctgccccagaactcactgtcttgcaggaaacagatacataaaatgccattgtaataccgtataacaaatgcaataatggaggcatgcccagaccccaggatgctacaaaggttcagtgcttcacaaaggaacctcttcaagtcagggcttagaggatgtctagttcaccaagagaacaggtgaagaagagaacattccagatagaggaacagtcaccacttgtgagtgtatgatgagtatctgctgtgctgggagctacacccggttctccattctgtttgcctagctcttatacaaataggcaagagtaagtgttccgtatgccttctgcagatgtacagcagatagatattttggcagaatgacagagagtactgaaccacagtcatttcctctgtcagtttgtaaattaatcactcttcttgggtacatcgtgtgtgtgctgtagacctgaaccttcctacctgctgacttaggcatggagaaggccaagctccctgtttgatactagagtctaactacatgtcatggacattgtcagcaaaccacccttggcctgctgcaatgagcagtagctactgacctccctagcttacttttttccttctattggacagtcattctaaaaaactcacctgatttccaggaataaaatgagtgagccagacagcttatgggaggcaggctgtgtccacttgctccttagagatttctttttgaagtgaagatagatcatcttctcaatttttcagaacagacctgaaaaattgaaccacttcactttattgccattcttctgcagaggcgagccgtgtagcatagcccctgagcacaggtctaagattgcaccaagataacacatctgtcacaagcttcatggcttatgaagggaagagggtagtggtctttccaaagttaagttttactcacaatttctgaaggttcaatggaagagatgggagctttatctcagactgcaagcttcacttgatggagttaaaaacctgtatctgtgagcagctttctcacactggaggagaaggctttgggatttggctcttgttaatatgcaagaaggggaaaagtcagaaatgatagctaacagggagtgaagggctagaacttttattccaggtgaaagtactggatttttgaaagaactctagtgttagtccagaagagatataaaataaatatcataccattcattcctcctcctgcaaaaccaattgaaaatattggcctctctggcttgttgttttcttgctatggggcagtgattctaaagaactgacctgatttccaggaggtaaaattgtagggatgaatgataattttctaaggagatatatcaatgtctttgccatagggtaccattaggacattgacttcaatatggcatgaataccaacatctgttagaatattccaagttggtgccaggactcatattttagtaaactgtaaaatcttccctccccatgcttgtacagtagacagggctacccatgatgtacgatgggtatcccacaatgagtcagttgatgtgggaacttcaattaatttatagtgggactgctcacatccctatgaagaaaatatgcacctgatacatcactgaccataacagga

SEQ ID NO: 8850 - DNA, 13003 bp, Homo sapiens
ctcccaccattcagaatcactccaaagggcttctgtggcttggaactgtattttcacgatcttaagagttcaagagagcttactccatgagcttgctcagctcaggcccaagcacacggcaggtccacaatatgtccctgacccagtgtcagatccagcacctagagtcacaagttttcaaggtttcgacaggattttccttaaaaggtcagaaaacataccctccaagggaagaaaaaatggctgtttagacttcttattctattctaccactggttgaaattaacaaattcaatgcaaatactttggatttgaatcttgccacactaggaaaccaagaggacaggaggataacacttaaaggcacagccaatttttccccttgcaagagggaacctccggcatagctccaaagccacaagagccctctcagcggggcttctgatgatttctaactcgaagaatgtaatccatcagccctctggagcaccagcctggctgccaaccctcccaccagaaccttcctgaacctgccctcccaaccacaaagtccgcttccctggatgcagggttccaacctcccttcactgcatggcattcgaggctctgcacacacaggcagcctcgtctggggtccacaagtcactgtgcagatctctcttaaggcatgtaccaaaacaaattctaattcctccggttattatgtctctccacccaccccaaacgactgcaccccaccactatcaccagtttcatgagtgcgtgagcccctagaaaatggataatgttctggaccctgtgtatcccagcacagtcccgggcatacagtcaggacttacaaaatgggagctattattcttacatcatattgatatgttccctccgctgctcccttcttgctcgctgcttcctccagtgggcttcctaaaacaaatttagggctggaaggggcagtcaagccactgcattttacagatgaggaaattgaagaagaccttcaggtgattccatcactgcggtcctgctagcagtctagctggagagccgccctctggcctctgataacaggtcctgagctcctcctcattctgtctctctggacccagccagcagggcacagcaggccaccaccagtgagagaaagaagctggttccttcgtggcctagtgctggaggccggggaagccagtttcgatgccagactcaggcactgaggaattcagggtggttatttctgatcaaggccagggtgggcctcgggttcctcacctggaacatggtcatctgagctcttgttgatggacgactcaccatgcacactcaggacatgccagtgaccgtcagcattgtctgatttttgccctcaccaaaaggtaatgaggtagatatgattagtaccccaatttttacagatggggaaaccgaagctttgaggtttgcctaagatcacagttagttgaatgggtttggctgactctcggagcccatattttgactttggtcacattagctttgtcagaggcccctttggccctaggaagcggtgacagtgaggacgtccttcactgagagcagatgggaagctcaccctgtgcttcctggttccccagcaaccagggcccttgcctttacctaactgcattagcggcagttctatctaatcctaggtgcacacaacggagacaggagtctttccctggggtctctgcttctcctgagattagccacagtccccaggaggctgttatcccaaccccagcggggagggcagcacaaccaagatggagcttactgcaggaaaccactgctgcactgggaaaaacaaagctcagactggatggctcggctctgatcacaggcaccagatgtgccagctacacaggtatatacctgccagtcatcaccaagtgaccgctgaagcaaccaccacttctttctggaggtcctgggaggggaatcagcaagcattccaaataaaaaaacataccctgagcttctcctaagggcattccctagagcaagcacccaggtccctgtctcattcaccactgcattgccagcacccagcactgtgcctggcacatagtaggtgttcatcgatcatttggttaactttttttattgacacataatagatgtacatattttcagagcacatgtgatattttggtacattcatagaatgcgtaaagatcaaatcagggtaactgggatagccataatgttatgctaggaacattctaattattctcttctagctattttgaaatatataatagattattattaactgtcatcaccctactgccaatcgatcatttgattgacaaatgagcttaccatcgccatcatggtagaagccaacgatgcctcaccagatttgagaatgagtatccaggctcaccatcaattatgaagtttgggataacttccttcacctgagtttttccattctgtagccccagataataatacccatctcgcctaatccagtaggatttagccattcatcccacaagactctgggacaaatgcatagaataattttaaagggcagcactatttgaggccacttacttttttgggtagctaatctacacaatgtgaaatcagagaaagctgtcataagattctgggtctgaggattacaggttgtctggtattgtggaagagtggactgggagtcctagcacctcaagtgattcctttagaaatgtgagaatcctcggcaccaactttatctcacagtcccttcatctttcagcaaaatacttaattcaactggatactctagttaattcactcccacagacattagtagaaaataagttttcagggaaagaaccaaggaagttaagtaagttgcaagtttccatttttctctcattctctctctttgcaagaggcaaggaatgagaattggcgtaataagaagaagaataaagtgatattctcatggtgccctgcagtttgaaacattctttcacttggatctctcacttaatatacataataatcctctgagattttattagcccattttataaatcaggaaacagaagcccagagaggtgaaacatcttgccctagcagcagatgagtagcaggccaggcccaaactgagattttttttctttccaaaccatacactgttccctctgtgcagggctgtgacttatacactccccatgtaaatgagaactgctccctcttcgtattatctggatgcttggtttgttctaagaatgcctcatctgtgacatgggggaaggataaaaataggacctaccgaatagggttgtcgcggcacctgaatactgcctggcacacagtatagactctataaatattaccagtggtagtagaagcaattgctggttgtactgtaaactgataacactcccatttcaaggcatttgctttgaatgcctctgcactcactgctcctccctcagacagtctcaggggtcaccctttcccttcacacaggtctctctgctcaaatcccctaaacctagaggcctgccagactgccccatgcgacagcacccaccccacctcctttacaagctctttaccctgctcattcttcttggcccttcctgttacctgctgtcatgtatatttctgtatttcctgactcctccatgaccagggtctttgttttgttcacagctttaccctcagtatcaagaatgatgcctgccacgtaaatatctgttgagtgaataaaggaggcctcatggatccttcttcaccaagaaatgaagacaaaatggtacttgccatctaaatcctcgatctcagataggattttaggtttacaaggtgactttatagcctttacctcctataatcttccataatcttcagggaatggattataattcccattatagagataaagaaactaagacctcttatccccagaaagggcagagcaacattctgggaagacagatgctaggtaaggtcctgaaccccaccctcatgcccatccaccatgcccatcgattagcaatgaggcatgggggtctcagcctccttctgagttgctttgactctggtggagcagctgaggttcaaggggatggtgggaactggcttacagaaaggggcctgggaagtgagttttatccctcagtcaagaatcaacattacaggcagcacaattttgtgaactcatttgtccaaataaacccctacattattactaatatcattttaaaacacataatgggctcttgttttagtgcctcccagacatatttttttccagtgaaaaaaaggtgactcccctgagtcacctttcctgattctgtctccagcactctaacaggagcctgcattggctgctccctctccacaccttccaggacctgtgcccagactctcactgtgtcaccatcattgttttcacgctgcccacaaggccagactttgaggtcctagcagataatcctgtagccccaacacctgcccaatgcctggcacccagcaggcctccatgtgcctgctgaccaaggaccactcctgactcatagcaggtgcaagaaataaaacagcccaggcttctctcctccccactactgcctcaggccccaagaaaccccagcaaaattttattaagctcccctttctcctgcatgaaggaaagatgtcccagcctgaagcagatggtactgggaggctaaggcagagttgctgtaggaaatccagagacaagggggcatttctggccatctttgcatccagatggcttgcaggttcaaaactgagaacactttcccctctactcattgagagaaagaagagagaggaagagctccccaggggatatttccctagtaatgagacctctttcaaaattcctgagaaaagacagggaagggcagagcaacagggagggagaaaaaggtgctgagggccggcagccagcattcaccacctctattcccagcttgcaggtgcaccgtccctgtagcacagtgccaggattttccacaccttctctcaaacacagtccacacgaaaaaggagaaagaggaggattgtaagggagaatctgaattggttgccaattaagagcagggtgaccctaatttatagcagcaaaacccagttatcacagactccatgttgggaaaacagcccagctctggagctgcccattgctctcctgcaaacagaactcacagcaggtgtcatttagcctgattgactttttacagggctggattcctcaactgttggaagagatagcctggagattttcagttgttcgaagacgcgtttttaaattcctagatagtcacaccaaggtaagctggagttatctcggcctctaggaaggaagaacaatgcttagtaaaagtaaaagcagaatccattcaactggcccaggctcaggagatccagaaccagaccctactgtaaggagcatccaacccagtgatagagaagatcccaaaaaatagtcattacacaaataaatattcaatgacaaattataatgaaggttatttaagaacacaaagtgctaggagagcatgtgagtggaaatctaatctcacctgttgagtcagggatgtgacatctgagccaagacagaaggactgtagctgatgggtgggggaaaggtgcttctgtgggagggaacagcccatgaaaagccaatatgtgcataggtgccctatgagaccacagagggggttgtagacagcttgggagggcctgcctgaaagtcatgtcagtggatccttgctttgaaaaatatttaatgagtgtctctttgatttgtgccaggcttaatgtgctgaacactgaagatatgcatgaaaattaaacaccattcctcctcacccagatctcacagtgcagagggagagacaaacatataaataagtaatcccaaaagagagtgacagtgcctgtttaaagacaaaaaaaaaaaaaaaaaaaaaaggagaggaaggatgggtgtttttttcctcctcctgattcaaatgcaaaaccacaatccactgttgtgcccccaccctccttctcctccactctatttctttaggtcttaatttcctggcaccctgttacctgccaacttccttctagataccataagtctcttcctctgtccctctttgccatgttcacattgacttattttcacttcagaaaagctcaaaagtaatcattgtcttaggcagtgcccagtcccgacagcaggcagtgctcaggtgtccccattcactggctttgcccactcagaggccacttaatgggaggaatcaagtcaatattagatcactcacctttcactgctatggtcacagccatgagtatgctcaggcttcagaagaggcttgcctctagggtcctcccctgtggcaagaagaaggtctggttggaccccaatgaaaccaatgaaatctccaatgccaactcctgtcagcagatctggaagctgatcaaagatgggctgatgatccgcaagccaatgactgtccattcccaggctcgatgccaggaaaacaccttggcctaccggaagggcaggcacatgggcataggtaagcgaaagggtacaaccaatgcccggatgccagagaaggtcacgtggatgaggagaatgaggattctgtgctggctgctcagaagataccgcatatctaagaagattgatcacctcatgtatcacagcctgtacctgaaggttaaggggaacgtgttcaaaaacaagcgattctcatggaacacatccacaagctgaaggcagataaggctygcatgaagctcctggctaaccaggttgaggcccagaggtctaagaccaaggaagcatgcaagcgccataaagagtgcctccaggtcaagaaggaggaaatcatcaagaccttgtccaaggaggaagagacaaggaaataaaaacttccactttgtctgtacatactggcttctgtgattatatagatcagccattaaaataaaacaagccttaaaatatatatatatatataacatataatatatatattagatcactctgtcaagccccacctccttcagaaaaccctcccagtaattccaatcaatgccggcctctttccttcttgatccacaaaacctactgcctgtaactccctgtggcacttaattacattgaatttaacagacagtcaacacgttttagtgatttgcactggttttgaccctagaggagttacttaacatctctgagcctcagttttcttttgggaataaaagcataacctccttttataaatccacgtgtataaacacaatcagaagttatctctgaatggtaggataatgggtgaaatttgttttcattatacatttctgaatttgcttttaatggatataaatgttctcatcagaaaaagcaatcaaactgcttcctcttagctttaaaaaaaggataacacccacttcattttgttatgaggattagtgaggtgaggctgtgtgcattgtaggaacacaataacctcatgaaagcagcgtctactggctcagataaggaaaccccagggaggtggaaaagagattggcaggctgtcagacctcttctgcctctcaggagtgcctgctctggatatgaagtcattctctcctacacaccagcttctttcctgggctcagacatgaccaagggcatctctcagcttccccatcccagaagggctgcccctaaatcccaaggaaagactatgattagttccttttgaaactgatgaaggggcatttcccagaatgagggagtgacagatgagggattgaaatcagggcgataggccgggtgcagtggcttatgcctgtaatcccaacattttaggaggccaaggtgggtggatcacttgaggccaggattttgagaccagcctggccaacatggcaaaacccgtctctactaaatatacaaaaattaggcaagcatggtggcaggtgcctgtaattccagctactcaggaggctgaggctggagaattgcttgaacctgggaggcggaggttgtagtgagctgagatcgcaccattgcactccagcttgggcaacaagagtgaaactccatcaaaaaagaaaaaaaaaaaaaagagaaggaaggaaagaaaggaagtcaggaaggcaggaaggcaggaaggaaggaaggaaggaaggaaggaaggaaggaaggaaggaaggaaggaaggaaagaaaggcaatagttctacagggagaaaataatatgattccactacaaaatacaaaatgccttgccaggtgctgggtccacagtcaatgcttaatacttgacagtgacaattattgcaaaggtgttgggctaaatcagcataagcaggtgtgatttagacggcctatgtgagaatactggtggaaggtgagacgacaaaagaaggactgacaggctgaaacaggccagggtgccttcctggatgtggatgcaatacagtttgaagaacaagaattcagcaagaagaaatgaaaagaggaaagagtctgagctggatatgccagggaggtaggccggtgtgagggtagaaattcctggaggcttcaagataggcaaagggccctaaaccaagggcaggccactgacatttggatcaattcattattcccataccgtttggggtgtatcagtcttgcctccctaacaaaaacagtaaacttcttactggagaggatattgccatatttctcctgcatccctttcagttgctaaatcagtatttaaccaaaccgaagcaccagtgacttcttgttagtttacacaggacgtctccctcgggcaggtggagctgcgcctcttgggcccctcctttccttccctcccatccaccagcactcagatcaattgctctgtgtatttgatgagtctgggggaagccactttcacccacatcctgggatggctaagaaactttctaaacctaagccctcaggaaagatgtgggaggattatttctaaaaggttttgaccaccttatctacatagttttaaccccaacacaaccatcaaatctgacaattgctccttaaaaaaaaaaaaaaaaaaaaaggccaggcgcggtggctcacgcctgtaatcccagcactctgggaggccgaggcgggaggatcacggggtcaggagatcgagaccatcctggctaacacggtgaaaccccgtctctattaaaaatacaaaaaattagctggccgtggtggcgggtgcctgtagtcccagctactgaggaggctgaggcaggagaatggcgtgaacccgggaggcggagcttgcagtgagcagagattgtgccactgcactccagcctgggcgacagagcgagactctgtctcaaaaaaaaaaaaaaaaaaaaaaaaaaaaaaaaaatcaagttgtagccagcgtaaggggggaaatgctttattccctgtgccaggtgctttctttctggggaggaagactaatcagtgttaagtcctggactttctctgcacctttactaactcctccttgcagaggcccggagcacagtcctaggcagcaacttagggatgagctgggtagcacagactggacatgctcagttcagctccccccttcctcagtggggaaaaaggacattagttatcacgtgtcccctgggaggccctgacagcagactctaacccactgaagactacctggtcacaggcaaagttttcaatgctttgacttagggacaccagatgtgagtgggcaaagcgctatgagccgcacagagaaaaagaggtttaaatcactggtggattaagaacatcatcgaaaattgttgctgcgtaggccgggcgcggtggcttacgcctgtaatcccagcactttgggaagctgagcggggcagatcacttgaggtcaggagttcaagaccagcctggccaacatggtgaaaccctgtctctactaaaaatacaaaaattagccgggcgtggtggcaggcgcctgtaatccaagctgctcgggaggctgagccagcagaatcacttaaaaaacccaggaggcagaagttgcagtgagctgagatcgtgccactgcactccagcttgggccacagagtgagactccgtctcaaaaaaaaaattaaataaataaataaataaataaaatatatatatatatagttgctgcttgttttcagtggtctacacaccactggtctccaacaggcaatatcttgggactgaaaatccccatacaacacacaacagttctctgaagggaggagataaaacagtcatgactgggttaagcattacctctttaaggtaggcatatgaaaggctaatacagtccatcaccacaatggaagttcaggcagaaaaaagaaaaacagccaatactctccagggggtgtgaaaattatgtaaaaactttgaaacaccccagttggagtgaaatcctagaagcaaggctataatctctcttatggagaaaaagtagaataagttgctttcatgtacattgtctaaacccatccggaaatggtgtcagtttcccatgaagaacagataagagcctttccagggtatctaggatttcaggcagcatgttctatttttaccttatgatgtttaaccttcacagagcataagaaagtccctgcccttgagaaacaatataattataacctaagatttccaggtgctaagaaagtccgtgtcagagataactgtattataaaatcatgcctaacaaggcgctgagaactagcaattttgccccatcccatcctgtgaaaaatcttaaaggaagaattgctgctctccattcaattgagagatgtagcttcgatcacacaccaacaaccaactatggcccaggcactgtgccaaacactacccatggtccttccccctctgtcatggtaggcaccattatggctcccattttacacgtgaggaaagccagtctcagaggttacgtagtttgctgacctggcagagcagtagtgagcctagtccatctgatgccaaagtccttctcttcctggctcctctccctgccacaatcaccaaccacttaggaaaatcctgtttttaagtaacttctctgtctttttgcaagtaaattttcccaggttacagaaatcccagagccaggtcccatctacaaatgcctttcaactgtttctaaagacaacagctatttgaagattttgtggatgaaacaagtgaaaatcaggcaaattcaccttttggtgaaacagtagtgaaaatagtcatatatcagtatattagaggcacaaattccaaacaaaagtagtctttagagcagaaagttcaatgggccctaagtccaaggggctgggttttagacaggccctgacagctacagagtgaccttgtgtgagctgccaaactcacctgcctacttttaaaaggaagagagaaataaatcctatttaactgtattttttggaaaattaaaggtaatactgtacataaaatgattttgtaagctgcaaagccctatacaaatggaggatttaattataattattttgactcagctatttggctgggatcttacagagaattttaatcatcagacagagttgaaaaaaaaaactgcaatgcagtttggcataataatgattaggaacaaaactcaggccttaggatatgcaggttcaaatcctagttttcccatttaactctctgtgtggtcttgggcaggttacttacttctctgtgcctcagtttccttatctggaaaatggggatatcgtggaacacactgagcaccctgccacatgcattgtgagtgttcaaggagtgttcagcagccggtgaaagacctggtcaggattaatctgcttctaaagcccatatactcttgctctgctgtgcaccttttcaacagacatgtggtcgttggaagagtaagtagttgtgtagttaccaaatagaagggaagacaccaagacagttcgtcttgtattttctcccatctgcccttatcctggcttttagcctggattctgctttgggcatggtggaggattcacacaggtgtggagctggagagaatcaagatgcctaatagtgaacaataatgctcctagaactctggcttacctcatagggtcgtcctgaagactatgcaagttaaatcgcttaaagaacttagaatagtacttggcccacagtatgctcagtgtgttaattattagtatactattattcttttcatcaagcagacaagagggggaatagaattaagtagcctgcactataagagaaaatggctgcattagagacaataagacaccatcatatacctttgacaagcagccctgaaatgcacaacatttttaactccctgggacaccctttgggaagaaagacaagtcttcaggctcccagtgaaactgcttccttctctctcctcctccacccttcatatgctaaaaacacaacaggcttcattcaacgctgtctttcttttcttcactctcccatcccctggagatcagcttcattccacagtgaaggcctggtttaagaactcaggatagtctcagcgagtccatggagacccccagagcagctgcaggctgctgtggaactccagcccttttccagcagtgaaatgtccaactcctcttcccatctcccatccttcaatcccgcaccctctcaatccttccttcaaggctcacatcatatcacacttcctcccgaaagacccacccttctagggattctgcatatataattgccaactctgtactcactggctgtataaagtgcctattttactgcccctaaaaggtaaactccccaagggtaaaggccacccttcattcttctagattctctacagtgctagaggcaccctatgtgtgccataaattatttgggaaggggtttaatttactggatggagccccaggtctgcatgaagtggtcagacacaaaccaggtttcctattttattctatctaaaaatgctggtcctaac

SEQ ID NO: 8851 - DNA, 61530 bp, Homo sapiens
gtgtgccaccacaccaggctaatttttgtatttttagcagagatggggtttcaccatgttggccaggttggtctcaaactcctgacctcaggtgatctgcctgccttggcctcccaaagtgctgggattacaggcatgagccaccgtgcccggcctgaaaataagaccttttctaccagactgttgaatactgcccctctcccaatctcccaccccctccattcctgtagtttcttccccccgtgttagtttccaccatctgaaactctatattttacttatttattcattattttctcccccaactgaaatggaagctctgaggccaggaatttcttccctctccctaactgctctattttatgccccttaaacagagtttggcacacagccatgctcaacaaatactcggtgaatgaatgagtgttcacgtgccattgtccaggaggtagaaataaaattgccattcttctaaacaccaacaaaattggtgtcaaaaacctagaacaaatataatgcagctatctttatactcttatattgaaaaattatctgtcagtcaaaatgaaatcactttattacttgagacaaaagttgccagttgaatagctcctcaacggtttgttttgcatgaattaaatccacgcttaccttccaacagcattcaaaaactctctggtatacagctatctgccaatctcactcttaagtaaaagtaattatgcacaccacaaaccctagaattcaagaggcccagccccttaatgcctgcaatttctatcatttaaaaattttttaaatcagtgcttatttcaacgaaaccattcataggtcatgtcccatctagtttaatggatttaagaatttcagaaaacctaccagaacagacaaaatgaagccaagcatagaatgcatctctagtgcaaaaagtaaatgttaaaacacactagtttgaagattatcaggagatctgcccacggtcagtatcctccatacaatatcagctagaagaaacaaaactctccctgctttatgattctgttccaaattccatttccctaccttgctcttagtactgatttcgctactttgggaactgctactactgtgtcgttttttgcccttgcgaaacatttttcaccaccattgcttgatccagagaagatcccctgaaaaaacaaatattggtaacagttacatcgggaaaagcaacttttttttttttttttttaagagacagagtcttgctcttacccaggctggagtgcagtggcacaaacatggctctgcagtcttgacctcacacctcagcctccccgagtagctgggactacaggcatgtgccactacacccagctaatttcattttttgtagagacaggatcttgccatgttggccaggctggtctcaaactcctgctctcaggcgatcctcccgccttggcctcccaaagtgctgggattacagctgtgagccaccatgcccagccaggaaaagcaactttgatattggttacagttacatcaggaaatgcaacattaaatcactttatgcaaaatagaaataaaaatcatcaattaacttttcccttggatactattccttttcattctttcctattaaattatagaaagttaacccaataagcaaaaaaggcagaaaccttcttgtcctacaggtgtgaaaagcacttttctcaaaattttcagacacgtcacctagttctcaaaattttaagggccttacttctcttcaattgagtcaagattttagcaaaatatactatgacacattggcttttcagtcgagatactaagattcagtaaccctctcagtttcacattctatacttggtagggctaagatatacacacctctcagaaatgtgcatttttcttgaagttttgaaatacctttaagtaaaagctgacacaaagacattcccaggtgccagcacctcacctcccctctctattaagcgtagttaaggagatgaccttgcctcccagagtctgtgttacatatttctttttttgaaattaataataataaatgcattggaaactaagattcatccttgccagttgcataaggacagcatatactatacttggcaaattaactaacctacatgaagctgcacagctcacagaactcccgggacagttctactgtcatagcctcatgataaccttgtgacatatccatttgctctactgatgctttttaagggcataccatatgccacacactctgcagggctctaagctctccctcaaggggctcacagaaggtgggctgtaatctgccttttacagatgagggaactgtgacctgcctctcaagacgatttatgaataagataacctgatcaattttttaccaaaaactgtattctccagagagaacaagaaaatctgcttactatagaattgaacactatttgactgtcttcaaaggtcccacatacagcggtctgcacagagagtttcctttcattctgacctgggtgatgcttttcagagaaactacgcacctgatgaaggaaaaagaacgagcaactcacgcagcagtcagtgaaagctcctgctgcaacccaaagattctccgtatttggagaccccactctaagtccacttactaggggacgacattaggccacttgcccaagtctgaccactgagcccaagctttttaatcagcctcatcatccaatttatttctatatttttgctttatttgtggggtaccaggaaaatctgatttattcattcattcctggatagtcagtgagcacctaccaggtgtcggggatgcatcagtgaaccaaacagagcccctgacctcagggagcctgttcttagcgagagtagacagaccaacaagaaaaacacacatgaaacatattattaggaaaccactgctatgaggaaaactaacacaagttgaggagacacagactaatggaaggaaggggtgggtatttcagaaaaagatgctgtagctctttttctgaaagaagtgcgggcagccataaatagcctggaggcaatgccgtgcgggtggagaggggcccgagggaacagtcaaggctgtccgggagcaggaggacagcaatgggcccaaagtgccacagaaggccaggcaggccgcggtaacagtggactttagtttaagaggaatactctgaaggctttttatttattttttgcttatctgctgtgatcttctggaatggaggcttttaaaaagcagtttagcgacacaatcaggtgtcttctgttttttaaacgatgaccctggctgccagatagcgaactaactccactggataagggtaaaaagtgagagatgtgttggaagaagactgcgggtgattgctgcaaaggggaaccttaccagcacaggacacttgtcagtgagagatggcaggagagccttattccaaggcctgcacgaaactaggttaacgtagcagcataaagtgccatgttaatggcgctcacgggttaaaatgttgatgtgtaacatatttaaacatcagatacttaagtatatataaatacatatttatatataggtaacaattttaaatatgatttgaattttaaatcaaaacttattttaaaaacaaaatgtgattctactgtcagtggaatcctgaagtgtctcctcaaatcccttgatatgaaaatcatgacacgacaatgccttagcaactccttaaggctttcttttcatcatcaacccagcggcttaggaaaaagcagcatttattaaagtctttgatatctgctgcaattttgatgcatgttctcaagcaaatcattcttgcctcaaaattattcatgggtggctcacgcctgtaatcccagcactttgggaggccaagtcgggcggatcacgaggtcaggagatcgagaccatcctggctaacatggtgaaaccccgtctctactaaaaatacaaaaaattggctgtgcgtggtggtgggcgcctgtagtcccagctactcaggagcctgaggcaggagaatggcgtgaacccgggaggcggagcttgcagtgagccgagatcgcgccactgcactccagcctggacgaaagagcgagactccgtctcaaaaaaaaaaaaaaaaaattattcatgcatcaaaatgaggccaatgatcctgattggcgattggatgctccgcaggctcatcaaatgcaaagatgtctcaagctgaacccatcatcctcccctccagatctgctcctctcctctcctctccctgtcaggagattctattattgctggaggaagccagaaaatcatgatttccttgctgtccttcaggccccacatccaatctggcaccaagacccactgtataccccacctgaagagctctctgagccagctctccaccagggcccccgtcatcctaaaccatgggcacagacactatttttttagaaactgatgaatgtgatggatcctcaccctataaaaatgcacatccatacaaagtttggcatgaatttaaggaattcacaaacccaaggatatttcgtggataagggaccttgtcctactggattccctaacactttaaatctacccccacactgcagccaaaacgattaaaatgatttctttcaaacatgaatctaatgccactagcctgctgaaaatctttcactggttctccaaagtcagagaccaaagtcaacgttcttcagcacgacacgccaggtcctccaggacccagctcctaatcacctttccacttccatcctccacaacccgggcacagttcattgatctcagcaaggcaaagctgctcctggttctcagcgcgatgctccacgcgcccctgctttgcaccgcccgggacgtccttcacctgtcaggcacttggctacttcttacctttcaaggcccgtttcaggctgcaggccttcctgggatctcaaggctggggtaagggacccacagcttgagtgtaccccctgatcacagcgccacgatctgctgtggtctctgatctcactctcccagctgcacgctggtcaaaggcggagctcggtgactcctctgcattgccagggcgcctggcaggggacgcgcttactgaagccgagaactttctggggaggtgacaccccaacagcgattcccatgtaccaaacgcctaccacgtgccatgcacggtgctaggtgcacagatccctctcaccctcaccctcaccgaccagcaaggctgcaggataacagcccctttcaaacgaggatgccaaagcgcccgaagagtcagtgacctgcccagggtcaccagagtaaggacggatgcggccaagctcggggcctagggagagccggctccgaagttcctcccagacgccagcctgcttggcacctgtctgtcaccgtgatggagcaccttccaagcgctgggtgcggaggatgtgacagcgaaggggacagacaaccccgaccctgagaggcgggaggcggccgaagcggggcagaggaagaggcaaggaaacggcccgcggccgcccgccttgccgcccctccggggcgacagcggctcgggaagctgcagtccgcaagcccacgcccgatctgcggttccaagctcctccacccgcgccccgggagcgcggccccgcccggaaccaagcccgagcccaggcatccctcctccgcccgccccgcggccccacccatccttcctggccgtccgcgccgctctcgggaccgtgttcccgtcaggcctccgcgagctcggccccaagcgggacgagggctgggcgctcacctcgcagccgcgggcccatccccgggttgcggacttcggggtccgcgtgggagtgccgcggcctttggcgcccaggcagctactcccgttcccgctccagcgccggcttttccagccctcctgcccacgtccgccgggccgcgcctccaagactatgcgcaggcgcagtcctgacgtcctacccccggttccaagaccccaagtggtgggaagcctcgcgagcggcgtcccccgaccggaagtcgaggggaggagtctagtgccgcgggctccggagtgacggaagttgtgctcttggtgaatggggttcttccttttttatttaccggtggctgtgcttccaatttaggaagaccccggcgacctgttcctcacccccgcttcgccctcacactttcgggatgtctgcgattcctgctgaggagagcgaccagctgctgatccgacccctgtaagggaccagcgagagagggaatgaagccacgggctgtgaggggcgcgaggggtaaccggagactggcctcctccgtcgcccgcgctcccacctaccccggcagcctgcctttggtccgcgcttgcgggccaggcttctcaggctcgaggggttggaggaccgttgatcggaaggggcctgctatagagtgaacgggattttgctttttcatcagtttcaggggagggtatgttggagtcggaaaaaaaaaagttttacggggccaccgctcgctttcgtacacgctaagaagcgttttcacttagcacaagcacggatctctgcgcgtcagggcaagctgtgagggagccggtgaagcttatgaccgacaggatgagaggaggacctgaatgaggctacagccgtgcagggaagaattaagtctgtttcttaacaccagggcttcacatgtgccagaagttagaaaatattagggacttgccgtgagtttcgatcttctcagctcaggccctagtagaataaggaaggtgtaaagctggagaagagaaagtgcagaggtgttagggacaaaaactcagycctcgactgtccataaggagagtggcctttcagtggacacgatcctcatcagtcgggaatgctgctgaaggggagatgcaaatgtagagaacttgaattcctacagatgagcatttcgaacccacaacatgtttattgttagatactagttggcacaacatgaatatacgctttccaaaaggtagaaagtatctcctttacacaatcattcagtaaggcttcattgagcacctgcttgggacatagtccgtttccttctgcttagttcacacctgtcatgtcttcctgygatgagcaaacactgagcaagtgtcaagcaccacacatggggatatagacgcaacagagggcccagttaattgctctcgctcttttggagagaattacagtgcacagtgggaaatattggagagatactttggaataataggagactattactttgaagtcagacctgaagtccattatctacttgaccaattagtaggacaacaatctcactgaacccgttttctcatatggaaataagataaaacttgaagagtgaacatcgcggtaggtgctttgtaaataatagctaatctaagarcgcaggcaggcattgcactgagcactgtgaaagtatggaaaagggatttctgacagattgaggaaaaaaggatacctcgtggatcctgaaaaatgtgatgcctgagctgagtcctaaagaatgagtaggagttaaagactggggggcccaggatgttctaggcagtggaagtggcacatatgaaagtgagagtggtcacagcttgtggccagattcctcatggctgtagctaaagagttgagttagcagatgaagcgacaggcagttgaggtccagtttaggaagcacctcgtatacacaggagtttggacctttatcaagtcaattacagggagccagcgaaggctattaagcaagcatggatattgtgggaattatgttttaggaaaatctctcctggcagcagtgtagcagatgaataaaagcatggatgaataaaagcatggattgagtagagcagattcagtgagatattgaaagattctaagtctagctgacgagagcctgtagtgagtgatgtgagtgtgagagagtatgcaaatgagatcttcaggattttgtggctgatcagctgtatctggaagggtggttgtggggagggaaggcagggcagagaggatgttatgatcagattcctaagtttggcagttgggaaagggtagtgttattcactcaaggagtataagagatggggcaactctggagtaaatttgggaatttggttgtttcgtaacagctttattgagatacagtttacataccatacaactcacaatttacataccatacaactcatttaaagagtataattcagtcgttcttaacatagagttatacaaccatcacctctctctaattccagcacattttcatcactcccaaragataccttgtattcattagcagtcatagacaatccccactacctctccagccctaagcaaccactaatctacttctttatagatttgcctgttctggacatttcatgtaagtgtgatcatacaatacatactsttttgtctctgrcatctttcatttagcataatctttccaaggttcaaaattgaggagttttgttcattcaataagtattttttgtgatgtgctacatgccaggtactgtagcaatacagcagtgaataagatggacaatgcctctgttcttaggaagctttcatttagtagcctgaaagaagacataagtaggtacaataacttcatgtagttgtattaagataactgatgctgggttgtggcttgctgtgaagggcaaattagaggaggtagtcaagggaaagcatctgagaaggtgacgttggaactgagacccaaatgatacaaaggagccaaccacatcaatatctgaagacaaagcatttcaggaagaaagtagagcaagtacggggcatgtggtggaaactagtttggcatcttgaatatgaagtcccgggagagatcctagtagagatacctagtgtcacgtgtatgtattaaaggtctagaattcagaagaacaatctgggttacaaatacaggcttggaagtccttagcatgtcagaaagatgagaatgaagattgagaagttggccaaggagcaaaccctcggaatatcaacatttaaagggtaggcagaggtggctgaatatgtgaaggaaacaggaaagccagcaagacaagatgagagcatcaggtcagagaagccaagggagaggtgcttgaggaaggagcaggtactccttaggagtgacaacggctgccaagagaacaagatagggactgacacctatagttccagctacttgggaggctgaggcgggaggatcacttgagcccaggagttgaaggccagactgggcaacatagggggaccttgtctcaaaaaaaaaaaaaagactgaaatgactactgagcagcaaggacagtttcagaaaagtgattggtaaaagccagagtatagcgaattgaggagcgagtagaaggtgaggaagtacaagagggtccactgccctgggaggtggtctggggaaagaataaagtgggaactaaaggagcttagagtcaagggattttaatttggggatgaacatggctgtagtatgtttaaatttggattggatggtaaagagcagacagtgaggaaaatgtcaatgacacagcagtgttgagttcctcagaaggagggagggagtacgtagagtagaatggtggaaagwttcattgtggaaagagaggtctattctatctatagaggagaaatagaaggagacagatgtgggcaggttggtaccctgttggtacatgtattcttaattattgtaccaacatgaagttgaggaaatttacaaatggactgtttatttttttgatgcagaagatggcccatgcctcaagtgaagaagaggatagaaggttggaaaatttgggaaagggaagaaagtttgaaaatagttgatatggaaatgaaatggagaaaacagccaggcaacattgagggccagttaaagtggaaggccagggtatccacaataattacaaataaaaaatgtttaaaaagtggaaggccaggaatttatggcggctctcatccacagttgtttgatcttctgtatcaacacctgtttggaggtaggatctcagtttggggatagatccattgcatgtccatctgactgagttccttgaggtcagggtccctgtaaggcatttccatgtcctaggcacttaatccagtgcttggcaaatagaagctgcttaatgttgagtgagtgagtggattgtgagctagaatggttgggaaaaggcatcaaagaaggtgagggatttgaaagatgaggtttaacttaaagtgtgccttgtgaccattgcaaattatggctgaaattattaagaagaaacaaaaattatgtaagtagttggtataaaatatgctgaaataacagaaagtagaagaaaaagtgattgaaattcacagtatgaataagtattttaaaaaaaaaaattttttttttttttttttgaggcagagtctcgctctgttgcccaggctggagcgcagtggcgcgatctcagctcactgcaagctccgcctcctgggttcacaccattctcctgcctcagcctcccgagtagctgggactacaggtgtccgccaccacgcctggctaattttttgtatttttagtagagacggggtttcaccgtgttagccaggatgggtctcgatatcctgatctcgtgatctgcctgcctcggcctcccaaagtgctgggattacaggcgtgagccaccgcacccggccatttaaatttaagccatttrgcaaatacacattatgatcttaaagaagatgacagtgttgaaatgcttatggctttctacttaagtgctaattctagaagtattattatataatctgcgtaactgctagtttacattttaaatacattataatttaatcctaaaattcagaaaattgaatttaaatcaagcccaaacctttgggcttcttggatctgtaccgccttctctcttaattttaagaactgcaagatccctggactcccaaggatcagttttcatctgttctcatgtggacactgttcttccctgtctttgtgattttgtagaactctcttacgtctcagaatttttcagtgaggtgctgtcatcagatggcatgtagtgtacattgtaaaaaagtgtaagtttattggacttggttttgattttttttaatccttctttttctccccttgaatatttacagtggagctgggcaagaagtaggaagatcatgtattattctcgagttcaaaggaagaaaaataatggtaattactatttttgtactcagtttaatagtatggctctgtctgtattgggtgttagtcttttctcatagactagttatctttttagctcccagaaaaatgttatagtacatgtaatctatgctgtatagtgttaatgagaaaaactaatacacacttctacttrgtaatttagttgattaagaagatatattctatgactgtaaaattgtcagctagatctgttgaactgttacctcttcaaagtccctcttccactcctgaagggttgagccagcctaactgccccacccccagtggaagatcccaagggcccaagcactctgaacacactgagagctctagccgcctccagcatgtggggatcaagccttggcctagaagcttggatccccaggtcccactggggctgccggccttggccaagtcactttgcttctctaagcctgaaaggtagaggggttagaggagatagtttctaaggtactcattagaaagtcagttctgtgtctcagattcctttgattcctctttcttctcaactcctcccaatctgaaaagaacatgtataggtcagacatagtcatccttttagtcatctgttttgttaatttggtagtaaygccataaaaataagtaactttaatgactgagtcttaagaatttgttccctaatgccttaaaatatttaaattaccctgatcaggtaagtttcccatttctaattattatcttctcacgagagtcgatctggtagtagtaaatctataaacttttaaaattttaatctgatatcaaagtttttgaaaaagatttaattcgttgttagaatgacgaccaaaagtagctggaaagaagctgttttgtactttgcatcctgtgacccctaaatgtgagctatattttaaatttgttgggaagttagaattgttaatggcatatttgccacatttaataagaatcatgttccaagtgctagtgcctggagtccatcttgagtatatgggtgatggawctagaattattgcctatttgccgaatgaattttaataaaatgtgcaggagattgtgatctcttttcctgtttctttcagctcgactgtgggatccaccctggcctagaaggaatggatgctcttccttatattgatttaattgacccagctgagattgatctcctattaattagtcagtaagtttttccctttattaatgacactttttcacggacttttactatcaagatcattctttactagattttgagagtttggttttttaaaagagtgttttctgctaggaagcatattgcagacatctgagtctaaaccaacactccgtaatgtcatcacaggctagagaagtttgctatgaaaaacttacctacctctatgtataagttcagtgagtatgtgagaaggagatagtacagaacttgaatcattgtaaaacttgagactaagaaagcccttttccaggatatctccttgaggtcactgttttatcacattcttctataagaacgccatttcacctttattgaaactatttttaaatagagttcatatagaaaaatgtgacaagacagtgacctcagggagatatccatgtttcaactttattctgttaaaatgtttgctgtaattctggctgccaggagtaggcttgggatattcttcttcctccctaattcactaataaagttttttgctgtttaaaaacaatactttaaacatctttcctccattttagaactgtatgcattacttcttccttctacacatacctactcttggtttttctgaaagtatcagcacatagttgtttatataaaacttgttttgtacagtaagcaacagtttcattacatggtatctgatggataataattttaagaattaatgcagcctctttctttttaagtttccatttggatcactgtggagctctgccctggtttctacagaagacaagtttcaaaggaagaacatttatgactcatgccacaaaagctatttatagatggcttctttctgattatgtcaaagttaggtaaattactttattagattatacacgactttggctctatatggyatgtatggttcaagatatggaccattttgtgttttaaaatgaggtgctcccttttcatgtataaggatatcagtaatttcatcattcattaacaaggtcattgaaacctattgtgtttctagcaccttcctgaccttgaaggtttttttgagacaggatcttgctctgtcatccaggctggagtgcagtggtgtgatcacagctcactgcagcctcagccacctgggctcaagcagtccttccacctcagcctcctgagcagctgagactacaggtgtgtgccaccacacccagcagagttttttgttttttgaagagatagggtcttatgttgcccaggctagtctcaaactcctgggctccagtgatcctcctgccttggcctcccagagtgctgggattacaggcatgagccactggcctggccttgaagtctttatatagctttttgtgtccttttaaaacttcattaggctggattggaagagttatgcttaattgtggtaacactcgttaacacttcaataatgcttaccacatactaggcccaatcctaaattcctaatgtatattaacttcacacaaagataaataaatatayatattttttttttctttttttttttyttttttttttgagacggagtcttgtgctgttgaccaggctggagtgcagtggcgctatcttagctcactgcaacctctgctcccgggttcaggcaattctcatgtctcagcctccccagtagctaggattacaggcacacagtgcataccaccacgcctggctaatttttgtatttttagtagagacggggttttaccatgttggccagcctggtcttgaactcctgacctcaggtgatctgtctgtcttggcctcccagagtgctgggattacagggttgagccaccgcacccagccgggagataaatatatttaatcttcacaccaactcatgatgtaggttctattataaattccattttatagatgatgaaactgaggcacagcgaggttaggttatttgcctaaaatcgtcacagtaagagacagagcaaggatttgaacccaaacaatctggctccagagtcagcgtccttaaccactgttctctcttgcttttttgtaagtacattaacataattttcaggagaaaggttgtgctagactttgtagaaaaatcttttctcatcctaatgtgagaaatatctgccatggttcaatgtatgtgagtgtgttatatctttcaggagtgttggggtgggaaaaaagtttgagaagtactatcctaaagagtattttgtcttaatttattgtatgtattattgaaaattgagagtactttgagctcagtgtcttaatttcctgtgtggtttgtttaaaatcaagttttgtagctatacacacaatagagtaaaaaaaaaatacacaaaatatctgagaaattttaaatacatgattcatacagtatattttaaagaaatatcttcatggagatgttatccacaatttctttgtgttcaaaggctttttaaaaaatctgactcttaattgtttttgctggcatctttcaaaatttagtaacatatcagcagacgacatgctgtataccgagacagatttggaagaaagcatggacaaaattgaaactatcaactttcatgaagttaaggaagttgcgggaatcaagttttggtgttaccatgcaggtcacgtcctaggagccgccatgttcatgattgagatcgcaggcgtgaaggtaccctctggctgtggcgcttttctccccagagaaatcagtacagagctttgtgccaccaagtactattwaaaaaaaaaattccctaagacttgcaaagtgtcagaacayggaaacataagataaaaatacagttaacgcttgttccttttaaatattgcagttcctacctccattacaatactttctttatcaagactgaggaaaaaaaaatttttaaagactgagaaaagagtaaaataaacatctcaaaaagtgattccctgacaccataggattccgtttgctttagaaaactggttagggaagaggtgtctttgtggctgcattcgtttaaaattaaaacacaatttgatattcatgtccccctgatgtcttagaattcacaggtaagcccctaagcagggtggactgcaagagtgaaaggggttaattaggaaagatctttggggaagccttgaacttctgacaacgtgggtgggccgctggctttccagactccagagcagccgctctgaactcaggctgcaaataagactcacttagggagctgctgaaaataactgttgaatcaaaatctggaggcgcagcttggccttttccttttcgagtttgctaggtgattctaacgtcagccagagaaccaatgctmtagtgtcacgtcctaaatttttcacagctgcttatacatttggaacttttagacattgaattgtaaagtatatcactaaatcacttattcttgcagtttgctccagggcacaaaaaataagtagcacaaatgcagatgtgaattctcttggaatttgatgcagaccctcttatgattttatctccggttttagaccrtgtacctcagtgcactcctttccttgtctgcatgccctttttctctaagaagttcagagcacttctcaagtggattaatgttatataggttatcattgtgagatgatactgggaatagattattcccrtttactagaggaaataattgaagcactgaaccgtttactgactgaactacacattttgaattggacacaagcactgcatgtaaatttcatcagttttagacttaaaaactgtaactgcacttttggatttcatgagtttaatctattcactagcaaaatgaagccttccccaaatcctaactttctagttttatctttttcacagcttttgtacactggtgatttctcaagacaagaagataggcacttaatggcagctgaaattcctaatattaagcctgatattcttatcattgtaagtattaatatactatattgtaatcaatgtaatgtaagcagattttttttcttttggaaaataatactgtgatctcactttcataatatgttattggatataaacttaccttttttaaaatataagaaaactggtggccgggcacggtggctcacacctgtaatcctagcgctttgggaggctgaggtgggcagatcacttaaggccaggagttagagaccaccttggccaacacagtgaaaacccatctctactaaaaaaatacaaaaattakctgggtgtggtggtgcagttacctgggaggctgaggcacaagaatcacttgaacccagaaggtggaggttgcagtgagccaagatcacgctgctgcactcgagcctgggctacaaagcaagactcagtctcaaaaaaaaaaaaaattggggcaggtgcttctttttgtagtgcagyttcactttcttgctgttaaatgcattaactctagtctaatatcagagatgccaggctgcctctgggcaggatcagcaggctgtctctgggcaggatcatttttactggctatgccctctctctgtcttctaaatatatatttctagatgagaatatgtagaagaacatcttacgggtcattttaaaatggtgtgacctcactgcctttgccatggtgactatcctcaggcccttagtccatgctaacttatcgttttgtttatctttgtgtgtcatgtctgcctactaggttgcaagtcccaggggagcaaaaaaaatgaactgtgtacagaagctctttgggggcagcttgggatgtgtgttgctgactgtagagtcaggggttgggagagaaatcttgcaagcttttggtgtatataagaacatcaggtgtatgtggttcaaggaggaagagttgtctgtttctcctccaccacctaccatgttccccagctgcccaggcatgtgggccagtacatactgctgtccataagcaacatgtgagcagattagattggactctgctcatggtatgcccagcatataaacttaatttaagggaagatttattttttgaaccctcagaaaaagtagctattttcatagtaccatactttagagcagtgcttcaaattttaatatgcttataatcatctgatgatattgctaagatacaaattctgattcagtacatctgggctggggtctgagattttgcgcttctgataagctcccaagggatgtcaatcttctggtcagtggaccatacctagtaagactttaaggatattcttaaacagaagtataagaaacaacatctgtttctattttaaaagctttgacttatcagaggtgggagaaataacctttttcttcctaatggaaagcaaaatggttaaaaaaggacatgggaagaagatacagttttggactatttcattttataaaaagttcttagatttgaattctagcattctttttttttttttttgagatggagtctcactctggagtgagcgactgcaatggcatgatctcggctcactgcaaccactgcctcccaggttcaagtgattctcctgcctcagcctcctgactagctgggattataaggcatgcgccaccatgcccagctaatttttgtatttttagtagagacggggtttcatcctgttggtcagactggactcctgacctcaggtgatccacccrcctcggccttccaaaatgctgggattacaggcatgagccaccatgcccggcctctttttgttgttgttgttaaattttatttttttgagatggagtcttgctctgtcgcccaggctggagtgcaatggtgcgatctcggctcactgcaacctcctcctcctgggttcaaacagctctcctgcctcagcctccggagtagctgggattacaggcgcccaccaccacgcccagcttatttttgtatttttagtagagacagggtttcaccatgttggccaggctggtctcaaactgctgacctcaggtgatccacccaccttggcttcccaaagtgctgggattacaggtgtgagccaccacgctgggcctgaattctagcattcttgcttgctcttcccaattactattatgacaacacatgttcgagtaaatgacatgctaatggagaagtgaattgcttagcccctcagtatttcattgatgtttaacttttgaattcttggaggatcattggtcttagtctcacacttctaatgtattatttaggaatctacttatgggacccatatccatgagaaacgtgaagagcgagaagcaagattctgtaacactgtccacgatattgtaaacagaggaggcaggggtctcattcctgtctttgctcttggaagggctcaggagctgctcttgattctaggtatgccatttcctttgtatttaggcgatgatcaaaatcttgtcattttatcaagataataaygtggtcttggatgagtcattccaccgttctggacttcagttttcttcatttaaaaatagagatttggggccgggcgcggtggctcacgcctgtaatcccagcactttgggaggctgaggtggggagatcacgagatcaggagttcaagaccagcctgaccaagatggtgaaaccccatctctactaaaaatacaaaaattagccgggcacagtgacagatgcctgtaatcccagctactcaggaggctgaggcagagaattgcttgaacctgggrggtggaggttgtagtgagccgagattgcgccactgcactccagcctgggcgacagagcgagactccatctcaaaaaataataataataataataatagggatttggatctaggaatagcccaggaaaacagcaactctcatgcactgctgttgggaatgtgaactggcgaccccttccggttgccatcagaagtcttaaaatatgtgtaccctttggccagcagttccgcttctgggaaataaatgagatgtacagaaaattttgtcaggaaaggtattcatcattttagtattttcaaagaaatatgtgagtaaatatagcattgtaggaaaaaattgtgttacagatgagtaattacatactttgcacataatatattaagtcaaccaaaaaagtagagttcaaaactatatttactctgggytggacgtggtggctcacgcctgtaatcctagcacttagggaggctgaggtgggcagatcacttgaggccaggagttcaagaccagcctggccatcatggtgaaacctcgtctctaccaaaaatagaaaaatgagccaggtgtggtggcacacacctgtagttccagcttttctggaggctggggcatgagaattgcttgagcctgggaggcagaggttgcagtgagccgagattgcaccactgcactccagcctcggtgacagagggagacygtctcaaaacaaacaaacaaacaacaacaaaaaaaaaactatatgtactctgatcctagttaggtaaaaaatgcacacacaaatgactgaaaagctactaaatctggatagtgaggatatggatgatattttttgttttctgcttttctccattttacaagtacttcagtgagcatgtataattttttgtaataagagaaacaatggttgttactttttagcatacatttgtacttcatgatcccttctacctcacattcggtgattctagttgggaagagcactcttattgaagaataaaagaaggtactttacagccaggcatagtggctcacgactgtaatccctaattccagcaccttgagaggctaagggcggaagatcacttgagcccaggaatttaagatcagcctgggcaacaaggcaagaccctgtctctacaaaaaatacaaagaattagctggacgtggtgatacacgcctgttgtcccagctacctgggagactgaggtaggagtatcacttgagcctgggaggtagaggttgcagtgagccaagattgtgccactgcactccagggtgggcgacacaatgagaccctgtctcaaaaaaaagcaaataataaaatgggtgctttgcatgagtgtcacctctgtgcgaagcactagaaacacttgcatcttagctcatcctctctgttctgccatcttggtgaggaggagaaaaaatagtatccctgtcacactgaaaaggaaaacagaaggaaagttggaagaaatgaccccagatgaaaaggaaatctgtaatagataggacttctagaagctgaatttcccaaatccgaatctaattcagtcttttgatcttgattggtcctccttcctaactgcaagtcaaattcgtccttagaagtcttgaaatcaaagtcttcgtaacctgtaagatgaagaacagagaagttaggaagttgaaacaatgttgccaccatcaaattgggttgccagatttagcaaataaaactagaggacaactcattaaattttaggttcagataaataatgaataatgttttagtataagtgtaccaaatatttaatatatattctttttttttttttttttttgagacagtctcaccctgtcacccaggctggagtgtggtggcgctatctcggcttggcgcgatctcggctcaccacaacgtctgcctcccgggttcaagctattctcctgcctcagcctcctgagtagctgggatcctagctaatttttgtatttttagtagagacgaggtttcaccacattggccaggctggtctcgttagtatatattcttatactaaaaatcttttgttgttcacctaaaattcaaatttaactgagtatttgatatttttatctggcaattctaccgtctgttctttgcaactggttgccctttttccttcaattctcccttgtaatgtagtataatagaaagaacagctgctttcaaatcttatctgtgtttcagatgaaatctatcatatggctagagccatatgaccttgggcaaattatttaactttttttaatattcagagtttattcataaaaacacgcacaacaaaccaagaaatggtggcatgattgtgggatgtagtccgctttagggtatctaagaaatcataagagtaataaatcatgaatgggataaactagaagacaaagcaggaaatttgtaatgcatgtgacagaaagtctttgtcctcatataaaattatcattgatacatcaaatggaagaataacattcacacaataatcagcctttttttttacccttagtttgctagttaaaatggtgataagtcttcgtaagttgttttgaaaattagaaattatagatgtaaattggtgaaaccccgtctgtactaaaaatacaaaaaattagccaggcatggtggccagcgcctgtagtcccagctactctggaggttgaggcaggagaatggcatgaacccgggaggcggaacttgcagtgagcggagatcgcgccactgcactgcagcctgggcgacagagtgagactccatctcaaaaaaaaaaaaaaaagaaattacagatgtaaattatataataggcatataatacattttcaaactgcagaggcacctattagaataaagggtgtctttcagccatactaccctgataaaattttgggatttaatgagggcttttcccttaacataagtcttttgacggtatattacccactgctttctttaattatcagaaactggttagtaggtttttaaaaatacaagcatggctgagtgtggtgactcatgcctgtaatcccagcactttgggaagctgggcaggaggatcacttaagtccagagtttgagaccagcctgggaaacataatgagacccagtctcaaaaaaaaaaaattagccaagtatggtagcacactcctgtagtcacagctcagaaggctgaggtggaaggatcacttgaacctgagaggttgaggctgccatgagccatgatcataccactaccctcaaggctagtcgacagcctgggtgtaaaacacaaacaaaaacaaacaataatagcataatatgactatactttttttttaagtgttcaaaatcggttaactcttggcaattctcttttgtaattagcactcaataaatctgtttgaaatattaataatacatttttaaaaccatcacagaattttttctagtacacttttctaatacatttaaataaaaatgtattatttagtgtcttattatggtagtaagttatagacttcagtgtaaacttatactgagtcatgtttaaaagcctccacatctttggactatgatcatagcattctttttaggtcatgcactatttagaaataagttttggttttgtaaatttaagttagttacaacsaggataattttgcttaaactctttaaaatatagttgtgtgctttatttcttggttgtatgtgtatcatttcttgttctgtgtgtatcatttgttatttgaactgtttaccccatctaacaaagtgatgtttgtttcttgcaaaatctctctagatgagtactggcagaatcacccagaactacatgacattccaatatactatgcatcatctttggccaagaagtgtatggcagtgtaccagacatatgtaaatgccatgaatgacaaaatccgcaaacagatcaacatcaataatccctttgttttcaaacacattagtaacctcaaggtgagtgcttgtggaagaaagacaaggatggataaaaccaaatcagtcattagtagtaggaggtacgaggccrtgagtgatggctcacagctgtaatttagcactttgggagtctaaggcaggaggatcactagaactcaggagtttgagaccggcctgggcaagatagtgagaccctgtctctatcaaaataaaataaaaatcgtaggcagtgcttgtcagtgactctggctgaattcctcttgctggagtcttaccgcttctcaacaggtgtcgtttttctgcagaaaatcaaaacttcagcagctgacattctttttctgcttcaacagattttgccacttgccccaagtagccatgtgttctcagtatttataatactcatctcttttgccgtaggcataaaaagttctgaggagaaaaatattttgtattatgtatttaagtttctcttctcactcaaaccaaatcatctttttgattagtgctgcaaattctatatatgaaaatttttatatacttttctggaagcattcaataaaatctgattttatttaatttaaaaaatactgtttaactcgatgcttgaatcataataaaataattgatatccgaaataatttaaaagtggacttccagttgtaaataggctttgttcataaagtatttattttaagttaactgcttaaggattgtagacaagttctccctagaacaatgttaaaccttttgatttccaggccagctcaaaacatgcatggagcatgcaaagctattgtgagtctttgggaatattttttcagagttgtgtcttgggtagatcaagacccatttgactcttccttttacttttctgcctgcctgytaggcrctgaagatggtcctgatggttctgatggccctctagctaccaacagaaggttttgaagatcggggtgaacttacygctttttattacttggtttttctaccattcctagcctaaactgtttaggaatttggcaactgaacttaaaatgtttacagatcttgtgaaggctctttcagtgatgtgattaatctcttagccttttgttattctttaaaaagaaagaatgctttgtcagctgctggtagctaacatacttttcccattctgttttctctcttagagcatggatcattttgatgacattggtcccagtgttgtaatggcctccccaggcatgatgcaaagtggcttatccagagaattatttgaaagctggtgtactgataagaggaatggtgtcattatagcgggatactgtgtagaagggacacttgccaaggtcagttacagtcataggctgttgtgttattcctattcagaatcacggaggtggcacggtcctcacaggtttttgcactgaagtagttcttcaaataatacaagttttgatttttaaaaatgaggacgggaataggtagctagagatgtgcgtaggatgtagaattatgcagacactgaatggcataatgaggtcccaggtgattgatatacacattaaagtttgagaaatgctcatctggttgcaagtagagaagaatggacaggaacctgtttgagacaaacacgtgaatactctccgtcctctcatgaagaagaggttgactaatacatatgatcttaaaaagctgtagaatgtgtttgggttgaccactttctactattatgaaacattgattttcagctcttagggatgtagaaattgtagaaaatatatgcagaacttgggaggcagtttctgagcatccaggcatcacattctcatcctctattttatttttaaaaatatgatatgattctttgataatctttattactttaccttattctataaagttctttagtgacaatgttgtatttaaaatagatttccaggctgggtgcagtggctcacacctgtaatcccagtactttgggaggccaaggcgggcggatcacctgaggtcaggagttcgagaccagcctggccaacatggcgaaaccccgtctctactaaaaatacaaaaaattagctgggcrtggtggcgtatgcctgtaatcccagctactcgggaggctgaggcagggagaattgcttgaaactggaggcggaggttgcagtcagccgagattggcgccactgcactccaatctgggtgacggagcaagactccatctccaaaaaaaaaaraaaaaaaaaatttccaggcctggcacagtgcctcacatctgtaatcctagyacttcaggaggccacagcaggtggatcacttgagctcaggagttggggaccagcttgggcaacatggagaaatcccatctctacaaaaaatacaaaaattagccaggtgtggtggcacgtgcctgtagtcctagctagttgggggactgaggcaggaggcttgcttgaacccaggaggtcgaggctgcagtgagctgagatcgcacactgcatttcagcctgggtgacaaagtgagaccctatttgaaaaaacaaagattttcagaatagaaatatatccacatatctaggaaatgactttggagagcacaagaatagttgggaatacaggtttgtctttctaagcataagagttatgattctcactgccagcactccagatagatgagttttagttaatttgtttacttttctcattaaatgtttgcttgattgagaacatgagtatttgatatttactgagtcagttatattagaatgattttgtgcgtaaggtcctaaatttaacatgaatttatgactgcatgaaaaaaatgaaaatgtacctttacgattataactgggtagtttgttttgttatttttctttattttccacagcacatcatgtctgaacctgaagaaatcactactatgtctggacagaagttaccactgaaaatgtctgttgattacatttctttctcagctcacacggattaccagcaaaccagtgaatttattcgtgctttgaaaccgcctcatgtggttagtctatgaatttcatttattgtattaaagggraaaaaagtgcatacccaggaaactgtgcagcaggcagttcacaaagcaggcatcatcacctactaatgcgacaccccctgagcagagcctttcacrtgcactcggatttggcctttacaactcccctttgatttcagcaagctgccccctttctccagaactgactgactcagacctaccaaccccaatcctaatgtttttctgttattttctgctgcctctccaataatttaagagccaggcttggagtatgactgctcatttggaatgccagctccatctcttacttactatgtaacccttggcaagttacttaacctctctgtacctcatttgtaaataggaataatagctcataaggttattgtaaggatgaagtgaaagaacatatctaaagcacttaatatggtgcctggcacatagtaaatgcttaatatatatattatatatatatatatatatatatatattttttttttttgaggcggagtcttgctctgtcacccaggctgactgcaactccgcctcccgggttcaagcagctctctgcttcagcctcctgagtaactgggattacaggtgcccaccaccacacccggctaatttttgtatttttagtagagatggggtttcaccgtcttggccgggctggtcttgaactcctgacttcatgatacacccgcctcggcctcccaaagtgctgggattacaggcgcgagccactgcacccggccgacttacttatatttttaagtatcgtgtaacttattaaaaataagttagatattttgatggaattggaaaggaggggtaagctgaaaaaagtgtgtatttttaattagaagaacactaatgaagcatgtgtccatagaaaatagatgacgtgccctttccaaatgtattggaaagcaggagaaatggccttttgttagttttgtttgtttgcttgttgtttggggtgttttttggtttgtttgtttgtttgtttgtttggatgaagtcttgctctgttgcctaggctggagtgcagtggcgccaatctcagctcactgcagcttctgcctcctgggttaaagcaattctcctgcctcagccttccrggtagctgggattacaggcacgtgccaccacgcccagctaatttttgtatttgtagtagagacaggttttcaccatgttggccaggctgttctcaaactcctgacctcaggtgatctgcccgcctcggcctcccaaagtgctaggattacaggcatgagccactgcacctggccttgcttgttgttttttaaatacgttttactgtggtaaaatatctaacataaaatttgcagttttaaccatttttaagtgtacaaaccagtggcattaattatattsacagtgttgtacaaccatcaccactgtctattttcacagcttttcatcactccaagcagaaactctgtaccgttacacagtaactccccattcccttccgccaaccctggtaatctcaaatctactttctgtttctatgaatttgactattctaggtatttcatataagaggaatcrtaatgcctatgatgttttcaaggttcatcatgttgtggcatgtatcagcacttcatgccgaagtcatggtccgttatatgtagaccacatgttgtttatccattcacctgtgggtggacactcgggttgtgtcactttacagcaaatgtgaagtggtatctygttgtggtttttattttcatttctctaatgactaatgatgttgagcaccttttcatgcagtcttttgttcgtttttgagttttttctagcatgataggcctcacaggtatttgccactggcccttaatgagcagattatttggtcaagaaaaatcactctcctgtctatagcatcacagtgtgtagggtttagtcacagagtaggctcctcccaggtgtttcttattgtctgtgtgcatgaacactcccccagatttccaagccagggaggaaaagccgaattgctcttttgtgtggtgtcaccacctcatcctcagccccatttcatcctgtcactctcctggttctacttctgctgacagtttaagttcctgggttgaacttcatgctcattttcttgtgataaccagctccagcaaaagtatagctgcaggataaaattgcaatactagtagtgttggtggtagtaatgaatactagctaacattgattatttaccatgtgccggacactgtatatgtgttttatatgaactgacttgcttaatcttcatgaccgacagctgttctgcagatgagacaactgaggtgtgaaatcacttggtcaaggttacacagcttaaataagcagcagcaccaggattctgttcaggcagccaggcccaggcccttccccagcaagcagtaagcccctgccacgtgctggtgctggctatgcccagccacaagccatctaccacatgtgagaggctaagaacaatctatcttggccgggctgcagtcccagcactttgggaggccgatgygggtggatcacttgaggccaggagttcgagaccagcctggccaacatagtgaaaccccatctctactaaaagtataaaaattaggcagggcacggtggctcatgcctgtaatcccagcattttgggaggccaaggcgagcagatcacgaggtcaggagatggagaccatcctggctaacacggtgaaaccccgtctctactaaaaatacaaaaaaattagmcgggtgtggtggcaggtgcctgtagtcccagctactcgggaggccgaggcaggagaatggcgtgaacctgggaggcggagcttgcagtgagccgagatcacgccactagactctagcctgggcgacggagcgagactcggtctcaaaaaaaaaaaaaaaaaaaagtataaaaattaggtaggcatggtggttcacacctgtatcccagctacttggaggctgaggcatgagaatcccttgaaccctsgaggcagaggctgcagtgagccaagatcacgacactgcactccagcctgggtggcagagtaagactgtctcaaaaaaaaaagaacaatctgtcttgtaagatagaagttacaaaagtgaatggaaagggactggtagctaatgctgttgttgtaaataccctctaaaatattccatttggggctgagcacagtggctcatgcctgtaatcgtaccactctgcaaggctgaggtggaaagactgcccagaagtttgagaccagcctagacaacatagtgagaccttgtctctacaagaataaaataaaactagccaagcatggtggctcatgcctgtagtcccagctacctgggtggctaaggtgggaggattgtataagcctgggagattgaggccacggtgagccaagattatgccactgcactccaacctgggcaacagagcaagactctctttaaataaagaaatatataaagtaataaaatgttccatttggttctgaaatattttattaggataggtacagtggctcacgcctataatcctagcattttgggaggccaagatgggcagatcacttgagcccaggagttcaagaccaccttgggcaatatgtgagaccgtgtctctacaaaaaatacaaatattagccgggcatggtggcgtgtgcctgtagtcccagctacgtgggaggctgaggcaggaggattgcttgatccctggaggttgaggctgcagtgagccatgatcacatcactggactccagcctgcgcaacagagtgagaccctgtctccaaaaatatatcaatatatgaggtaggccaggcacagtggctcaagcctgtaatcccagcactttgggaggccaaggtgggtgtcaagagttcgagaccagcctgaccaacatggtaaaaccccgtctctactaaaaatacaaaaaattagccaggcatagtggcgtgtacctatagtgccagctactcgggaggctcaggcaggagaatcgcttgaactcaggaggtagaggctgcagtgagctgagatcacaccactgctaccctccagcctgggcgacagagcaagactccatctcacaaaaagagaaaaaagagaaccatgggtgttttctaagacagtagggtagcaatagttttgtacaagagtcataggcatttaaaactagaagagactacagaagtcagccctttacaactgtgaacatagaagcagtgaaacatggaaaaggcgtgtatctcattagtggcaaagactggagtagaaaagaagtttctttactctttgttcaaatagtaccacataaggatcaaacagaatgaatatgtgtatacaagttgaatcggctggaggtccttaaaagtagtaaagtttcataacttccaagtatgtctctatttcatatattaaatatatttcatatatttaattcaacttaaggaccatgattaagctgaatgatgtttccatatattcttttaacatttattctatgtagattttagtccayggagaacagaatgaaatggccagattgaaagcagcactgattcgagaatatgaagataacgatgaagttcacatagaggttcataatcctcggaatacagaagcagtgaccttaaacttcagaggagaaaaactagccaaggtaaaaggttatggttcctgtctgtccaatccatgttttttcttcaggaaagactgtacttcttaagaaaayagatctttagtcaaaagaatatgcttatttctgtctacttgttacactacaggaattttatccttatcctttttggcttcttttggttctgtgcattcatttcttcaggtggaaaatgttcagctagattagattttttgtgtgtgtgtgtgtgagacggagtctcgctctgtcaccaggctggagtgcaatggtgcgatctcggctcactgcaacctccgcctcctgggttccagcgattctcctgcctcagcctcctgagtagctgggattacaggtgcgcgccaccacgcccagctaatgtttgcatctttagtagagatggggtttcaccacgttggccaggatggtcttgatctcttgaccacgtgatccacccacctccgcctcccaaagtgctgggattacaggcgtgagccaccgtgcccggcctagattagatcttaatgcagctgaatctcatagctctttaatccatatccccacttgcttttcctacccacatctgagggtaaagaactgtttgttactgtttgttactgtagccagtatagccttgtgtccacctcttgtcattctccctgagaatctgaagataggctcatatctctaaacatatatgtttgtgtagatatgatggaatatatgaaacattttctctttaaaaattaatcggccggacacggtggttcctgcctataatcccagcactttgggaggccaaggtgtgtggatcacttgaggtcaggagttggagaccaacctggccaacatggtaaaaccccggctctaccaaaaataaaaataaaataaaaaaattagctgggtgtggtcgcaggtgcctgtaatcccagctacttgggaggttgaggcgggagaatcccttgaacccaggaggtggaggttgtagtgagctgagatcgaacctgagagatggaggttgcggtgagctgcgatcgcgccaatgcactccagcctgagtgacagagtgagactgtgtctcaaaacaaacaaacaaacaaaaaagaagtaatcaaggctgggcacggtggctcactcctgtaatcccaggactttgggaggccaagtcaggcgaatcgctttagctcaggagttcaagaccaggctcggcaacgtggtgaaacccagtctctacgaaaaatacaaaaattagctgggtgcagtggcatgctcctgtagtcccaactacctgggaggctgaggtgggaggatggcttgagctccagaggttgaggctacagtgagccattgtcctgtcacggcactccagcctgggtgacagagcaagaccttgtctcaaaaaaataaaaaaagaattaatcatttttgagagtgaaatgtaacattttcagaatttaaagttgaaatagttaaggaaagcctgagctggctttttagagggatgctgtcagaagtctgcatctttacttctgttgatcacaactcgtttagaaatacttctaagagaaactttttaaaaattacatatataattttaaatttttaaaaaggaattgaaatcattatgttgaagagatatgtgcaactcccatgttctgtttttttgttttgagatggggtcacactctgttgccgaggctggagtgcagtggtgcattcatgacttactgcagcctcgacctccctaggctcagctgatcctcccctctcagcctcccaagtagctaggactacaggcacaaatttttttttttttttttttttttagaaggagtcttgctctgtcgcccaggctggagtgcaatggtgccatctcggctcactgcaacctccgcctcccaggttcatggaattctcctacctcagcctcctgattagctgggatcacaggtgcccaccaccacgcccggctaattttttttgtatttttagtagagacagtgtttcaccacattggccaggctggtctcgaactcctgacctcaaatgatccacgtgccttggcctcccaaagtgctgggattacaggcgtgacccaccgtgcccagtctgaggctcaaacttttaatgatttagttgaaggtttaagtatcaacatatgggccaggtgctgtggctcacgcccataatcccaggactttgggaggctgaggcggacaaatcatctgagatcaggagttcgagaccagcctggccaacatggagaaaccctgtctctactaaagatacgaaaattagccagtcgtggttgtgcgcaactgcagtcccagccactcgggaggctgaggcaggagaatcgcttgaacctgggaggcggaggttgcagtgagccgagatcatgccactgcactccagcctgagcaacagagcaagactccgtcttaaaaaagcaactttacgacacacttttaatacataatgagccaaacctgcagacgctaatgaatatcctttcttgaaggtgaattggaggaaaaaaagaaattagcaaaacttagggtatgaggtttttgttgtaaatrgtcgtagttactcctgagtcttactgtccacaaaacttttcaggggccgatttaatagtatttttcttatacctgtagaaaaatatactcagttgagaatctagaactgtatttcacatactctgctggtggtggatatgtggggagaaaaaaaaagttttgcagtcagacagtttagaagatgaattgaactgagttcaggaaaagttgggtttcttatcrgagtgttctgtttctcacccataattttaatgatttaaaatcattacctttagttatttttctctctcaagtacatcactgtattaaaattagtctcctaggagcaaaggttcttttctgaaagctacctacaattaaggagaaaataaccctaggaaatactgtgaaatacaaccctctgtgtttataattatgagaacaaatatagcactgcctggttgctgtttgcccttacttgcttaaaggcaaacaagtatggaacacactacctttattcctttgagctcatttatttgcagttgagagaagttatatttaagaatactgggtttcagccaggcttggtggctctcgcctgtaatcccagcaccttgggaggccatagcaggcagatcccttaagctcaggaattgaagatcagcatgggcaacatagtgaaactccatctctacaaaaaatacaaaaataagccaggcatggtggcgcacatggtgagcgatgatcgcaccactgcattccagcctgggtgacagagcaagactgtctcagaaaaataaataaatgaaacttttttttttttttttttgagaaaaagtctcgctctgtctccaggctggagtgcagtggcgcgatctcagctyactgcaagctccgcctcccaggttcacgccattctcctgcctcagcctcccgaktagctgggactacaggcgcccgccaccwcggccagctagttttttgtatttttagtagagacggggtttcattatattggccaggatggtctcaatctcgtgacctcatgatccgcctgccttggcctcccaaaatgctgggattatgggcgtgagccaccatgcccggccataaatgaaactttttaaaaatgaatagtggggctgggtgtcatggctcacgcatgtaattccaacactttgggaggccgaggtgggcagatcatctgaggtcaggagttcaagaccagcctggccaatgtggtgaagccccatttctactaaaaatagaaaaattagccgggcatggtggtaggtgcctgtaatcccagctacttgggaggctgaggtgggagaatcgcttgaacccgggaggcagaggttgcagtgagctgagattgtgccattgcactccagcctggcgacagtgagacactgtctcaaaaaaaaaaaaaaaaaagaatagtgggtttcacgtttgtagtatttttgtttttaaatggttgttattttattctcttaaaaatgtttctccctcaatgtatgagctcacccataacctgtttttattgacctttttattcaaagccgctgctgctgcttttagtgttaggtgtaccacagcctcccaggtttgtatcagtgggcctcactctctgttatgagtttgcagccagcctgagggagtgcatgtgtgcgtttcacggggacttcccggccttccctactgcagtgcagctagtgagagctttcttaagcccyggcacctagtaagttacttgcttgttgaactgattagaactgaactgtgccagatctgccactgtgactcttccctttgacattggtagcaatgcaactgccctcatcatagagatatcaaacattttatgtttttcgtggttaaatccatatgttgttttcatagttcaaaggtgttatggtcttcattatgatgaactgcattttattacctgaaaaactgcattttaccrggttctattttcttcaagtattttttttttacaggttatgggatttttagcagacaaaaaaccagaacaaggccagcgggtctcaggaatacttgttaaaagaaactttaattatcacatactttctccttgcgacctgtccagtaagtatactattaaatgtcaaatccaacttcaccttagcactgaaagaaaatctatgaaaacttctcttcaccttgtggcctaatgttatgtaatagacaaataataaaaaaggaatgaggcaagttagctaattagctttgtggggagagaaaaacacctcccatgaactactgaaagattgaaattattggtgaaatcactttcttcatctttggaaacataagttcatttctgagttcaccttgttttctaccctctacaacagacttgtgggcttttattttctgaagtgactttggattccccagagaagccgtttggtttttatgacctttgcataagcatttcagttttttatgacctttacatcacttgcagggcctttgtattccttcaccattccaaaaggagtaggaacaaaaacttgtataatttctttaaaagcaaaaaagtattaatgtaaagcctaattttttcattacattgaaactttcaacatccaaataagtaacaccaactatataactgatgcctctaatgtgtgtgtatacattgaagctcattatagagaaaaatgaaaaattgggcagggtgcagtagctcacgcctgtaatcccagcactttgagaagccgaggcaggtggatcacgaggtcaagagatcgagaccatcctgaccaacatggtgaatccccgtctctactaaaaatacaaaaattagctgtatgtkgtggcacgtgcctgtggtcccagctactcaggaggctgaggcaggagaattgcttgaaagtgggaggtggaggttgcagtgagcygagataatgccactgcattccagcctagtgacacagcaagactccatctcaaaaaaaaggaaaaattgcacaaaactaataagattacatttaagtttgtaaaytgcttttttcccawagttgatacacatttccatatgcattctttgtctttataaatttactgagccatcaataagtcattttccaatgaatatggtattattttcgagtaaatactatgctcaaggtgatttacatggtactaatacattatatgtgctttatgcaggaataaaaaatagcagtggcccggcacggtggctcacgcctgtaatcccagcactttgggaggtcgaggtgggcagatcacaaggtcaggagttcgagaccatcctggccaacgtggtraaaccccatctctactaaaaatacaaaaattagctgggtgtggtggcatgtgcctgtagtcccagctacttgggaggctgtggcaagagagttgcttgaatgcaggaggcagaggttacagtgagccgagatcacgccattgcactccaacccgggcaacagtgcgagactctgtctcaaaaaagaaagaaagaaatagcagcagtggtgaggtatttacctgtgagattgccctgctgtcagttttcatagcatcataggtcactgtctgacttgtgccttcattctgagttagtgagctcttatactctttttttttttttttttttttgagatggagtctcactctgtctcccaggctggagtgcagtggcgtgccgtctctgcttactgcaagctccacctyccgggttcatgccattctcctgcctcagcctcccaagtagctgggactacaggcgcctgccaccatgcccggctaattttttgtatttttagtagagacggggtttcaccgtgttagccaggatggtctcgatctcctgacctcgtgatccacctgcctaggcctcccaaagtgctgggattacaggcgtgagccactgcgccgggcccgagctcttactcttatgccacatagtcccagcccttgaaatctgtctaatgagggaagcagtcttgggaagagctaatcccagtattgctcagtggcatatagaagctcatgatacatatgtgaagagaaactgtgcacctcaggagctggaaaaagctttgtaaattaggyagcccttgtgccaggtggtgaaagattgttgggagttaccaaggaaagaaggcagatgacagctggcataccagctctgtggcatccaagaacctggtatgtttggggacatgaggtgctttttttttttttttttctgagatggagtcttgctctgttgcccaggctagagtgcagtggcacgatctcggctcacttctgcctctgcctcctgggttcaagcaattctctgcctcagcctcccgagtagctaggactacaggcatgcgctaccacgcctagctaatttttgtatttgtagtagagacggtgtttcacaatcttggccaggctggtcttgaactcctgatctcgtgatccacctgcctcggcttcccaaagtgctgggattacaggcatgagccaccgcgcctggccataaggtgctttcttacagctggagcagaagttaactgaaggggagaggtagggacatagggagatcagtggggaaatgtaaggtggtaccaaattaaggagcatcttgttagctttctgaaaaacatgttcacatttacttgcttttatttcttttttctttgctcctggtatgtgttttgtaggactagtatttcttcaagtctmttctcattttctcttcagattatactgacctggccatgagcacggtgaagcagacccaagccattccatatactggtccctttaatttgctctgttaccagctgcagaaattgacaggtgtgtgtgtgtactgaaattcatttcattgttttctgtcttttagtaagataattttctatctagaaaagaatgttacttaattttgataattgtctcagaattgtgtaagttttataaatatgtgtgatcatgttattattgcctttatgtgaaattttagaatatacactcatattcttgcctgacggtcctgggaaaaaaataaaaacttaaaaaaaattaaaaaagaaaatatactcaaattttttttaattccataatacttatctttgacccaattaaaatttagtagtctttgttccttatgtttgaaatctattttccttgaccatacctaaaattttatctgtttcttttctttgatcagtgaaaataatttttctggttctattgataccagtctatacagcaggttttataagagttcatgaccactggccaaaggccagtgagaaaataaacctagtctgctttcattattagaccatttgagttcgagattttgtatattaacatcatgaggggccgtgactaaattaaaaggtgtagactttctgatagagcaagaatacttcatattacaaaatacattttccatcagtaacgctcttcatgactcatgaagtaccaccataaaataaaccagtagaaagaatcttttttttaaaccttggaaccttgcactaggataatctgtcataacatagaaggttaataaaatatgtctgaactgtccttgattaagaggatgctagaaagaccagaaaagtctcttcaacaatagaattccgctgtagaatgttgacgcttacgaagacagaaggtagatgaaactagctggcaacaattgacaaattttatgttatatgttaagatgctagtggaaggctaaatctcttgtatacaaaagatagatgtttgagcatcacttaagtttgccactgataaaatgtttgatgtccagggtaaatgctatctagttgaatgtttgcaatacatgttcagacctttccgttgctgtactttgctgtttaaaaattgactatacaaatgagttactaactttttaattgtgtagctgctttattttagctgtctctataaacaaacgaatggtctctggaagattatcagaaaagtatatacatcttatagttatgtctttctttcaggtgatgtggaagaattagaaattcaagaaaaacctgctctgaaagtgttcaaaaatattactgtaatacaagaaccaggcatggtggtattagaagtaagaaaagatcatttacctaaacaatgaggggaaaaaagttttaaaaagagttcatgaacaattgtagagaaaattagtttcttcccaattagaaaaagaatattgttggaaagtatatgtgtgtgtgtgtgtgtgtgtgtgtgtgtgtgtgtgtgtgtgtggttttaaggatcagcattaagtataattaagtagctgagcattttctatgtagtcacaaaaaaacctaataataaattaagggttcttatttagtatgtgtgataaatatagtcctttcctataagtcttacctgattttgtggtactccaggatgtctttagttatatcagaaggttttacaattcttaaggtaaaaatttaattctgttaaattaaaacaaacttaggtaccactcgttaaaagagcagaattttgaagattcaaataaacaacaataaagtgacccaaatctggaaaggatagaaattattaaattaagtgatatggttcctattagaattttaaactccaccttgtggagtttggaagacagataccaaaggaattrcatggttgattttgatagattggcacctattaagtttaaagaaggactttcaaagtgagtcctatcattgaatagtccagggaggtaccttgtctactgctatgccccaaggtagaattgtatataaattgccaaggtagatggtgaactatttcattcatacattctaattttttttttctttttttgagacagagtcttactctgtcacccaggctggagtgcagtggggtgatctcagctcactgcaacctccacctcctaggttcaaacgattcttctgcctcagcctcctgactagctgggactatacaggtgcatgccaccatgcccagctaatttttgtatttttagttagagatggggtttcaccacattggccaggatggtcttgaactcctgacctcaagtgatccacccgcctcgcatacattctatttttaaaacaaaaaagatttgtcagctttggtcccgatgcaattctgtgatttaagtctaaatttgattcataaggctaaaagcaactaaagaaagtgtcaggccaggcccagtggctcacagctgtaatcccagcactttgggaggccaaggcaggtgaatcacctgagatcaggagttcgagaccaccctagccaacatggtgaaaacccgtctctactaaaaatacaaaaattagccagacgtggtggcaggcacctaaaatcccaactacttggaaggctgaggcaggagaatcacttgcatctgggaaacagaggttgcagtgagccaggatcacgccactgcactccaacctgagtgacagagcgagacgctgtctcaaaagaaaaaaaagaaagaaagtgaaaaggagtagttatctataaacatgaagttacatagaacaatatataaaatgttaatatcagaaaaagggggaagttattggagacattaatttagctcattctaccaaatactattagaggctgtgtatgatggctcacacctgtaatcctagcaccttgggaggccaaggtgggcagatcacttgaacccaggagttcaagaccagcctgggtaatacagcaagaccctgcctctataattcattcattcattcattcattcatttatacttacatagtagataatatatttttgttcctagggtaaacatgtcagagattgtaccctaggaacaaaagccaggggatctgaggcttagtgtgagaagcaaaagtaaatatttaaaaatattaccctcttggccgggcgcggtggctcatgcctgtaatcccagcactttgggaggccgaggtgggcggatcacctgaggtcgggagttagagaccaggctgaccaacatggagaaaccctgtctctactaaaaatataaaattagccaggcgtggtggcacatacctgtaatcccagctacttgggaggctgaggcagcagaattacttgaacctgggaggcagaggttgcagtgagccaagatcacgccattgcactccagcctgggcaatgggagcaaaattccatctcaaaaaaaaaaaaaattaccctcttcgcattctgtctgtagtcatatactatactaaatataagcattaggaatttgagttcagtcccagcaccagtaattatcctgtgcaagttacttttaagtcagttttctcttttataaaatgaaattaatcgtgctgttatgaaaattaaatgataatgcctataaaacactgtgtcgaaaggaagtgctcagtaccatttacttttgtttacagaaaattagaggactatagtattattaatttcagtaaacaatgagtcagttaatttcattgaaaatgctagaagcagtagttccatatgtacagtccatggtttggtgggttgtagttgtagcctttgtggttggtcaccctaggtaggtcacttcctaattctgccttttgctttccagtggctggcaaacccttctaatgatatgtatgcagatacagtaacaactgtgatattggaagttcagtcaaatcccaaaataagaaaaggtaagagttcatttttatccttttttttttttttttttttttttttttggagacggatactagctctgtcatccaggctggagtgcagtggcacgatctcagctcactgcatcctccacttcccaggttcaagcaattctcctgcctcagcctcccaaggtgttgggattatagatgcctgccaccacacccagctaatttttgtatttttagtagaggtggggtttcactgtgttggtcaggctggtcttgaactcctgacctcgtgatccgcccgcctcagccttccaaagtgctgggattacaagtgtgagccactgcgcccagccactcatttttatcctttctttcatttttcttatgtttctgtgaactaaaaggcagtacatagactcctaacaaacttgatcatttctatgtaatctttaagatataaaatacacacagcaatgcatgttgttagtattttgcttatttttgtcctggctcttcactcatactgcaaaaacctggctgcaattaagactaagataaaatccttttagaaacagtcctcttaaaaataattgagtcaggccgggcgcacggatcacaaggtcaggagatcgagaccatcctggctaacacggtgaaacctcgtctctactaaaaatacaaaaaattagctgggcatggtggcgggcacctgtagtcccagctactcgggaggctgaggcaggagaatggcgtgaacmcaggaggcagagtttgcagtgagccgagatcacgccactgcactccagcctgggcgacagagcaagactccgtctcaaaaataaataaataaaaaataataaaaataattgagtcagaaatttcaaaatattgatgaattgagccagtagattaggaagatatgctactatcttcatgtttaataaaatttgttgaatagaattgaatctccctatgggacaatttgcaaccagagaaaacagtgaagatatttttgtgttacttctttgattctattttatacttaagtcagcataatatatgtcttttttttctttctttctttctttttttttttttttgagacaaagtcttgctttgttgcccaggctgctctcaaatgcctggggctcaaatgatcctctcacgtcagcctcctgagtggctgagactacaggcataagccactgtacccagctctttacatgttttgagctgtgagtctccggcatatggagtagtcctgtgtgctgtgctgggggaagtgaccatacgggaagtattctgggaagcctcagcctttacccttcacacaccattagatcctggactctcagagaatattattgttccttgaaaatatacagttagttagttctttgatttcatgagaaaaaagttgagcagactactttgtaattcatttcttatgctgcatctataatacaaacaaataaatacttagacaatctaaatctgttattcatttgagtcactggtaagcatttgaatttgctttcagtaattgtaaaaatgatcatttggacatcatttgataacttgttttagttgaattaactcatgggaaatggctcctcccatgtgcatgtaacacaggagacagctgtgcatatatataagccacaacgcatttatataagccacagaagaatgccgcaagattcttacatgatgctcagtgtcacagtcttaatcctggggtagaaacatattgacagaaaaaatgcaattgtcaattttctcttacagttgggcacggtggctcacacttgtaatcctagcactttgggagactgaggtgggtggatcccttaaggtcaggagtctgagaccagcctggccaacatggtgaaaccccatcttttctaaaaatgcaaaaaaaattagccaggggtgctggcaggtgcctgtaatcccagccagctattcaggaggctgaggggcgaaaattgcttgaaaccggggggcggaggttgcagtgaacagagatcacaccactgcatttcagcctgggtgacagagcaatactccatctcaaaaaaaaaaattgtttttgtcttacttatcttaggtggtaaaaataaaggtgtgcagggtgggaaggaggatcttttttttttttttttttttttttaaatttatctagagatggagtctctgctctgtcgcccaggctggagtacagtggcaccatctcggctcactgcaacctctgcctcccgggttcaagcgattctcctgcctcagcctcctgagtagctgggattagaggcgtgtgccaccatgcccggctaatttttgtatttttagtagggacggggtttctccatgttggtcgggctggtctcaaactcctgacctcgtgatccgcctgtgttgacctcccaaggtgctgggattacaggcttcagccaccgtgccgggcctaggaggatcttttaaaagatcatgagtaagtagtggtacagaagttaggaacggtgacgtggggaagagggttaggtgcggagagcagaatcacgcccagggctttgggccacgcagytttcagctgtaaggcccccatccttctaagagcacagctggccttcacttcctatcttagtctgttcagttcaaatcaaatgccaccagggttgctttctcttcactatatttctgatagcccttttataaaatgaagtcttttttgtaatatagtcaactaattagaaattgatatacttttctgaaaaatgaagtttctatgcaaaaatggcacttttttaggccggttaggatgttgtgtgactacaaggtctttggtgatgtttagtgtctgagctctgccagcctgttttccatgtggcagaggagggatcacagagatgttgtcaggatgtcatctgctgttctgatgagggctctgcctagcggtgatgctgaaaaacaagaggtgctgtggtatgacagataatctccacatagctcgtgtgtgttttatacgggaaggaatacatgacctgtcataggttggtttgcctttatcttgattatttctcttaatgctccggtccaaaatgaaatgtacctttactctgatctgcagtaattgaatttaaattaattatcactatattattagtaatccctcttatgctaataataaaaacattccttcctttggttagcctgtggccatttcagcagaggttcattgcagacaggttagaactgggctgtttccgtgtgttccgtgtatttagcatttgttcagctggctgggtgccttgtgtttcttagttcttccccattttgtagtttatggagaatgaggttttatattcctctgggatgatgaagtgtttgcatattttcattaacattcatttgacagatgtttactgagcacctgctccccagcaggcatgcctcaaagtgcttaggaaacatcagtgaacaaagcaaacagatctgccccctccaaggatctgacattctgscatgtcccagggcttcctgatagggtttggagttgggcagatcccatagggtcttgttggctattgtaaggacctcagactttcagtgtgagtaaaatgaggctatgctgcagagctttgagcggggctgagacaggatctgacggagtttttaaaggactgccgtggtgcttgctgaaagtactgttaggagggcaagcaagaaagcagaggctccagctgggagcttcttcagtcatccaggtggcagacagtggctcagattagggtggaagtcatggggatatcgcaaagtgctggattctggaggtgttctaataaagccagcagtatttcctgttggattagctgtaagtggtgacagaaagagaacagacaggatgaactttaagataatgatccagggtatgtatgtgataygtcagcatggacagttgtcactcgtggggctaagtgacaggttttaataagtagcacttgctcctttcaaaggtgacaagtattgcaagaactggtacatgtgacacttatgctgctcatgaggaagttgattctgtatatttattatttatcgaactgacttcttcctatccaaacttgggattttcacatttagagcagagtcagcgactgtggcccacaagccacacctagcccgcctgctttggtaagtatagtgttaccgaaacacagccgtgcrcactggttcatcatctctgatgcctctttcctgctacagcagcagaactgagtcattgcaacagcgaccctgtggtttacaaagcctagaatgccatctggccatttacagaaaaagttgccctcttctcaaggcacctctgtgaaacaatccgattcttccttgatggcatttttctcccttttcatttcttagcctcctgacacttcagtccagattctggaaacacaacttgtatttgtatctgtggtgtatgtgtgtgtgtgtgtgtgtgtgtctaaccaaccacaatttatgtgtccccattcttaaccaaaggggaaatcttatatattttcaaaatacattattttgtttttatattccataacattcttctattttacatggcacctgttttcagcatgtgtgtgtcctgttttgacacacagacctactaaggacaggtatacctgtctgattgtatagttctgtgtttaatatgatctcgtgtctgatgagtttgtctaaatattaatgcaggaatttgcaaatatatatatacatatatatacacacgtaaactttggaaagtttcttttgatagtttcatagcctagatatttattttgtaatatattttgtgagattgtttttacatgtcaattaagtgcttattttagtaattaatgaaactaatgattataattaaagtataaaattctgttatatagttttcttggctagcacctggttagttttttgtttttgtgtttttttaatatttttatttttattttactttattttattttttgagacagggtctcactgtgtcgcagacttgagtacagtggtgcaatctcagctcactgcagcctcgacctcctgggctcaagtggtcctcccacctcagcccccacaagtagctgggactatagacgcacatcaccacgcctggctaatttttctatttttatagagacagggtttcaccatgtggcctaggctagtctcaaatgcctgagctcaagagatctgcccaccttggcctcccagagtgctaggattccaggtgtgagccactgcacctgggcttactatttttttttaatggagatggggtcttgctatgttgccaaggctggtctccaactcctgggctcaagcagtcttcccttctcagcctcccaaagtgctgggattacaggcgagtagttagttgtatatacaattgaaattcacgaattaaaaagaattagatgaagtatggtttgaattctagaatagtttaggagaaatgacaagttgagtcttttccgtagagtagattgaaataggtatgtgggagtgcagaagtgagttaataaagctacacttacatgatacaatattttaaaaagtcatagtgttacatgagaaagtaattacttgggctgggaaattgaaagtgcattgaagaaatcataatttttgaagtctctttgaaatgacagagtcttagccaggcacggtagcacacacgtacaggcctagctacttgagaggctgagatgagaggatcacttgagcccaggagttcaaggttacagtgagctatgattgcaccaccgcactccagcctgggcaacagagcgagacattgtttctaagggaaaaaaagaagaaagaaattacagtcttatattatattttcctgtttataggtgaggccataagattatttctggtattttcccccatatcatacacacacacacacacacacacacgcgcgcgtttatatataaaaaatatataaaagaggaaattggttatgtatatttattatttatcaaactgacttcttcccatccaaacttgagattttcacatttgggccagcccagctttcaactcttaaggccccccatccttctaagagctcagctggccttcacttcctatcttagtctgttcaatcccaatcaaatgccaccaaggttgccttctcttcattatattctgatagcccttttgtaaagtgaagtctgttatgaacatgaaatgaaatgatgacaatatccatatatatggggtgtgtgtgtgtgtgttgtctgaaggattttaaaattctgcactactctttgtaacagcattattgatacataattcacataccatacaattcatccatataaagtgtagaattcaatgattttttagcatattcagagttgtacaaccatcaccacaatcaactttaaaacatttacatcacaccaggccagacatggtggctcacacctgtaatcccagcactttgggaggcacaggggagcagattgcttgaacccaggagtttgagaccaacttgggcaacatgctaaaaccctgtctctacacgcacacacacacgcgctcacacacacacgcgcacacacgcacgcacacacacacgtgcgcgcacgcacgcgcacacacgcacacaaagacgcacacacacgtgcgcacacagacgcaygcacacgcacactgacgcacgcrcacasacgcacgcacacacgcgcgcgcgcgcacacacacacgcacacacccacgcactcgcacacacrcgcacgcgcacacacgcacacgcgcacacacgcgcacacacacaaaattagctgggcatggtgatgcatgcatgtagtcccagctacctgggaggctgaggtgagaggatcaccagagcacagaggtgaaggctacagtgagccgtgatcataccactacagtccatcctgggcaacagtgcaagaccctgtctctaaataaataaataaataaawgcacacctccgaaaaggaaccccatatcccttacgtatgatgccccaatctctatattctcaccaactcaaagcaaccactaatctacttcctgcctccctggatttgcctgttctcagcgtttcagataaatggaatcatacaatatatagcctttgatgactggtttccttcactatgctgtgttcaagtttcatccgtgttgtcacataaattggtacttccttcctttttatggccaaataatttcccattgtatggacacaacacattttgtttatccattcatctgttaatggatacttcggttgtttctattttatgggttttatgaatagtgctaccgtggagatttggatgtaagtttttctgcagacatatgttttcatttctcttggatctgtacctaggagtagaattactaggtcaaatgctcactgtttaactttctgaggaagtgccagactgtgagctctgcactcttttgctactgttgatgcactgagttgttgaatgaggggtcagagcatgcctgaaactccagattaaggggggcccattttcccaagctgtcagatttgttttggaaggaaagctgagtaatttaatgggcaagtcattttaaatattaatttttattaaaataattatatctaatagaaagctaaatttatatcacattttagataaaagacttcacagatctttgagcttgaatatgtccctagaattcctggagttaattgcccgtggtcataaatgtaaagtttaagaaatgtgggaaataaaactaaaaataatattaagtgtcattttgtggttctttaataagaacatgaaatattggagaaagggtgaaaagatgtaatagaaaattttttttaaatacacataaaaagaacatgaaattaaatgatgaaaatatccatttcctttagcaggcaaataatacaaatccctgcttgtcactttaaggattccatagttattcmctttaacttatcagtaaccagattctgattattgatttggaaattattctgaataggaatttagaaactgaactctctgtcgcttttttttttcccaggtgcagtacagaaggtttctaaaaaattagaaatgcacgtttacagcaagaggttggagatcatgctccagtaagtttttcacccattatttctcaacaagacagtgacagcggccggaaggagccctggattcggctctgactccttcaaggactggggcgtggctctggccaggccactgccatgctcggaggcctgcttctctgttaggaaagagaggggctggaaccgttccctgccagctctgcactcacctgtgacctgctaggtcagccgtttgtgtttcatttaatacagtgcttcaggatgctggcacagggctggcacagttagcaagcgttaaaacattctcatcaaggacaagttcaaaaatcttagctgaatgttactgtatcttcaagaattattttatatatttacttgttaaatgtgaattctttgtaaaatggtgttcttctagactcttcttagtctgtaagcgatgaattaactttaaactaagtatttctttttattttattttattttatttctatttttgggagatagagtcttgctccattgcccagactggaatacagtggcatgatcttggctcattgcagccttgactcccaggctcgagcaatccgcctcagcctcccaagtagctgggatcacaggctcgcaacaccatgcccagctaattttatttttctggagagacagggacttcctatgttgcccaggctggtctcaaattcctgggctcaagggatcctcctgccttggcttcccaaaatgctggaattacagatgtgagcccttgccccatgaaacggtttaacaaagtaaggtggcctgctagtttagaaggcttttatgctaacatttctgttccttcctttctttccccaaaattctacactgacctttttttttttttttttttttttttgagacggagtctcactctgtcgcccaggctggagtgcagtggcacaatctcagctcactgcaacctccacctctcgggttcaagcgattctcctgcctcaacctcccgagcaagtgggactataggcgcatgcccaccacacccagctaatttttgtatttttagtagggacagggtttcaccatattggccaggctggtcacgaactcctgacctcatgagccacctgccttggtctcccaaagtgctgggattagaggtgtgaacccccgtgcccggcccactaaagcagcagtttagtggctttaaaaaaaaatgatagactttaaatgatgactttgtttatagaagttgtcatacatcttcaaaacagtattctctgtgttgtcattttgattttaaagagcattcctcatacaaaaccagccaacagtgcaggcacagtgattaccatggccgttgaaaaggccagagattttactggttcccacccctggagcctctggttctcttaactcattttgcagagggctcaagtctgccagcgttgaagtctgagtatcttaatcatttttagatccttcacccctttggcagtcaggtaaggctgtggggcgggggcaggggacacacatatatgcagttttacctttgatttcaaggaggttagacaaccccctccccacaggctrtcctgggacccccggttaaacagccctattgtagaaggtgggtgttgctgaccagggacttgactacaatagttctgttggcggccctgttccctggggctctacaagaatagaaaacccgtgtggccctggactggccccgctctcccacgtgctgcagtcggggtgcagaatggaagttcacattgctgtggctggtcctcaggagccgtggggagggcagtctgcgggaggctgcggcccttccactggactttcactctggccttcttccctgtcctcctgacaccactcctcccgcctcccctccctctccctcacctcccacaaacacaccagaactattcaactctgaggaacaggagtatgagacagcttccattcggccaggaatgggaggttcccatgtccttaaacttcaaagccaatcgtacccttaaaaatgcagctatttccccagttgtttaaacacttaggattagataggagtagatgtattggtttcttcagagaagccaacagtggatcacatgaaaatggaaccttttttcctatccttttgaatacatttctgtgtttaaaatrtaatttttttggctgggtgtggtgacccacacctgtaatcccagcactttgggaagccaaggcaggtggatcacttgaggttaggggttcgagaccagcctggccaacatggcaaaaccccatccaaaatacccctactaaaaatacaaaaatgagccaggtgtggtggtgggtgcttgtaatcccaactactcaggaggctgagggaggagaattgcttaaaccaggaggcagaggttgcagtgggccgagatcgggacactgcactccagcctgggcaacaagcaagactccgtctcaaaataaataaataaaataaaatataatcttttcctttgtgctagggtcccacctaagtttattcacacatatgatgagcagtaactgcctgaagatgcaaggagttgattcccactccccacttcccccgcttaatacagtgttgtcagtgcttaactgtcctaggctgaccatggtccatgggttgtttagagtcactgcctgcctttcttacctgcattcagcctgctggtggactgctgtttcctaacacctctgtaccaatggggacgatgttgaaattaaccatcaaaactgtttctctcgatgacagaggcaatgtcttagtgccttctttatccccagctactagcacagaaggaatctgccacacagaagatgctcaataaataccaagtttaattaaagtaggagtgcacagctagtgggcttgggagccatttaaacctagatacctggatttgaatgccggctcagctgtttactagctgtgaggctttaagcaaatcacttaacttctgtgtcttgttttcttcacatgtaaaaggggatccttactaaaattataggttaagataatgtatataaaccacctagcatgatgcctgctgaatagatcattcttgaataaagctgtgtattttccctgttttataaacttaataagctgtatcaaggcaaataagaagcttgtctcaaaagtaaatacaggctgggcatggtgactcctgcctgtaatcccaacactttgggaggccaaggcaggtggatcacttgaggctaggagttcaagaccagcytggccaacatggtgaaaccctgactctactaaaaatacaaaaattagctggctgtggtggtgcacacytgtaatcccagctactagggaggctgaggcaggagaatcacttgaatccgggaggcggaggttgtagtgagccaagattgtgccactgcrctccagcctgggcmacagagcaagactccatctcaaaaaaaaaaagaaaaaaagtaaatmcagtattctgctttagaactaggacctatcttcagttttattttttcctcaaatatataaagccgggcattttcactaatcctgcatttctgcttattttcagggacatatttggagaagactgtgtaagtgtaaaggatgactctattcttagcgtcacagtggacgggaaaactgccaaccttaacttggagacacgggtatgtagctgctctttcctacgtttcaagacatttgggaaataaagtgaaggcataaataatctgtgctctcacactcaacagtctactgttgcatattggcatttgcttccagtgtttccaacatttttttcacattgttctttttatattattatggttgaagttttcygtgtttttccgggttactgcatagtacaaggttcgcgtgtatgccactccattgctgtcctcttccataatacagcttagttcacctcatcccttctctagtttggcatctagttgactctccattttttaaagaagccgctcttctgtttgcaccagcaagatccaagtggattttccaaacagttcaaaaccagcccgggcaacacagttaaaccccatctctactaaaaaatacaaaaaaaattagccgggaatggcggcagctgcctgtagtcccagctactcaggaggctgaggcaggagaattgcttgaaacagggaggcagaggttgcagtgagccaagatcacattactgcactccagcctggatgatagagcgagactctgtctccaaaaaaaaaaaaaaaaagaactagaggccaggcgtggtggttcacgcctgtaatcccaacactttgggaggtcaaggtgggtggatcatctgaggtcaagagtttgagaccagcctggccaacatgatgaaaccccatctctactaaaaatacaaaaattacccaggcgtggtggtgtgcctgtaatcccagctacttgggaggctaaggcaggagaacccaggaatcaccttaacccaagagacagaggttgcagtgagctgagatcacatcactgcactccagcctgggcgacagagcgagattctgtctcaaaaaaaaaaaaaaaaagaagcaactagaagattattagtgagtttcagtcaaattcagtaccaaatgttgagtagatagccacatccattccttgccaagtaatttgtgtggcatagatgaacttccctggagtatcatttactagatcaaactgtgggctttgatgtaaatgtagtttactagactttccccagtctttcaccccagcctcaagtcatcactaattaggaccgtgctgctgtcagraagcactgcacgcccacaagtgtgtagggcggccgttctgtttcatggtaatcagtcccaccatgacctctgcacacacagatgattgttcttttttttagtttgagacccggtctcgcagtgccgcccaggctggagtgcagtggtgcagtcacagctcactgcagcctcaaccttcccggctcagtgatcctcccacctcagmctcttatctgggaccacaggcacacgccaccacagctggctaattttttatgagatgatggtttttttaaagagtattcatttatcttctatataatcattatagacttaattctaacagtcttgtttgtgcctcactttcagactgtagaatgtgaagagggaagtgaagacgatgaatccctccgagaaatggtggagctggctgcacagagactgtacgaggccctgacgccagttcactgagactgtgcctgtatatgaactttgaaaaaatacttgactctacttttgttacctaaaataaaatgcattcgtttctctgggggagcctgtttacttttaatgtcaaatggcctttatttcaacagcctgaatactgctaaattgctaattaatttgtccattattctagaactaactactagatcaactgcccattattttagaattttggattcttcttccaggcatgtatgtgcagctcccattgaaaccatcaagatctgccgatagcaaccgctgctggttaccctctcctctggggtaaccaatttgagttaataataaggattctaagttgcacttgaatcttttctgtcttcatctccactgctgctgttcgagtccaagtctactctcccctctgaattcctgcaaccacctccatctcctcccctatagctgattcctggaacagacctggcctcaagcctctgctgcttgaaggccttaatgaagtccttgtgataaagatgaagtccaggcacctttgcttgctctagcaggggctctcaatctgggctacccgtgggaatcacgtggggtgcatcacaagtgcacctgtgcccaagtcctgccaccaggaggtgagttagtccggctggaatgagggccctaggttggatcttagttgtaaagctcccccaggtgatccaagcgagcttgggacgagcaacctaaagaaagtcatgctctacgcccatcgccccgccccagggagcggggtcggcctctgcgccggcgcccctggcccttctgttactcatctacagctccgtgatttcaaggcatccttcccacccgttcgtttttagctcggctgccgaacttcattgcacagttgaggtaagaacgttgcattacaaccacgttttaacaggtgaatcccttggaagttagtcagtgctccgtgtccgcggggttctgcatctgcgcatccaccccacggcgggaaaaagaaaagcggccggctgcgcgcgcactgaaggtgcagctgctttcccttgtcattcgcagaaccacgaggtactgccagggtttccgcagtgcctgcgtcctcgtgggtgttacaggccctccagagtgacgctgggcgcaggaggccgcgcgcgcatcccacgacctcttccaggggggcctggagcagccctccgccccaccgagagccagctgtgcttcccgccgcgcgtcctgaggtcacactcctgccctttgccgaacgcacctgcgcccgcggagcgcggggtgggcttagaagggcccccaaccgcttttcttccgggaaccacgcagcgggacgcgggctccggactccctgggggcagccttgctgtgggtgagcaagcgcggaggccgagcttcttgcaaacggactccaaggggcaacgaccttcgcgcgtcaccaaagtgactgcgtgggtgcccacgagcccggctcccgcaacccacgggcggccactgcgcaggcgcctctcgtggctggcggccccgccccgccccgcccggctgctccatggcgctgtgcgaggccgcgggctgcgggagtgccctgctctggcctcgcttgttgctcttcggggactccatcacccaggtacggccgccccgacgctcggcctcccgccccggcctccctgcggggtcgctgccgagcaggccgaggctcctcgccgtcctcttcggcgcccgagacggctgggccggaggcctggccacgcccgtggagacaccggaggagtggcgggtcccccagtggctgcgccttccgggcccgcggcgtcccggaggtcacgacggcgtccgcgagagcccgggctccaggcacagacgcgaggggacccggccgcgctgcccgccccgcgccgcctcccacccgggtcgagatgcgcggtcttcccctcagcgccctcctgggcagcggcctttcccctccgggtccgggttagcggccgcgggcgaccgcgcgctgtgtcccaggaggccccgcggccagctccgggcagaggcgccaggagctctctcgccccattccctgcgggcacaggtggggccgttaggggttgaccttggaagtaaaacgccttcaggaattaggtagaaaaggaccatccgttcatccaagatcatctcacctcccatgaagggaacggtcttctaaatgcaggttcttacttcggggagggagtagaaattccattcctgtgtgtgtcctcttctcagacaggacttgcttcaccaggcttttgtgtatacgccagtaactggtaacattatgtttaggcatatggggcagtcagagctgccgaattccatgggaatgtgtatgaaaaagtgttcaccctcagctcggtaaccagcaaagcagtgaggcggtgtggccttcatttcctcactgacctttgactttatttcctgaacttagatttctgtttagcttttttttttttttctttttttctttttttgagacggagtctcgctctgtcgcccagactggagtgcagtagcgcgatctcggctcactgcaagctccgcctcccggattcaagcgtttctcctgcctcagcctcccgagtagctgggattatagacgtgcgccaccacaccgggctaatttttgtaattttagtagagacggggtttcgccatgttgaccaggctggtctcgaactcgagacctcatgtgatccgcccgccttggcctcccaaagtgctgggaatacaggctgtttagcttttgatagagaaaaatccccctctgctaaagtgctgccaggtgtacttacctgtaatccccaaaatgacctcctggagtgaagcaatcaaagccaagaagggagcgccgagaaaacagaagttgccaatcagaactgccctcgctgagatgcccggttacagtcattagtagtaataatgggcttttcttcctccagttttccttccagcagggtggatggggagcatcgctggctgacaggctggtcaggtgagaatggtttccgatacttgagttcttatggatggaaaatgtcttagggatccgtcttatggatgaaggatagttctgaacagaacattcctcctttattaattttgcttgcctcccctaatcagtatataggagaaggaacagaaaacatttactcttcactcagtctgaccaattagatattttagggttgagcactgatggctgggtagactcagacaaatcaaggaaatggccaaggcctcttccctagtcaggggcagacagatccaagtccagctgctatgactgcagaacttgcagtttcactgctacaccacactggtaggaagctactttgcctttttttgaagtgctgccatgacttaagactcaccttgtcacaattctaccgcactttgttttggtttttggtggtttttgttttgcgacagggtctcttgttaggcgcgtccacgtgaagagaccaccaaacaggctttgtgtgagcaacaaggctgtttattcacttgggtgcaagtgggctgagtctgaaaagagcaaagggagatgggtagggcagtactataggatttgggtaggtagtggaaaattacagttaaaggtggttatctattgttagcaggggaagggggtcacaaggtgctctgtggggagctcctgagactcattgtccaggggaggaatgccacaaggtcgattgattagttagggtggggcaggaacaaatcacaatggtggaatgtcatcagttaaggcaggaactggctgtttcactccttttgtggttcttcagttgctccaggccacctggatgtatacgtgcaggtaacaggttatgacggcttagcttgggctcagaggcctgacaactctgtcacacaggcttgagtgcagcagtgtgatcagggctcactgcagcctccacctctggggctgaaggcatcatcacctcagcctcctgagtagctgggaccaacaggcactcgctaccacacccagcccagcacttcattaaagtattgtgatttcactctgtaaaatggctagtcgcattttataatcattacacacacaaacaatctcttagaaataaggctgagtttcggtggtggttctgcagtttataaatgccacctgagaactttgagcagtgtcagaaagtgtccccttgtgctgctttggagccgctgcctgacgctgtggcctgcagttctccgcgggtgccccagcttctctgcttggttatgcatgtatgggaatgtgaatacagcaaaatgaaccatattgatttactaatcataagttgaaccccaggcgtcattttaagaaaactttatggacaactttaaatatctacagaagcaaagagtgaaatgagcccatccatccctcctatggattattctgaagcaaatcccaaatcatatcattttaccaagactaagaaaaaaagagtccctcttatgtgactggtattctctgaggggtttcaaacctactgcctgatgcgaatccttaactgggattctcctcactttacatgtgaggaaggagcacagcgtgcccagggtcacgcctagtcacacagggagccgagaaacaaatccaggcaacccggcttttttttttttttcccccattacacctacagtactgtgaatccaactgtttttaagaaggaaacaaaaagtattaaccggtttaagttgaaacacaacgaatgtatttactaaaactatttaatcaaaaccagaaatctcaaatattctatagactgtttaaatataaaccaaactaaactatttaagttccaggatattagtgactttttacctgagatacttgctcagattatctatctgttgtgaactccattttaaaagcacctcactataccatgcttgaagtcaggtagtctgtagacttcatcacagcccctttatatataattacttctctcacggaggagtatggtgtatttacctgtatctttgaatggcttaagattagcatgcttcagctatgttcttgctcctatcaaagtgaaacctgggggtggctcagagacacgtgacgggtttagaatcccagagagcacaccctcactaaaggccggttactgcgaccataaacacttcttgcccacaattcatctttttaaaatttttcgtttcagaaaatgtgatgttctgaatcgtggattttcaggttacaataccaggtgggccaaaattatccttccaagattaatcaggaaaggaaacagtttggacatcccagtagcagttacaattttctttggggccaatgacagtgcactaaaaggtaaaagcatttttgatgttcttctagctcacttttaatcatttttatgttacagcaaacttgcatttaatatacttttttcaactgtttactttctcccaatagatacagttttgccaaacttatgttgtttatatgtattcctggctttaacactggtggattttattcttgactcagtttctacataccttggttgctggcagtcctaatcttgcaaacagttaaatattttctagagtctgttagtgctatgctaagtttgtaatgtgttctctttagttgatgcatttggcagcagaaagcttaaggataccttgtggcttgcatcacactgatggcagctggtggcgtgtcttagggagggatatgtcagggcagcagccaccctgacctcagttaggcttgaatcctgggcaatggtgaacgtgggtttggaaaaggagatggtctctccttgactgctgaagaattgctgctgtgactagaggaaagctagccatgtaagaggcctttcttccccttctactcttgaaaaaagccttctgcgtgctatcgacgagaaaaatcagcctttgttttgggaagttaggtagtcaccttccagagatttcttttgttaccctacttgtgtcacagaagtgctgtggtctgctattcacgggcacaccgtaggagacctctgagttgaggctggacatgaaggaacaccaactgcagtaagaggaattc

SEQ ID NO: 8852 - DNA, 13082 bp, Homo sapiens
atgagaggcattctctgtgagcactgaatcctcagtgatacttgtagtctggacacaccagctaagggctctctgcctgagtcccctcaaggttggatgcagatgtgagcacacccaggagtctgcacttgccaacctctctctctgaaaccttgtctgtccaaggttatcctgaacctcttggccccatttccccatagacaagcaacttgacccctgagcacctccccttatttactgtgtccatgttcctggagagagaatagacctggtggatagcaacctatcctataggaggtgagtttgattctccagctgtgatagaaggacactaggccgtggcaggagccccacatgctgtctcagagtctggttccataaagagaaagtcccctaggaattgttccctgagccagaccctccaggaatagcagctctgctcttacctggagtggccctgctctggaccacagatatgagcagcaccatcagtaatgctgtcagagccactgtccaggggccccctgaaacctgcaggatcatcatggagttggaaaaggttggcagaatgaagagagctgcagtcaggaaaacaagaactcattaaagggagctcctgtctgaaatattagagaccatgaacccaagcagtcttctgtgaccctaggattggacagactctgagaaaagaaccaatgggcactgagctttgtatgagtcattgctcactgggcagaaagttagtattaaagatctgacaatatagagccagtgatgctgttacgaggacagatggagaacactgacactcattttaaccagtcagagtcatgagttttggggagatgatgtgttttctttgctctgaaggtgatctcagatattctgctggcccacctacagggattatcatttccccaattctgccacacctcacacacccacaggacatggcctggtgtggaagaaatgctatctcaatgtgtaaaaggtcattcagtggcatgatttagagagattagagtatccatcccagaactgaaaatgaggcctggagtctgttttgcctttgttcaaggccgtgcttcagattagtgcacattcatattttcttcctcccacatgtctgtgagtcctgagatgtgcgggggatactggctccttccataggactgtcatcagggtcagcagggctcagtctaggggccttacacctgggagcatggacacaccacctacactaccatggaagtatgcagcttgaaggacactgcctgtcttggacttcagttctttgtcttcagtatggggatgatatgacctgcctttacagcagggctcttaaggtcaaattagatcaacggatctgtaattgctttggaaaaatgagactaaaaattatacagtgaatgaggaagaaatgaaaaaatgtcataaaagaccctacattttccaaaacatctgattctgtggtgtttatactgaatagtttcataaactttcaaagaatattactccttaatttaaagacctataaatgtgatcctgtacgacctcctaatctaataaagaaaatgtaaaagtggcatcatttgtttatataaatgttaaaatgtaaatagaagactagcatgtaaaattcaagagaagaaaataattatgcagtagaaggggccagtataggattgcggggaaaaagctcacgttccctgccatagtcaccaagacagcatggtactggtataaaaataggcacatagacaaagggaacagaatagagaacccagggataaacccaaatacttacagccaactgatcttcgacaaagcgaacaaaaacatatggtggggaaagacacccttttcaacaaatggtgctgggataattggctatccacatgtaggagaatgaaaccgggtcctcatctctcaccttatacaaaaatcaactcaagatggattaaggacttaaacctgagacctgagactataaaagctctagaagatcacattggaaaaacccttctagacattggcttaggcagggatttcatggccaagaacccaaaagcaaattcaataaaaacaaagataaatagttgagacttaattaaactaaagagcttttgcacggcaaaaggaaccatcagcagaataaacagacaacccacagagtagtcacaatctatacatctgacaaaggactaatatccagaatctacaatgaacacaggcaaatcagtaagaaaaaacaaacaaccccatcaaaaagtgggctaaggacatgcatagacaattctcaaaagaagatatacaaatggccaagaaacataagaaaatgctcaacatcactaatgatcagggaaatgcaaatcaaaaccacaatgtgataccaccttactcctgcaagaatggccatgataaaaaaataaaaaaacagtagatattggtgtggatgtggtgatcagggaactcttctaccctgctggtgggaatgtaaactagtacagccactgtggaaaacagtgaggagattccttaaagaactaaaagtggaactataatttgatccaacaatcccactactgggcatctacccagaggaaaataagtcattatatgaaaaagatatttgcacatacgtgtttatagcagcacaattcacaatcacaaatcatggaaccaacccaaatgcccatcaatcaacgagtgggtaaagaaactgtgatatatatatgatggaatactactcagccgtaaaaaggaatgagttaatggcatttgcagcgacctggatgagattggagaccattattctaagtgaactaactcaggaatggaaaactaaacatatattctcactgatatgtgggagctaagctaagaggatgaaaaggcataagaatgatacaatggactttggggacctgagaggaaaggtgggagggggcaagggatactgctcaggtgataggtgcaccaaaatctcacaaatcatcactaaagaacttactcatgtaaccaaatactacctgtaccactataacctacgggggaaaaaagcaacataaccatgaaccaactaataaaaaacaaccttgccttcagtctgcatcctaccctagagacactctctctgtgtcctcacacttggagctaagcttctgacttttgtctccagtacacccctgaggatcctctcatcacggccatcagaaacctctgtagaaggtcaaatccagtgggttcttgtcagtgcctctgacttgagttactgataatatttgcaccataatccacttctttctaatgagctactctgtccttatttttctcctatttactgaatcctccttatcatcctttgaaatctcctcttaattattatgttctctcatcataccctgagatccctgcatttctgatttttggcactcttcctggaaaagctcatctaacctgcacctatgcttgatgactctcagttctctggcttaaactcctctactgagaccacccatcatacaaaaatgtttacatattatttttccttagataacttttagacattctaagtgcaatagccccacactgaactcagtctcttctctcagtcaggctgtcttctctcattaccctttttaatgaatggaatcaagatgtttgcattgggttggggagatgttggtcaaaggatacatccatttcatttcatttaggatacatttcaaaagatacatttcatttagattggaggaataattttaagagttttattgtataacatggactatagttgctaacaatgtattgttgaaaattgctaaaagggtggattttaagtgttctcaccacaaaaaataagtatgtgaggtgagccataagttctttagcttgatgtagccggtccatgatgtacatacatttcaaaacaacatattatacatgataaatataaataatttttgtcaatcaaaataatttagaaaagtgacacacacttacacacacacacacaaaagagatgattgcattggccagtctaggaataagagttatctgggagttttctaagtcggatgccaccgacatcactcaccaataatccctttaatgtcaatcaaattaagtcctcttcttccatcattttactcctatgcccatttcctcactctttgttcaggcactattagtcttgcctcttgaaccaacttctttcactcatgctgcccactgttgccgtagtgatcttcctaaattgcaaatgcgccatcactctcctgcttaaaatccttcaatgattccttatgacttccaggacagagtagccactcctgagctttgcatgtaacatctgtcatgatccagcccctgcctgtctatttttccttttttcttgctgctgttccacatccaaagctggctccattcatactgaagcagctgaagttcttcagatatgtcattgccacactgggcccacacttttgaacctgcttcctcctgtgtgagaagtggcttctgccctgttttcggactgcctacattgaagccatctgttccccaggaaaccttccctgatgccttgacagcagcatcttgtgcctgccccatatctgcacttatccatctgggcctgctgttgtcttgtcacttgtgttctcttctgtgaactgtaaacatcaggaggacaagacctatgtcttacttttatttgaatatttagcatctaacaatgttcgacatatagtaggcttttgatactatttttttactatgacattgtagtatatgttaatatccagtaggacataggatatattctctctgttttcaatttttcattgtttacacacatttataattctatctataaggatttacaattatttacatgaaatgaatgaaataaatagagaatgttagatattaagagacagtgtggaaagccaggctgggactagggatgcacttaccttaggtgcaaaatttaggaggataccaaaagaactcagtaataaaagtcaatcatattttaatgaaatatcttaagaaatctaaattaatggaaaatatataatgaacaaaatgtcaaaagagaactattcaaagaaaatggagaagcagagaggcagaagaattagtagaatatactggcacataagccaaggaggtaaagatttccaggaaggaggaagtagagtggagtcagaagttcaacagaagtcatttcagaaatcttaccttggttttgaaatcctttcagagagcagttttacataatgtgagcaattatttctccttcatccccatcattccagaattgagcttcttctctggcttcagaaatgtggcccttccccttgtcaggatatgttggcgacatgatgcatgcggatgccctcaaagtcagctggggtttgggggtgaaattaattgactttagggaactccttgaatgctaagttctgttcacctggaggaccagagagggcacagagatgaccacctagcttctgcctgggacctaaacagggcagagaaataggaggatcaggtataaagggagcagggaagatgggtctgggcttacagtactgaacccagggatgacagtaactgtgtgtgtctcgaggcaggtgacaaaatatgtgaaaggaagaggacttaggagagatctgaattccagctgttttacaagctatatctcagctttctttctcaattcatgtgctctctaccccaaaggctgatggaattgctgacccttcaagttctcttctcatctgcaccccttccctcctgctgcacactgttcagcgacatcacacacttctccagcctcctctcttcctagtcttaccccttcccagtttccataactgaactgtcctgttgaggagttcttagcagccctctgtgaccacaagtgcaagttgcactcccttctgagacaaagtcccccatttattccctcctgagggcgtgtcccttcccctgaccctcatggactctcccaggtgcaccccctgtggatttgctcctgggcctgagtttcccctacttccctgatggtgtctggagggcaaggggtatctgtctatctactgagtgtcataaactgcccaactcagcacacccaccctctacctcttcctaagtgtagtgacacggtgagggaggtaatggggtggggtctggaatcagacaccaggaggaaaggggtggtggctctctttgcctctcactctgtgtgtatttctctcgggtaccaggaggatttcctaaagatttctttctcctgactgttttctggacccgtcctggtctccaagctcccctcctgattctctgcagtgcccaggtgtccaacagttgagcctggagccaggccaacttgtcagcttcctgtatgaggatcagactggacgacttcaacctgcttagcccgtcttctgaggcctcaccctagtagttggcaagtaagtctatttgctcctctggtctgcctggcccacacttttgtgagaaagtgccctagaacctgtacgctctaaactgtgaaaccctgttccttcttttggccacaacacacctacgcactgcccaaagttcagtcacttctagcccagagtttgggcttagagtgcatccttctctgcaagttgtgttagcctgtaccttgggcaagttacttaaattttttgagcctcagtttctacatcttaggatggacagtaaatagaattggcacaaacaagtgagaaagtgatggcacagtgtttgttgcactgtaagcacttgataaatggcagctattgtgattactgctctcatcgtcattggtttcaactttcatcaacagatctccaaccctgttgacgcccctgcttcagtcagtcacttgaacctctcactccatgaccaggtggcaccttgtggctatggccatgaagggccagtctgtcaccctcattgttgactgcaagatgtgagtcacccggcctctcccctgaagaactagtccagtgttggacacctgtggggtgataattgttggtgcctgtatcccagatgaagaaagtctttgaggttaccacaaaaatcagagaaaggagtgacttctggtcccttattttgtgcccactcctcttctggccccagtatgcaatgttcctatttcctaagccttcattttttttcttgtgaattttgatttgcatttcctatcttcaggactgctgatctctgcagaataactagatgtccacttatgtggcaggactgtccacagccacttattctatccttcagtcttcatctytccatctatccatcccttgaacctatctctctcctcatccaccccatccatycactcattcaccagtccacctaygcacacatccaccacccactcccgcaaccatttacccacctatgcatcacaaacttacccatctactcatgcatgaaggcttatatccactcacctgtccatcctccccctgcttaaygactctccccttctttacacacatctattcgactatgcttttgttcatctgtcctcttcaacttatccatccatctattcactcacccacccactcacacaccccatctacccatgcatacaaggatgcatgcatctgttcagccacccatctatccattatccttcctggaactcaaccactctctccttcaatacactcatgcacccatctcctcacccactcacttcacatccaaccgttcaytcaaccaygtattcaattccacccatctatctattcactcatctgattccatctactctgtacctcccgctcatctacccactaagccttgcatgcataattccctctgcaggagtcccattgtacctgttttgtgcctttcttttcactctgggtcatggtagccatattgttgaaggttcacttcccagatcctcttttcttggctgcttcctgtckgtacagcyrcttcctgtttgtccagtttgttttgtggccatcttggccatgtttaattttccttggccctggcatcactcttgcatccaagtgtttgtcattttattttgtgtcccttagttgttctmatatcttccagtattctctgtcagttggactgcttcctgtctactctgctacatcttctgcctgccttgcagttatggctgccttttctaccctgctgctgcatcccacacctcctgctcttggcacccgygagcttctgctgcctttcctttatgctgctgtctgggtctttggggttgatgtgggatmtgggagaattttgaaayggatcattgctgtcaggatgaaggtggagaggggcattctgaagatctttgttttggggagttggggtggtggtgaatgtttcaccttctccccacccttatcttgsctatggcctggatttgggaacaggcatctgaatggaggtgtgcaagggagggaactggttggcttggagtgtacatgagggccagaagaagggcaaagcatcctgctgggagaggaactgtggggtgyattgtagggggctgctctggrgcttggataactgagcccaagaactrtatgttttgcaaaaggcagttatgaggcctgagtttggaatatctctgggaaatgctctccaaatttmcttggagtatggatacttaacctgtgcagggtttttacatttttgaactccttcaaattctaaataaaattttgtgcataagggcatataccttttcttttttggagaaagactgaaagactcaaagtcctctttctgaaagaggctcttcaggatttggagaggttgtgtttsctgaggtgggactgrgaactggggtgcagggaaccctgagatctccttggcaggcatgagagttttgtgaacagaagtatttagaggaagcctgtggggcttgtgggtagggctggtctggtctccagaggacccaaaatcgaggttggagttgagatkggggcaggcctggtgtcctggctgctcatgggccccactggggttacatgtgtgtctccctyaggctgcccatgggccccggggkctgaagggaragaagagagagcctgcagtgctggaacctgtaagtyatgctggtcacagggctgaggtggtggaaagaggagaagcaagtggggtttagtgtgctggccctgtcacctgtgagttttaacctttgactccacagggtatgctcktgraggggmcccctggtttagaaggccctgtggtgagtctagcagtgacctggtggccattgttttcttagagatccctcctatgtgttcatctgtgccttccccacatatgctcaggcctcctcctcagaactccggagggtccttccaataaaagttttttaaaaaatcatttygaaaaattaattcaatagtttttggggagcaggtggtgtttggttatatggataagttctttagtggtgatttctgaggttttggtgcrcccatcacctgasgaatgtacactgtatccagtgtgtagtcttttatcccttacccagctcctactcatacctggaagtcctcaaagtccattatataattcttatgcctttgtgtcttcatagcttagctcccacttataagtgagaacatacaatatttggttttccattcttgagttacttcccttaaaataatggtttctaattccccctaggttgctgcaaatgttatttcattctttcttatggctgagtagtattctaaggtatatagatcacatatatatcatatgtgatctatatatagatcatatatatatatatgtgatctatatatatatatatatatatagatctatatatatatagatcacatatatatatatcacatatatatatatcacattttcttcattcacccattaactgatgggcatttggggtggttccatatttttgcaattgtgaatcatggtgctgtaaacatgtgtgtgcaagtgtctttttcatacaatgrcttttttcctccagtagtgggattgctggatcaaatggtagatctatttctagttctttaaggcatckctgtactgttttccataggttgtactagtttaatttcccaccagtagcatagaagtgttctcttttcatcacacctaccccaacrtctatttttttttttatttttaaattatgaccattgttacaggagtaagttggtatcacatagtggttttgatttgcatttccctgataattagtgatgtagagcattttttcatatgtttgtcaaccatttgtatrttttcttttgagaattgtctgttcctctgcttagcccactttttgatgggagtatttgtttatttcttgctgatttgtttgagttttttgtagattctggatattagtccttttttgtatgtatagcttgcgaatattttctcccactctgtgggctgtttactctgatgattatttcttttcctttgaagaaactttttagtttaattaggtcccatctatttatcttgtttcttttgcatttgcttttgggttcttggtcatgaactctttgcctatgccaatgtctagaagagtttttccaatgttctagaatttttatggtttcaggtcttagatttaagtctttgatctaccttgagttgatttttgtataaggtgagagatgaggatccagtttaattcttctgcatgtggactgccaatttccccagtaccatctgttgaatacgctgtcctttccccactttatgtttttgtttgatcagttggctgtaagtatttggttttatttctgggacttctattctgttcaatttgtctatgtgcctgtttttataccattcccatgctgttttggtgactatagccttgcagtatattttgaagtcaggtaatgtgatgctccagatttattcgttttgcttaatcttrctttggctatgtgggctcttttgtagttccatatgaattttaggattgtttttttctagytctgtaaagaatgatgatggcattttgatggggattgcattgaatttgtagattgcttttggcagtatggtcattttcacaatgttgattctacccttccatgagcatgggacgtggttctacttgttagtgtcatctataatttctttcggcagtgtttttaattttcctcgtacaggtgtttaacctctattgcgggaagtcagggaccctgaatggagggaccggctgaagccacagtggaakaacataaattgtgaagatttcatggacatttatcacttccccaatcaatactcttataacttcctatgcctgtctttactttaatctcttaatcctgtcatctttgtaagctgaagatgtatgtcacctcaggaccctgtgatgattgcgttaactgcatarattgtttgtaaagcatgtgtgtttgaacaatatgaaawctgggcaccttgaaaagaacaggataacagcaattttcagggaacaagggagataaccataaggtctgactgcctgcagggccaggcagaacagagtcatatttctcttcttgcaaaagcaaataggagaaatatcgctgaattcttttgtcagcaaggaatagccctgggaaaagaatgcattcccgggggaggtctctaaaatggccactctgggagtgtctgaattacatggttgaagataagggatgaaatatgccctggtctcctgcagtgccctcaggcttgctaggattaggaaattccagcctggcaaattctagtcatactggttctctgctctcgaaccctgtttcctgttaagatgyttatyaatgacaatgtgtgcccagcgggatgtggmacctcatcagtgattctagttttgccctctgccttgtgatcttttaytgccctctgaagcatgtgatccctgtgacccattccctattcatagaccccyrccccttttgaaatccrtaataaaaacttgctggttttgcggctcaggtgggcatcatggaacctgctgacatgtgatatcacccccggagacccagctgtaaatttctctcttttgtactctttctctttatttctcagactggcccacacttagggaaaatagaaaagaacatactttgaaatattgggggctggttcccccagtaaacctccttggttaggtatattcctaagtattttatttttttgcagctactataaaaggggttgagttcttgatttaattctcagcttggtcactgttagtatatggcagtgctacagatttgtgtacattgattttgtatcctgaaactttactgaattcatttatcagatctaggagctttttggataagtatttatggttttctaggtatacagtcatatcattggtgaacagtgacagtttgacttcctatttactgatttgtctgattgctctggctaggatttccagtactatgttgaatagaagtggtgagagtgggcatccttatcttgttccagttctcagggggwatgctttgaacttttccccgttcagtataaggtcggctgtgggtttgtcatagatggtttttattaccttaagttatgatctttgtatgtcaagtttgctgagggttttaataaaaaagcgatgatggattttgtcaaatgctttttctgcatctattgagatcatatgatttttgttttcaaatctgtttatgtgatctatcacatttattgacttgtgtgtattaaatcatccttgcatccctggcatgaaacccaatttatcaccatgtatgatctttttgatatgctgttggattatgttagcttgtattttgttgaggatttttgcatctattttcatcagagatattggtctgtagttttcttttttattatgtcctttcctggttttggtattagggygatcctggcttcataraataatttagggaggattctctcyttctctgttttggaatagtttcagtaggattggtaccaattctcttctttgaatgtctgattgaattcagctgtgagtccatgtgaatctgtgatttttt

SEQ ID NO: 8853 - DNA, 12645 bp, Homo sapiens
cctcaggctgtagtgtggggtaccatcactgctcactgcagccttgacgtcctgggctcaagtgaccttcccaactcagtctctggagtagctgggaccacaggcgcccaccccacaccccgccaactttttttattttttgtagagatgaggtgtcactatgttgccaaggctggtctcaaactcctgagctcaagtgatccttcagcctcagcctccaaaaatgctgggattacaggtgttagccactgctcctgaccctattttaggcattttaaataagactggtggccatcacaaactcctctgcatccctgtgcttggcatggtgccaagccaaaagtaaatacaagctaaatactgaagaattaatgaacaaatcaataaacaaatgaactgaatgggttgttatacatgcctttggttaatgaaaacagaaaacaacaattaccattaataatttgaaattcaaaacacttctaaacgtgggcccatggacagcctgaaaggcatcattaattaaaaaacattgaaaactagtgggcaaagaaacccgtaaagactttaagatccttaacattccatgttttttctttatctcagagccaggcatagcacactcatcccattcttgtcacctaaggaccaggaattcattgccataacagaccccaggatgccgcccacagcctgacatatcaataagtctttggtatctaagtgaattaaagagctcttctgagcctatgtgaagaattcccagcatttttctgctctgttcactcggtttactgagtacattaagattctaaatcattctgtcttcacaaatgtaggtttgtccctttggggacaaaaaatttccaggatgataaccacgatttcaaactccttaccattataggggaatatacaggcttgatgaaatcaagcagaaatccactaccagacgtttttgccattattgattttttttaattccaagtgaatttaaaaagaaccaaaataagatgcatggcacattcatctaagcctagtaattaaatccaaaaaagcagtttatagtagtttaagcaaaaagaataattttagaaagtaccacaggcctccactatctgaaataaattaggtgttttttagtttccttatgttattaaaatattaatttactttaaaatataatcctgaagcttccttcgaaataccttcttcaaggaaaggggcatatatttatagtgttcttttaaagtttaacaaaagaaggattcaaactgagttacctccactctgcaaaagtctttttttcaaatgtgtaacaggatcttattgcagtcacttggtctgctctccacacaaagaaagactggaaagcatttgtgttatgcttctggagttaaaaatgaagacgcctttttgcttccatcagttcttttttattaataaggtggccacaccaagtcagaaattataaccatctgctttagccattaaatacagattcaaaggcctaatgataaagtgacctctttattaataacagagagcgacaagtggccattttcccagagtgttcacagaaataaatcaatccgtaagtccaggtatcagctatatcggttcttaagttttctcttcgatttggcctttattgttttaaatcacttaggaaacaaaaagggagctcaggaagtaccttttccatgagttttgtttttatctctgctcttgatgagatgtcacttagccacctcacataacttgaagacacgatctttcattctccacatcacagaagaatcatccccatgcaccatctaaccgatgagtagacacatgggacttatcagcagcagggagtatatctgaatcaaagcctcaaacaaaggtgtgtaggaaaaccacagctctgtcaaaggaaacaatagtggaatcactgcagctgtattttaatatggcaggaacacagccccttgttttctttaattcacatattagaattttaattatcaagttgctaaagtgtggtggctttcaattgaagtgggttttaccgacccagcctcgcagggcagacagaagtcctttgttgcgctgccagatgcacagagacgccagcatggcaccatccacgtcctctgcctcagatccttctggcaggaagcctctaccaccacctagagcacaggagtctctgggagatgaatctccctggcccttgtccaaggggctttattactggaaggaccagaaagatctctttacaaacctgatctttctccttacccaatccataggctggtaccagaagaaacagcagaagactgaactgctacgatagaagtagaccgtgaaggatgagtagttcttgcggggaatactttgtgaaggctgtggagaaaactcctgtcccaccacagggagaattcctccaagtcccgtctttactacaaagttaaaaccctctagaaacccacaacaccaaggcacggagccagcacatacagccccaacacctcttgctcctctccctggcttcctgtttcctgatttcccctcactgtttccctcactcctaccactgtggagaaggcagtcaccatctgtcaggtggaagaagacctctgcagggctgtggggacagaggcaagaacactggactgatagttcaacagaggcccacggaagccagcctggaggagatagcgggtgagctcttgtaaccagccaaatcctacagatcccccttagtgacttcacctccaaggccgctgtcctgggcctgtggtcagtagagtccttgctctgcagtaacgcgctgtgccgcattaggagtgttagtgagcttctagaggccttactattcttcccccaaaacataagagcgcagagttacgtcatgtcaaaagtcccttgaaggtttggcatttataactttacatcacttcctgtatctattgcctcagttccctcaagtatcaagccgcgcagttgcagatgatttcaaggccctttccaacacagaggctctgtgattccgttgatgaagccagatcacaagcaaggatcatgcttttaatctcagtggctctttctttgccaaataatgataggaatgtacttcagctgaatgcccccatctcagctaccagtacatctggttgggaaacctacatctatctgcccacttgccaacacggaaatcttcaaacaaagacaagatgattcatggcatctttaatagggcccccaccttgacattaagtcttgggctgaggttatcgaaaacagcaagtatacaaagaatttactcacagcctgagagcaagccagagaccgcgcaggtggctggagggaaaattgacaagaattacaaagaaaaggtgcattgagttaatagaaaataactctggtattgaggaacaggggctgaaaacagatgtgaggggtaggccacctcctcaccatgaggagtgaaagcaagaaccacagctgctgatttctcaaacacacacacacacacacacacacacacacacacacacacacacacacacacattctctctctctctgtcaaataaaaaatataaaattcactatgctggcccaaggttgtgggttgcggtgcccttcaaggaatattgtagagctgaaagctgattagacacagcacccaaaaatcagtattccagaaggagtcagaagctaaagatgacagtttcacatactagagggggtgctgagtataaaaacataagttcaggctccatctaagcttcatgatcttttataaattactaaatctctacaccaaataaattcctcatctgtgacatggagactacaaatatccagtctatccgaaaagagatttttaaagcaggtaaaacacatacaactatctggggcacagcagacactcccaaaagttggaagttactatgaagatgcatgcaggtatcagagatcagaacacaataatgggtcaatccagagagacaaacagaaatcaagaaaaggcaggcagtggcaaacaaggcaaaacagtgggtcaaggattgaaacaggaacctaaaagaaatactccagcatcatcacttttaataaatatctattgatgttaaggagaagaaagcagattgccagatgagtgataaaagatgacctcattcattgaaagagaaagagaagcaaagacacaaagccaaggaagacagactacagagatatactccaaatactattgtatagtagttaccactactactagtagggttagttcaggtttttttgtttgttcgtttatcagtattttccaaatatttcagtttttatttcaaagttaaaaaatgataccttaaacatttaataataggccctgagtagctgttctttcagggaagctgaagccctggagaagatcactggcattctgaaattcaggctgtgctctaattatttgaaagttcttaacacatatatggagaaactcagccagtctataaatatatgtagaagcccttcttaattcaaaagcatgacattaaacatttcagggaaaaaaacataaactcccaaagagtctccatctcattagagaattagatacgctcacgttaaattataactcacaaagcagggtgcactagtgtaacaatgaattcaaggagagtgatttgagccaggctgaggacaactggaagacttcaaaaggcaggataaagtcactttctgctgcagagacaatttaattaaaaagaagctcctttctacccctcctccaggtaatagagaattcattgtattctgagaaattgaagatcttacaagaaggcagattgcatgaccttccatttgcaatatattctttcaggaaagggagtaattaggattgcctagaaggggctgctttatttcattgaggagataactttaaacaggcttcctcactacatgcaccacactcaacaagcaaactccctacactggactcctatagggcctaattctcacctcagccccagctttacccagattctctaacctgttattattaagctacttagctgccttccacccttcatccctagaccccaaacaccctagtagactgtgaattccttttattctttcatgtattcattcaccatttttttcaacacatgctatgtgctagcaacacaaagataaataaaacaccccccatccccataaagttgatagtctagcagcagtaactgacttattagtagatatttacagctcaatggccgacacatgcatggagcatccaagagaaggaagaggatgtgcctaaccagcgtgaagccaggcaacagggtttggaggacattgcaagaagagtgggtggcaggaataaaggcactaaccatggtgaaaagggacacagagtcagcagaaaaccatgtagccagatcttaaagtgcgaggcagagagtggaaagacacaaccataacagccaacgtttactgagggctaaccatgtgtgagctgattaattcctcaccaacccatgaggtaggttttatcatcctaatgttagcaatgaggaaacaggctacaaaggttaagtcactgggagagtaagggagataatcactctgatatgctgcccccctaaggctagagggattagcaagggctggtctgaaaatccctttggtgtcatgctaaggagcttgggcctttcctatagataataggcaggcagtaaatggctttaagcagggaagagtcagatttatgtctcaggaggctacttcagcaaggtgtggaggactaatatgaagagggacccacccagagttagggaaatcagctaaaaagttgttgcaatcttcctatgagcaatgtgcagcctgatctaatggtgcaaagaaggaacagagtgcagtcgggtcccagcagcggctgcagtgctcttgtcttctgcggctctccatgccctctccttttcacttctggaaacatggcctctggtgtggctgtctgatggtgtcatgaacatgttcaacgacatgaagktgcataagtcttcaatgccagaggaggtgaagaagckcaagaaggtggtgctcttctgccttagtgaggacaagaagaacatcatcctggaggagaccaagaagatcctggtgggcgatgtgagccagaccatcgacgacccctacaccacctttgtcaggatgctgccagataaggactgccactacaccctctgtgacacaacctaygagaccaaggagagcaaggaggaggacctggtgtttatcttctgggtccctgagtctgctccccttaaaagcaaaatgatctatgccagctccaaggacgccgtcaagaagctgacagggatcaagcatgaattacacacaaactgctacaaggaggtcaaggaccgctgcaccctggcagagaagctggggggcagtgcggtcatctccctagaggacaagcctttgtgagccggttctggccacctgcctggagcatctggcagccccacatctgccctcgggggttgcaggccgtccccttcctcccagaccagaggggctggggggatcccagcagggggagggcaatcccttcactccagttgccaaacagatccccccactccctggattttcctcctccctccatccctgacggttctggtcttgccaaactgcttttgatcttcttattcctcttgggttgaagcaaaccaaattccccccaggcaccccagttgtggagaggggcctatatttttaacaacacccccacatccaacctgttcctcccccttcccatgctgccaacttctaaccacaatagtgactctatgcttgctgttcagttctgtgtataaatggaatgttgtggagatgacccctccctgtgctggctggttcctctcccttttcccctggtcactgctactcatggaagcaggaccagtaaggcactttcgattaaaaaaaaaaagaaggagcaaagggaacagatgcaagatatatttgttgggagacattctccatgagtcccttccgtttctgcacatcttgtgagcaaagcactggctgcccttggttccagactaacttttcaaagatgtttatgtggagagcagccttggaagaaatgatctccctctggagcaaaggtgaagcatctttgttgcccaatataaaagatttgggttccctaagttcagagtttctctcctgtaacgcaatgcacttcatgtatggatgtcacctggccctcttcatgacatcctatgggagttgggtcttggagaaacagtgaataaatatgttgatactctggctattgctattgctatgactaataaatttctttgtctctaacccacgaatccttctgccagcatctatggaactgtggcaggcaagttcatttgcaagtaagataaagtctcaaatccttcacagttcttgatgatatttaggggaaaaaaatcagtaggattggtgaatggccaaatgtagaatgttagggagaaaaaaggaatcaaatattacttctggtttttttgtttgtttgtttgtttgaaggttgaagtttggacagtggtttgaatggttactttagacagtggtgtcaccaacagaggtgaaatatataacaggtacaagaatgtaatatataatgaggcatagtgggtgctggggatgagataataaattcagtttggaggcctatgagacatccatgtggaagtatccaacatagagctgaataatgaaggcaaaaggagaagagttggattaaagatatataggggtcattagcatcagggcataggtaaacccatgatattggataaaatcctctttcatacagaaaccatcatattcatccttaaacccttagtcccctgcagagggctttgcacaatgtatatgctcaataaatgtctgttaaataaatggctaaaaacagatccagaattagttgtatcctttatttaaattaaaattgcttcaatggttacttgtgtaatgctaatccaggttttctcaaatcagagtctcaaatacagggtatgtacttttgtttcacatgaaatacaaccagtttcatacacaaataattacaaactcttacatgtaacatggaagcagaacagaattctaagactcataatatcatgtcattaaaaagcaatattgttggttttcttattggagaaaaaagttctattatccacaggatcactcctaccttcattcattcaacataacaaaaaacttactgaggacctactatgtttaaggaacagtgctgaaatctgtaagggatctaaaaagcacaaaagtcccttccttaaaggaatttacaaaagcagggtggtggcacatacaccagaccggaatttagttccaagttccacatttagcaattttatgaccttgagcaagttacttaacctctacaacctttagttactaaacttgtaaaaagaaaacagtgaaaatgcatacctcataaatggcaatgagacgtacattttgtaatacatgtagagtatgtattataatactccatcaaaaatggtggccagtattataaccatcatgataaactagttggggaagaaatactcatagaaatactcatagaaaaaccactcagttagagataatgcagaacattataaatgccattgaagtgctaaagcgctagaaacacagacccttaggaacctgttgaaaacagtagtagttaacactgtgttttaacttatttaaaccagcccaacaaacctatgaatgaatagtattattcccattttctagatgagaaaactgacacctagacaagtcaagtaacttactccggttcacccagcagaaagtggtggggcaggaaataaacccagtctgtctggctccagagtctgatgccaagctggctcctcagggagaatcatgcatttttatgacttatatgttgaagacaaaagaactgaactctttgaaactatttgccttcaactcacaactattatacaaatactatttactcagaattggaagattattttaaaatatctaaacaaggccaggtgcagtggctcacacctgtaatcccagcactttgggatgccaaggcgggcagatcacctgaggtcaagagttcgagaccagcctggccaacacggtgaaaccctgtctctactaaaaatacaaaaaaattagctaggcgtggtggcgtgtacctgtagtcccagctactcaggaggctgaggcaggagactcactcgaaccccggaggcagaggttgcagtgagccgagatcgcaccattgcaccccagcctgggcaacaagagtgaaactccatctcaaaaaaaaaaaaaaactaaacgacaagcagagagacttttctaggttagctcaggtcctatttcacagattctgaaaactgtaaagggaggaagatttaatgcttcataccaaacacagtgtaagacaaaatcacagtgcatcatggatggatgcacaaaatccaaagtgactcaaagtgtagggctttgggcttaaagctctgaggcacctttatgaaataaaatgactccatttaccaactctcatttcctactgttcataagcacttccttaagcttaatatatactcctctcagatgcagagttttgggggttgtttttccatttccatgagaataatgtaacagactgatgagatatattcagccactgtgttgggccaccttggattttcatcaaattttgttttatttaattttcaaagaaaataatgatgaaataccctaaatatccaatcactgagtgatggctaaataaaagaaataaaagaaaagaaaaacaatatctataaagacttggaaaaaatagtattatgtattaagtgaaaaaaaagcttgctacaaaataacatagacaagatgattacatttatggataaaaatgtatgcatagggcaaaaaagcctgcaaggaaatgtacccaaaatattaaaagtgattttttgtgtgtttataatatgagccctagtctttcactttctcagtgtttctttattttctgaattttctttggtacatatattatttgcaccttttttaattgcaataagccaatataaaaacaaaaaaaaagttcaatgtgctatccattgcactacagagccttcttatactttttaaatgtttggaatatttgtattacagacagattaatggataaatagatgccaaattagatagatagatagatagatagatagatagatagatagatagatagatagatagatgatatggagacagacattcttttaccaaaacattacagaacagctcctcttagaaatatggtcaaaatctggcttccccgtccaattcagctgtctctttctttaaaccaatcaaccatctatttctttaaggtaaatgttacttaaaagcatcttagatggacagatctgacttttgaagccctaaacagagggtacaagtaaccaattaatgcatgaattacagccatgcgtcacttaacaacagatatgttctgagaaaagcattcttagttgatatgcttgttgtcatgtgaacatcacagagcgtacttacacaaacttagatggtatagcctactacacacctaggctttatgatatggcctattgctcctaggctacaaacttgtacagcatgttaccatactgaatactgtaggcgactgtcacacaatggtatctgtatagctaaacatacctaaacatataaaagatgcagtaaaaatacagtataaaagattaaaaatgttacacctgtagagagcacttatcatgaatggagcttgcaggaattagaagttgttctgggtgaatcagtgtgagtgaaagtgaaagcctaggacattactatacactactgtaggctttataaacactgtacccctaggctacactagatttataaagtattttctttcttcaatagaaattggacagcttactgtaacttttttattttataaactttttatttttttaactctggactcttttgtaataatgcttagcttaaaacataaacacattgtatagctgtacaaaaatattttctttatatccttattccataagcttttttctatttaaacatttttaagttaaaaattaagacacaaacacacacattagcctaggcctacacagggtcaggatcatcaatatcactgtcttccacctccacatcttgtcccctggaagctcttcaaggggcaataacaggcatggagctgtcatctgctatgataacaatgccttcttctgaaatacctcctgaaggacctgccttcaggtccttcaggaggctgttttacagataatgttttattttagaagcaaaagcagtacactctaaaataataataataaaaagtatagtaaatacgtagaccactaacatagttgtttattactattatcaagtatacttactattatcacaaatatacttactattatcattatacaattaggtatactgcatataactggaggtgccatagttttacaggactggcagggcaggtttgtttacaccagcatcaccacaaacacatgagtaatacactgtactacaacattacaataactacagcctctctaggagtttttcagctccattataaccctattggaccaccatttatatgcagttctaacgctgactgaaagatgattatgcagtgcctgactgtagctaccatacaaatgtgacaggaagagtaacttagctcatacacaattacatacatacttattttttaagagacggaatctcgtttctgtcacccaggctaaagtgcagtggcacaatcacggttcactgcagcctcaacctcctgggctcaactgatcctcctactccagcctcccaagtagctgggactacaggaacacgccaccgtgtccagctaattgttgtattgtttgtagaaacaacgtctcactatgttggccaagctggtctggaactcctggcctcaagcaaagatacacactttcttttgacagccacaaacaattaattatcaatataaatgtcaatatgacacactgaaattgcttttcagaaaaggttatccaaatttaattttgtcaaagaaaaaaacctgctctactggccagaaagtactgagttcagtctaatgaaatgagtagaataggtacacaaactacatagggaactttgagggctgtttccatctggaaatgtgcatcatgtacacattactccacatgcaaccagtcatcctttaaccactttcaaaacaccagccataacacaatctgaaaaagaataatagtatgcatattttttaaaagaatacaattattggaagagctttgggaaatgaatgcagccctactgtggaggtcaaattcatacgtagtaataaaatgaaaacaaatctgacatactgaacacttgtcatgtggctctcactgaaagggtaagcagaattttcaaagcaggatagaaactggagttcagtggaaagtacagacgcttgactacctttctttatggggaacagaaacattctattagccccctg

SEQ ID NO: 8854 - DNA, 12548 bp, Homo sapiens
caaaaataaaattaagtatgtataataataattattattatttcgagacagagtttcactcttgttgcccaggctggagtgcaatagcgtgatctcggctcactgcaacctctgcctcccgggttcaaccgattctcctgcctcagccacctgagtagctgggattaaaggcacgtgccaccatgccgagctaatttgtatttttagtagaggtggggtttctccatgttggttaggttggtctcaaactcctgacctcaggtgatccttctgcctctgtctcccaaagtgctgggattacaggcgtgagccactgcgactggccgcatgtatgatattttatgatctgtggatctgccaaaggattaagcattatttatactaccttggcacatcattttctgaagtgattgaaaagttcctctcatttcaatctattaggaagctacttttaaagcctggaagagttgactcatgaagagaccacataatttgtctaacatcacagaggaaatacaagatataatgaagtgataatattcagatatttaattacattaagataatactagctcataacttgaactgtgattacatttcttagtttaattgatgtttcagaataactgttttgaggtcaaaaatggttcaaggaagatctgcgacttgtcttgactaagagaaaaaaaatgatgggtaaatatatcttttcctatcactgctattccaaatggttattttcctattttgtttcaaagtttctggcttatgaggaaactgggacatgcattaactttatttttccctctcctaaccccctctttcaaactccaaatctgttttctactccttaaaggccttgttttcaggtagcaaggaaacaagcaactagcctttcacatttttgctgatagtggtttagtgaactaaccctgccaggaactttggcattttaaaagtagacccaaagctttcaaattcaaagacattttaaatttcaattcaaagacattcaaattcaaagacattttaagaggtgtatgacagccagaggggtgtggtcaaggttaggaagttccttccggaacttcatcattgcactcgaacagtttgacagttatatttctccactgccctcgatatgaaggaaaatttattccttaaacatacaggatgaaaaagtaacctctttccattcccttgcccaaattatctcctttagtatagagccagaaagaataacagtgctaagtggcaaactgagatgtcctacaatgtcaccaagaagcagggtaaattcttagaaatcaaccttatattttaagactatacacagtaatcatgcaacctgctgactgtgggagttgagcatatacagacctggtacattcctactcagggtatttccctatttctctacctccctcatatctaccttctccttacctgtggcaaactgcgaaggacttctcaccccacgtttttgctaatctgaactcttctcagaaggtcagataatctgactcaatatgtcatatccacacataatcctcccagatgagtccacaaattaaagtggtttttttttaatagtgacatagttaaaaccaagcaatgaatttattttctaaaatcaatgaagtggaataaaaatgcttcctaaacagatattgaatccaactgaactgaacttacacaatctagtttaaatcctgactggagggtttaaaatctccacttaatggattcaattcctttatatctaaaaaatcgcagtaggaaaaaaaattcatggcactgtcccacaaaagattttcaagttgagaacagcctggccactggaacagttgaaggtatggcaatgactctgagaaagcctacgctgtaggattaaggcagtggaagataacacggctccccactcccggacagggacactcagcccacctacacgcaccagcatgagcctttctttgccttcgcctctgcatccttttagtgaagtccctacttgggctttgtagctccacactgcagtgggcagagtggcttgccagtccagtgtgcagtttggggcccagagaaggtgggagaagtcctctccaacaatcctcagcccccggggcccacgcacacaagcctcttcaccccatcaccccgtgtgctgttaccagtaacttcccatcaccaagacaccgcttgcagaggcctcctctttggcatattcagtccaagtcccttactttcttaagcaggagacacttcacaacaatatgtatcaacaattcacgcgaagaatttaaaatttattatttggatggtgcacagttaattatatgtttttccacttactccctactagcaaataggtgggttattaggagatatctgaacctttcaagccactaaaacactattttttggtgagtgcttgttgaaagagacccatttttaatgacaagcacaagtcactatttagtcttttaagttgtgacactaaactgtcttctgatctgatggatcctaggcctcattataaaacgaacttgctcctggggaatatacgttaagaattcacaaggtgtgccataaagatatgcaaagactagagctttatcaaatcaaagcgcacaatctgtgccttctagatgcatcggatgtataatattaacataagaggggctacacaggactcgcaaagctggaataaaaataattactatgctgatttttgtccaaagtcatcagggaatggaaaatacaattttaaattgaatgataataaaatattcccagaaacagtttataaattgatcaccacatgagaagcatcatcttcaatcttaacaatctcaaagttattgaggtttgaactacagtgaactattaacattggtaaaagagttagctatgacatagatattcatgaaggttcttttcagaatatcagctcaattaaattcagggtcatggtcacatcatttaaagtacatgggtttgctcataaagccttaaaatcatagcaaaagagcaagcaataataactgcaacactttctccgtttcaaagatgacaaaattgagagaaaggataaggtacttgcctaagccataataattgaaacagttgaaaatgtaaacagtcatactctgaatgaaattctcggcattaaaatattgatgtgtacttattgttgaagagaaattttaaaaatatgtaaatctgtttttacaaaataatttaaacatatactattattgatgacagatattatctaaacatctacaaaagttttccccaaaacatggcctattgcatctgaatagattttatcccaagaacctactttaagtgcattaaataaaatttaaaacatgacattttagttaaataacagctttaaaacatatactatattactcccccaatctacctctgtattttgagaaaacgcaaacagtaagtaagaacttccaagaagatttcaaataatcttaaatctaaatttttgatttagaacgctatgaaactaactgaagttgatacgctggggatatctacacttgcaagatggttgttcacaactcttactattcttttgtggagtcaaattagatccgtttcaaaggacctttgtaagcaattaaaatcactgcgctttttgttgctttgggatattaagagagagtaagcaaagtggagatctaccaggaaaaataagcaaattagaaattcagttgtggggggtgcatatgtttacgcttacacactagtgacttcaccaagttttctctattagtgagtttttaaaaatcctctacagctaatatttatttagtggaatcctatgagaccaaaaacttcttccagtacatttgccacacctaatgacatactgtatttccaagtccaagtgacaacgaatccagcagaaagacacccacaattagaatgaccaactctgtcctatgcattgggaatatatagatgctaggaaagaagtgaaagtgtgggccagaatgtgtgaaacattcagaaaatgtcattttaacatattttcctacttcatgaaagcctcttgttattaataacgattttataacctgaaaactaaatgaaatgtattattaatacttgtatatgttccacggttgtgccttttacacagctttcatgcacataattatcttgataattaaggttagtggctaacatccttattgtcagaaaattacagaagaaaaaagtatttgtttatatttatataacactgattaaaaacaattcactacgaccattagtaatccacttctaattcatattcctcatgtcacaccttttctcttgtacacattttaaatgtcataggaatttagaaatattgcaatttaaagcataatctagaatttttttaaaagtagttctgaaacatacaaaaaaatgaacatttaggaaactagtccttcaaagaaaatattatattttatcattaaaaatatcaatcgcaaaaatattttcaaagcacttaagttcaataaagaatatgaggccggtggacattttagttttaattttaaaaagaaattatattctttttaatgtaaagaaatgagaaaacgacatccaaaaagtcttcagcctgggattctacaaaactttatacctcactgatgccatggttttacagcagttattgtttaagaactagaaacaaacttgtaaatatgaaaaaagtttttgattttaaaaaaaaccatcattagtgtttctcttttccttcaagtgagttttaaaagactgagatggccaccagttgattcaaagatctcttaagacataattattagcaagttaactatcaaatatcatataatttaaatcagggagaaaaattatgtgaagtacacaagaagacaaaaatggacagttttgtaatacacttcactttttggctgagacattacctttaaagtttcgtatattaaagtgaatattcaaatacactttatttggaatcaaataaagtgtatttgattccaaagtgaatctgattgaaaatatactacacaaaacttactttaaaacttgaacagaatgttttgatatattactccaaatgctaactggtagcatctatgagtgtcttctgtcaaactcccctaggagtgaaaggtatttctttaagagaaaagccacagtgaatgtccatgccagtccctataccagaaaggttttctaaatcatctagcaccatcagttggttctgttctcagtcagcaatcgatcacttagcaatagacagaaagactgccataaaatacctgaaacctgtcgaagatttgcccaggtccttttaaagagttaagttattcattgttctcttaataaatccagttaacaatttgtctcacgaatgacagaaacagttggggttaaaataatgtacttcaaaatcagaggttttccaggaataggtattatacaactcagtttatcattgtctggttttatatccaaatgataatttacacaaataaactttacattttgtccctaatcttgcaaggaaaagaagaaaaattttagtttcttcatggcagacgactatttttgacttgatttcttttataacaatgacactatttttacaaccgttagcctatgacccaagtgaattggattcttcttataaaacaagagcactgcaaaaaaaaatgatataaggataatacaataattttgcaaatttcggacctatcaccaacacattccaacaaaatgcaatgagagtgagccaactcacctaaggaaagggaattaagcagaatgcagaaatgcaggcttctggtcaccagcagaggttaaggccccttccttacctaccactgaccttatataaaagccgcagctcggttactccccgtttctgactccttaccttaggctcctccctaaacaccgaggcgtaaagtaccacgactacacacccaccttccaccaagggacctgagatttctgttaacctytgctgcctctacccccctcagttaggctcccaggaggagtggtcagcgcctggcacttgcaggagcccacaaagcagcgacttcgcctttccagccccccggggtgcggctgggggtcctggctgcgcgctccatccgcggaggcacggaggcacccagtccccgtccccagcccctccgccgggcgtagggccagcacaacgcgtcagggcacagggcctggccagctacaagcgcgcccctcgctgaacggtcccccggtccccamgcggcggtcgcccctgggctctggacagcgaacgggacctcctcctcagcaggggtgccgcgcggcctcaggacggacgcacgcggatcttcgcttccccgggtccagacaccctgctccaaagttcccccggagcggctcccgacgcttgcgcacctccgccggggacgcggaggtccccgtgtccccggctccgcgcccacccggcgctctcccgaggggggctgtcctggaagccgggacgcaccggctcgcgtccactcgagtcggcaccggccgcggctctctgtgcccgcgccctccgcccctagtgcgcgctccggtagacgcgaccctcagcccgggtgccctcagcccaagaccccttcacccggtcacccgtgagccgcccgcccgcgacccgtcagtccgggtcctgccggaccatgaccctgcctcagccccggacccctcagccgagacccccttctccccagctctcatccgtctgggaccccgtcagttcccgtttcctcggccctagcccccagaccctcggccccagccctccgcgccccctccctgagcactccccgcccagccagcagccggttcccgagcgccgcgggcacccgtactctgacctgcggccacggcggcgtggcgcccctctccggtgtcctcgaggccgacccaagcgccccaggcggcggctgcggctcgggctcgggctccgagtgcgctgggccccgcctgcccgcggcggagccgggtcgggccgagccgggcccggcgcgggggcgggcgcgggcgccggctgggggtgggggtgggggtgggggtgggggcgggggcgggggcgggggcgggggcggcggcgcgcgactgggagggagcggcccgggctcggccgccgcccgcgcacagtagggcccacggcgggagccaccggctttcccgcgtccactgtctgccccgcggcagctacctggtgtcgtttgctcctcgccaccaccgctgggaggcggcccagagagggtcccatttccgaggagggatccgaagtttagggggatgcccccggccagggccggtctggggagaccgaggtgtggggctccctctcggccagagtggcttgcccttcacacggcgatcggccaggccgtcttcccaagatgttctttccagtgacattttaaaagaaaatttaattaaagcatatttcgggtcccttggttttctcttctgatcggtggtgctgcacactttcagagttccttgcgtttgtaagttacatggttattcacaagtcactgacttttaatcattaaaaacatttcttaaactcattaacagaatttcttaaatttcttagcagtgtttctgacaccgagggactcagacaacatgggtggggacggagtggggacgtgaggcacgagaaacagtttctcatgtgttgggtagacagtgaccttttcttttcctgccacgctgtccatcgtgacctgtccaaagtgggttggcaggtgcgcgttcagaaagccgctggtctcctggacttgaggcccctctttccctttttccagtcttatttctggagcatactgttctgggcctgatcctctttggggaggcagcgatgcctgaggccccccacttcaggaagcttatggactgtatgctggggtgctctgcatttcttcctagcttcattgtggttattgcccctctggtacagaaggtcctcgtttgtggttgaagcaaagttttgcgaggatgggtatcacaagggaaaatattcagcgcttaaatcaacataatcatgtccttcctccacagcccctaagataagaagctgagagccacggatcttacagggactgaccactgaaagaccatttattggcctgtgatttaggtagtcaggttgacccggatccacagtctccactcaggcggaagtgctccgtgcgtcctacttcttgttaattccagagttccaatctgctttttttttttctttcttcctttcttttctttctttcttccatgagacagggtgttgctgtgtcgcccaggctggagtgctgtggcgcaatcacggctcacttcagcctcgacttcccgggctcaaggaatcctcccaccccaggctcccaagtagctgggactacaggtgcacaccaccatgcctggctaatttttttttttaattttaattgtttagtagagactgtgtcttgacatgttgcctagactagtctgaaactcctgggctcaagtgatcctcctgcctcagctttccaaagtgctgggattataggcaccagccactgcgcctagcctgctttttaaaatcacagctttattgaggaataattaatataatctaaaatgtaaataccatagaagtaaaatgtacaattcaggccgggtatggcagctcacgcctgtaatcccagcactttgggaggccgaggcaggtggatcacttgaggccgggagttcaagaccagcctggccaacatggtgaaactccatctctactaagaaatacaaaaattagctgggcgtggtggcacgtgcctgtaatctcagctactcggggggctgaggcagtagaatcgcttgaccctgggaggcagaggttacaagccgagattgcgccactgcacttcagccccagagcaagactccatctcaaaaataaataaataaaatgtacagttcaatgagttttagtttattgacagagttgtgccatcatcaccaaatctacccttagaacattttcatcactccaaaaaggaaccccctctccattaacagtcattccaccaactctagatagagatattctttctctatagatttacctattctggacaattcatataaatagaatcatagaatatgaagtcctttgtgactttcttctttcacttagcatagtatttgtgaggctcatccatgttatagcttatattaatatttcattcctttttatggtcaatattccattatacacatataccacattttgtttattcatcccatgaattgatgaatatttaggttgtttctacttttatgggctattatgaataatgctgctgtgagcattcatgtacaaggttacttgtggacatatatttttatttctcttgagtatatacctagggacagaactgcaggatcataaggtaactcggtgtttttgaggaactgccagtctgttttccaaagtgggcacaccattttacaatcccaccagcaatgtgtcagggttccagtttttccacatccttgtcaacacttgttatagtcttttttattttagccaacctaaagggtatgaagtgatatctcatggggttttgtttgtttgtttgttttgagacaaggtattgctctctcacccaggctggagtgcagtggtgcaatcatagttcactgcagcctcgaattcctgggctaaagcaatcctcccacctcagcctcccaagtggctgggacaacaggtgcatgccaccacaccagctaatttttgtattcttttgtagagatgggatctcactatgttgcccgagccggtgtctcatggttttgatttgcattgccttggtgactatcccgttgagcatcttttcatgtgttcattggccatttatcttttttgaagaaagtctgcttaaatcctttccctgtttttaaattggattatttttctttctattgttgagttgtgagagttatttatttatatagtctatatccgagtctcttatcagatacatgatttgccaatatattattccaggctgtaagttgtctttttacattttaaaataattatttatttatttatttatttattatttatttatttatttaaagacgaggtcttgctatgttgcctaggctggtcttgaactttagggctcaagtgatcctcctgcctcagccttctgaatagctggaattacaggcagatgccaccatgcttggttctttttactttcttgatgttgtcatttgagtttttaattttgatgaagtccagtttacctgttttttcttttggtgtcgtgtcagtgactaacccaaagtcatgaaatttgctcctaatgtttattttaagagttttataggtttagttcttacctttaggttttaaattcatgttgagttaaattttgtatatgatgtgagatgggggccaatctgtttttttggtcggaaaattcccataattcaacaacagtgactaaggggaaccccacaacagtgaattcgtaagtggtgcaaaactttagagttgagctgaatattttctaaattccctctggatcaaaaattttgtgatttttttttttaaggagacttatgggtagtgaagtgtataaatgtaagaggttaagtaatgtaaactgaaataatatgtctgtttttcaaattgcaaggcttgatttagtaggttatgaaatcaatttattcagtcataatcagtattttttagtcaagcaaaaaggacagaaataatcagaacatgcctactgtattaaagaaagtgctgcttcgtaacttttgtgtaatgcatgtgtgtgtgtatctgagtgtaccaggagttggtataaaatgtggtttttactgtgggccatatcttttaaagttggaaaaacactgtataaactatagctgtagaattctttctttccacaaacattttattgagtgcttattttgtgccaggccctctgctaagtgcggggaataaaatgataaacagcacatggtccccaccctgcaactttgcacataggcagtgccatccatatggggttcctagagacgaaagactatgcccgtttcaatttttccaaaccacaaggactccttccaaatattggtgtttggtcccatggtcccatggtcccatgggacttcttttttttttttttttttgcaattaatgcttagttgattatctcatttgagatttgcatacatatttgcttttctttcaataaagaggactttgttcccaggtttataattacatactatgtttattatattaagaagagagtgcaagtctagaaatagaagtttaccataactgaattgttttccattttactccagctatatttaaactggtctcactggacagacctcagatattttatagtagtgttatgctacttcttaaaggaaaaatttaaaattgtagcaaaactttttcattatcatccgagtgttcggcaaaactgggcattgagaatagtgacatgtaaaccattttgcagactgagtttaggaaagttagtgtgctgtatttgaagtcaagcaatcaagccactcatttatagcagctgtgtatcatcatagcgctgacatttgctccttctctttatctgagacaccatttatcaatctctaagccttataaattcccaggaggtttagaagatcttaatttaaaatttcaaaaatcataaccagttgaacatgccaggcaggttaaacatacacatatgcacacacacacacttccacaaatgtatctactttttgaatgactctgacatgttcccacttgtgatttttatgtctagttatgaaattttacccacaacctcccaattttactttgaatttcattaaggtccttttctcctcctctgtttattctgcctcctccgatgttgcccttcacaaaataacttgctcatctcttacaaggtcttaaggaccaaagccagatttacagccttttcttctaacttaaaattgcttgatcttctcatatactgtatccctctgcttcactcagcattctatttctattttgaatggttgcctataaataaataaaaatttctgggacattttaatggaaatattaatcttgattatattcaagtcaagaatataatatagctatgtattggttcgaaaaacccactgagaggccaggcgcagtggctcacgcctataatcccagcactaggccaaggtggccggatcacttgaggtcaggagtttgtgaacagtctggccaacatggtgaaaccccatctctctactaaaaatacaaaaattagctgggtgtggtggtgtgtgcctgtaatcccagctatttgggaggctgaagcaggagaatcacttgaacctgggaagttgctgtgagccaagatcgcaccactgcactccagcctgggggacagaggtgcgatagcaccaaaaaaaaaaaaaaaaaaaaaaaa

SEQ ID NO: 8855 - DNA, 29963 bp, Homo sapiens
aaattggcccttgcaggcctcccttcacccagaatgcctgtgatcactgtgcctgggcacatgggcttcacttggcaacacctgtgctggcctgtaggaccaacctaccattttgtatcattctcctcccaccccaaagttgagtgccaaagatctgctcctggacccaggcacacctgcccccactggcacacctgggcacatctgcccccacctaccattgcccatcgtcaacacctgcacattctcaaattccagggtggtgtaggctgggtccagtgcagcactgtagtcggccatgtccatgtcgacgagggttttggagagtcgcattctccctgcctccacgccgcggccacctgccctaccctgggcgcccaccccgaaggcccccgccctccgccctcccactgcctcctcccagtgccctctctgccttcctttcaaaccgtcctctgggaagatctgctgggagtcttggcctagcctctgtgaaggggtggaggctctgccggggaggggtgggggttaatggttaatcggtcccccgccggtggataggctgggcggggctgcagggatttggctgtttgttggtttctggctgacacccggggtgctaattacaactgctggggccctaactcaccgatgttcagttatcaattgtacaaggcaggcatcatgactcacgggcactcatttgacccttgactcacccacccctccaagccattgtcaccccaagtcaggcattctaactgatactatcaggcactgacagcctacctccgagatcccctaattcaataacttcccaaatcattgacttctaccctcaatgcttttgcagagataaggctgccccatggcccacgatttagaaacctaaatcccaggccccagatgccaatcttctggatccttgttctgggagctcccttccagttcccccgcagtttcccggttcccctgggagcagaatggactggaagtttgggagggccagattcacctccaattccccgctcctgctccctgtgatcccaccctgcccctctccgtctcccacagctcccagtgtttctggcccaggctggctccatctcggattttcccatcacattctcctgtttccctcacccccaccccctcccggagcaggcagagacctggatttacattcaggcacctaccgtctactaactgggaccttgggtaaatgattctcctctccgagcctcagtttccttttctgtaaaatgtacaatcaacttcaaagggtggtttgagaaggaaatgagatggcataaatcaagcaccaagtggggcctggtagacgtccatcctcttccccctcctccctctccctgtttcgtatcccccttgccatccccctgtttctctccacccgtctcctaccttcagagtgggctttgtgggggtatcgccagtgcagtcacaggcaacccaacccttagaaagtcctggttcctggttcagtgctctgctgtggttgtcctaaaattcatcatgacttttgaacaagggattgtgcatttttgttttggacggggccctgaaaattacacagctggtcctggctgtctgaagctcatggtgcactctgttcttctcactccctccagccctcattgccttctgtgcagacattttcaagggctgccaatcaatctggggaagtaaagtcttgatgtagaaggcagagagtgagggcagaggaagaaaagcctgagacttgggaggcctgggagcctgtcctccactgctggctggaagggcaggttggagggcctcggtgacacctgtgagcaagagtgggcgaattagtgggagcaccaattaatgagtgagtgtgtgggggaattgatgagtgggtgaattaggagtgagtgaattagagacagggagaattaatgagtgagttgagtgaatgcatgaatgagtgagtgaatgaacgaatgagggtaaattactgagtaagtgagcaaatgggtgggtgaattaatgagtgaatgggtgggtgaattaatgagtgagtgaatgagtgaatgtgtgggtggattaatgagtgagcaaatcgggagtcagggcatgtgtgttcgagtggtatgaggaggcatcttcatgttctttccactgctagaagccctttctctgccctgcttagctttattctgtccacttgatctgacctctgaagctgagatgactggggagtgctattgcctgtagggaaaggggagagggagcaactgttgtggaggacaagagaggctagatttgacgtcaggagacctggggttaggaactagctcagtcactattccgataactttatttacatcgtctcttctcagggcttcaatttctccctctgtaaaatagaaagatgatcctggctcagttttctgttagccaggacaagactctgagggagggagcaagaggcagccccctgcaacccacactatgagacttgataaggggctgaaagagaccaaataccggcgggttcctcccatgcctacctcaggagtatctgacctggctccaccggccttgggggcagtgcagaggtgggaagaaacagaagatccgaccaaggggtaaacacagaagagatgtggagggcagctccgggaggagcctccaagggctgagcccaggcctctgccacctgcctggcacctatggcaggccacaggcacagctactccccacacaatccaggaatacatggcctcttccactctgaggcacagttccacattgcttaacggggaatgtgatcaatgtcatgtcagaatttcactggcaacaaaaataacaatgcatttttccatagatgacatcttagattcaattaaataaggtctacgatcaaccaagatcaaccacaccatgccacagccatgacccgttatatccaagagctactaggtggacactgcaaatgaagagctattagatacatgaatcatgacatacctgacttaccaaatgcacaatctgcatgactgcctaggaggcacattctagattcacatcccaccacattataacctaccccataagtaaatctatccactcatcactgtaaattgcataatctattacatacatgattcattccacccttagccaacgccaaacagtatctcctagatacacattcctcatataaatgacgcaccacctataagatctgctggctctgtgacctcaggcaagctattatttcttttgttcttgttgttcattgttactacatagtttatttaaaccaagctatgataatacagctgcccagaatctttgtggattacagatgcaaagtaactggagacgtgtccttgcacctatagttcagtaatagacagaaagtttgttacatttactaagtacagagaactgaatacacatgacattgtacatccatctttttgctttgtatttccattttaaacatatgtatgttacaactttacattttaaatatgactccatgtattttgtgacaatggctaagaacgcaatgatcccatgcccctgaaataagcacactttggtctgcaatgcagaatgttttcattggggtaccaaacaaacccttaacacataacagacaaaaactccttaaaaatcagatttaatacaatgttcttcatgttagataaggagaaagaacgggaagtggaaaaggaaaacattggggtactttaaatgtacagtgtcttgagaccttgaaagtttcaggccaggcacaggggctcacacctgtaatcctagcatcttgggaggccgaggcaggcagatcacctgaggtcaggagttcaagaccagcctggccaacatggagaaaccctgtctctactaaaaatacaaaaatcaaaaattagctaggcatggtggcatgcccctgcagtccaggctacttgggaggctgaggcaggagaatcacttgaacctgggaggtggaagctgcagtgagccgagattgttccactgcacctgggtgacagagcaagactctgtctaaaaaaaaaaaaagaatgttttcttcaggggatgaagagacgttggttcatgggtacaaaaataagtgagatagaaggaataagatctagttcttatagcacagtagagcgattatagttaacaatcatttactttatatttcaaaatagccagaagagaagatctgaaatgtacccaacacaaagaaatgataaatgtttgaggtgatggatatcctaaatactttgcatggtatgcatgtatcaaaatacatgtgctccatatatatgtacaattattatgtatcaattataaaaagtttcattcccttcctccaagggattttttttttaactagtggaaaaaagaaagcaacttcataacgccctccagtgaggaagaacattatcctgacaatgcttaggtgctttcatatgagcacataataaatacaggaagtcacagagcaaatgtcacagtattggtttggtttttatttctatgcttataaaaaatattaagcttctttctgtggactgagtgggtgttagcctgtgggtattggtctctggtgcctgtataccagtgactatttatattccaagcccagggccagctgtctgcacaaggcaagtttttatttcgaagccttggttactccttctgtacaaggggtctaacttgtcgtttgtcgtgaagattaaatgagagagtagataagcttcttagcctctcttcccctgacctctctttaggggaataaaccacagaccttgtgggtcagatagatctaggttaaaatccaggcagtgccaatgtaccaaactctgtgacctcaacttctacttttctcagccttagtttaagcatcagaaaaattgggttgataccttctttgtagggatggttcaagcattaaatgaccacgtgtaggcatacagtacaatagtagcaatcactgtcattggtcattgattgcatgacacactggccacataatcagttggaatcaggacccctgctcaggacagctccaggtaccacacacccagccatgaacaagcactagcctcaatgccatcaatttagcagctgttctttacctctgctcacttgctgtcgggccccagctcaagaggcagcagattccaggggatagcagaggacctcagagcccacagagagacccagttgagacgggaagggattgccctgggcaacctgcagttggggaggcatgtgtagggagcttgtgcctctgctgtggacggtggtaagggagctgccactacgaaccacattgtttctcttttacattataataaggtctaatgtttacagagaaattttgtgctagccctggtgctaaaaaccttctagccttctcatattatctgcctgttgagataggggctattgtcatccccattttaaagatgatgaaattgaggctcagagaggtgaagtgacttgcccaaagccacacagctcgtaagggaggggctgttgtttgaacccgagtctgcctccagagcttgagggcttcacccctctacgcattgcctgcatcatgactcctggaatccctgaaaggacttcggaattctaaggcactggagctggtggtttcactgcctcagtcttgcaggggaactcaaggacctgagaagtaaagcaccttatcccggggtataggcaggggcaggggcatcctccacacgcctggccaccccagggctgcttggcatcttcacttccccttggcgctcaccacaccattatctcctatcttttcttccccacccaccactccgggagaggtgcagagaaaactgggacttatcaagacaaagaacaaaagtcgtggaggaaagaagccaagagccatctctactctggggtagggcccttcagttttgcccctttgaaatttcaaattccagtttgtggacaaagtcctaactatctcacaatataggtccccaaccactgaccaaactccagtccaggcagccaccagctggcctggtcttgctgcttcctttagcggcttccaaggtccagggacagggggtctgggccaccaagaggctctgctaggctgtccctgcagccacagccaccccactggacccctgcctcccatctgagaggacagccctcttcctggagctgggatctgacacttgctgataccaacggcagataccaggtaggtcccctccctttctcttccttgagctcctaaaatgccamtcataccaccctctgcactcggcaaaggccactgtggcttratcaaatcaggcacccacaaagcttcaagactggaaaagatgccttggctaacccacccatttagtggacggaaacactgagsccgtcaggggagtggcagctggccacagactgaaccatagacttggggcccagacctggggcccctcacggagcctcagagggygaaagggacttgctcaagtccacgcagcggtggtgggtgagctttgtcttaacaacgagcactttctacttcatcacagaccatgagtggcattgtgtttgttcacccgatgatgggtggccactggcttgttcacccgatgatgggtggccactggcttgtcacaggagtatttccgagaggaagatgagggagcttggggctgaaggccagtgggtttggaaggaagcaacattcatgtggttaactgataactgggccccatccctgggcctccttcctccctccctgtccttagcctgattaagaccaacttacccagctgctaatcattgctgagcctgttgattttgccttaaaaaattaactgggcatgagtttgcggttttcctcacccctaaccctgaaaaggcctgggtgggcaggaggcctccagggttatgcaagaggccgctggcctcccaacgcatagcccacggccacctcggctgctctccaaagaagaggctttgctcaagagtcaacagtctgcttgttccccctgtgctgggtcctgagcaaatttgctctgttaccaaagagagataaaggcagctgggggagagctttccaaacagggatgggaagcggcagctttgagcttggggttctagaactctgcagtgtcagagccaggagaatctttaggaggatgtgggctggggtttttcaagctgggttccgaggctcccaggagccaagggtatgcatccacaggcccagcttcaaccagcgactcccttttacatgtagtcttaatattttatttgagggttggaaaaccactgattcagccccatcccctcattgcacagatggggagatggagatcagagggggaagtgacttgtccaaggacagaaggtcacctcgggtattcaggggctccagccagcatgggaatgaatggtgggctctctgtggacccrggcaatgtcttgaaagacattggtgaacaagacggctctgcaaacgccttgccatgccgttctccccctcctcccmgggctggctggaagcagagaggtgcctgagagccattggaagacccaagtcaggggaatgcacctggctctgtgtcccatgggccctgtgaggatatgaccagcagccaggcactgcaaaccggagactacgttataatccatctcagccacgtcctgtctctggaggcatcagcactttgggaggctgagatgggaggattacttgagcccaagagtttgagaccagcctgggcaacatagtgagaccctgtgtctattttttaaaaagattttttaaaattaaagacagatgcccagtccctatcacaaaaaaagatgtagagccctgccctgactctctccacctctctgagcctcagtttcttcacctgtaaattgggaattataatacttaacttccagggttgtcatgaaaatgaaatgaagcaaaatatacacattgatcatcatggccactggatatgcagctgttttaggagctttgcatgtgttacttccttgatcctcccagccactctgggaggtaggcaatgttttcaccaattttttacacaccagaggcacagggaggttgagccatatacccatgctcacacagctgatgagaaacaagaagtggaattggaacttgggcagtctgtctctagagtctgtgcctctaactccagggctacccttcccttccagggatgccagtgagagatggccaggagaagggcagagagcagggcactgtgggagatgctgactgtaaggctccggaggtagggcagagagtatggtctggagaatgatcaggaaggaagccaggaggacttggatctgtgtgggtggagcttctccgcaggctgcctcctgccaggtggcttatgacatctgggctgagggtgttgctgtcctcctgtttatgttcatccctcctgtttatgttcctgaatttatctgcaggggtgaccttgggaattagatgcggccttcccggcccttgtggggcctgaaggctgatgggagcccctgcctgacccagactctggtttggggagtgagggctgagcccacatcccagaagccacccttggtctccccatactcttgttctgaggggccccagggatttgccaggtcactaaggtgaagtgtttggaagtcctgaggctcagatcagagttactgccctgtacagttgtgcaggttgctcactgcacaaaggttctccagccaagagggcaggtagggatggaaacccagcccttgttccacttgccaagcgaagtgcccatggagctctgcctgcccagagtggggtgcctttttcttatttgccctagggcttcatgtragctgctgggtgtcctgccccagctctggttccagccactgtgtgtccttgggcaaggtcatttccctccctggccttggtttcccattggagaagttttgtctaacaaagcagagactcatctctgaagatgaaatagaatcatctgaaacctttaaaatatacagatgttggccgaacatggtggcttacacctataatcctagcactttgggaggctgagatgggaggtytacttgaayccaggagtttgagaccagcctgggcaacatagtgagaccctatgtctattttttaaaaagattttttaaaattaaagacagatgcccagtccctatcacagatcaatgatcgaatcttggggtaggggtggggaggtgccaggcgtctatatttttgtgcagccaatattgagacccactgtaggggggcttcaaatttgaacctggaaagccttcgatggcatcaagttctatcacttactacaacttactagtcaaaacctcagcgaggctcagttttcccatctgtaaagagggaatgatgatcgtttcctcacaaaatcaaaatgccaattaaatgagataatgttcagacagtgcttggcaccatgttccccaagtagggagctcctgattcttgctaccaagactattattgttgttatgggcaatttgacgttgacaaaataaagggcctttctaggtcaaggattcggtgacttgaagacaggcctcctctgttgctttgagtcaatttctagtacctgggcctaaatcttgactgcacaccggtcatattattgaggtatgtgttattattattatttaatattttacttaatttgtgaacatctttacatttagttttgaattggtgctacattcrcatggttcagaatcaaaacataaaaggtgtaaattgagaagtcttgcttccagctgtctcctgttcacctgttctccttgacttcctcactatggggaaccacatcccttacagatgtatctgccaaggtttctttatacagaccagatagcatgtaagatcatacatgagtagcctctgctcttacactgttctgtatcttgtttggttcatttaatatcacaacctggagatgcttccatagcagctgagagcaagctttgaggatggaagggttctcgtctcccatcacaggtgaggaaactgaggctcagagaagaaacatcattttcccagtgagccaaggcaatggtgttagaactatctctacctggctccagagcttgtgtttatgcccctgcaccgatacggccttccrtgaagcccggcccagaaagctttggagtctggttacatctctgccaygcaggcctggccttcccaggacaagaggtgaggaggggggctgtcggggtcctcactgtgtctggactcagaaatcccaaagagaggatgaagtgtagaacaaagaatgtcccaagtcatccagatagggacccagtgggaaggtgtcccctggatggaatagtgggggcctggtggctgtgcccgtcagcactggagaacctgccaggaactctctgccagcctcaggtggtgcgggtggcaggggaagtcaggaggaggatgagaggcagggagggaagcatggccgatgagacaagctctgggtgaggggatggaggggaccccatgcctggagctcaggaaggaggatttggagttcaaggcagaagtggcaatgagattttaaccgatygttttctgctcagggaacttcagggttccctctggattcttgacctgcttcagtttgctgactcactggctttgggcaagtcattttccctctccgtgcctcagtttccccaactgcaaaatgagagagataagagatctggtctttaggcagccttggactacccctaatactctacggggctcctctcaccttgttgaggtcgtctggattctccttctctgattggaacgtcattcacccatcagggccatggacgttcctgggttaggggatgagggtacaaatcctccacactgctcccagtctggaatcctcccccttggttctgtgtctctctcctaccatcccatccttccttccaggcagatgtggagtcaggaccatacctggtgggtcctgggggragccctggccccagtccgacatcctcctcctgctgctatggggtcccgcacagtgcacaacctcttcatccttgagggagctcctgctggcccctctcagcaccccagaccctgcgagggccgctgggcagagttaatcccttaatactggtcacaatgagatttcagggatggtgggaggcggtctccatggaaactgcagacctgtccaggatccatgcaaggaattagccccagggctctgcaaggggctcctagagagccaaccccaataggaatgggagacacagtggtctggactcctgggtcctgctctggccctcctgttgtctctctggagggcttggaaaaaaccataactcttgcattgcttcagtattctgctcaactggacagagccatattcacagggagagccctatcacctttctgagcgtgtttctccatccccctattggcattgtaatccttaacccagtggcttttctagaagagtgcaggcttcagagtctgccagacctgagcttgaagctcagcttttccctccacgactgtaaacttagccgaggcatttcacttctctgagcctcagcttcctcatctgtatgatgggcacaataatagcaacatggcatccctcttgtgctggctggtgggtagtaacatccagtgaatgtgagtctccttctcaccttttcctgactgccacgcccacactgcacatttgccctccccagccccctgcagcttccagaaccccgtggtctcaagcagagagctgtcgcacttccttctttgccttctcatcctccaagtcccatcttagtcatcttcctccgggaaacagaacgccggggtcctcctctgtccccccatagcccccaaagctttacatcatcatcgtttagtcagatggtaattagactggttgtgtgcctcctccactggactgtgtcccatctaccattgtattcccaggacccacttgatataaataggctggatgaataactgagtgaataaaggatggaaatcgtccatygaaacagtcaacatttattcagcaccttctgcgtgcatcgttgtgggtggtggagatgcagcagggaagaccatgggcaaaatatccccctcagaggggtgcagatgagcaaataaaaatacaggatgcccagtcaaatgtgaatttaagatacacaagaaatacttcgttagtatgagcgtgtcccaaataatgcatgggacctgcttatacttttaaactgtggtgttcatctgacactcatatgaaactgggtgtcctgtgttgtgtcgggcaaccctacaccctccctcacagagcttgcgttttggtggagaggcgggttgcagacataagcaagtaaatacatgaaaaacgaagtcaattacaaacagtggttaagtgcagtgaagacgcacagcgcgatgtgatagcacctggggatgggcaggacgatcccctgagctagtggcctttgcctgcacaggtcattttagctccaatgagatgccactttgcaaaagttctttgaggatcttaaagggcacggtggaggctgctaaacttgagagaaggactctgaggagggcaaggggcgcacctgagggagtggggctgctaagtctcacttgatagackccacagttttgcaacttggatctgggccttcacaaaccttcgcgaacccgcagccccacccctcgggtcagccaatgtcttctgtggggctgggagccaggggaagaggccaaaggaactgtgcagagaagcgtggccacccgggccgcagctgggagccctgacaccctttgccgccccacctcatcccgcggttgccccagggcgcagggcagggcaggcaccgcgctgggccggagggcgtcccggaggaggcggccaagactctccgcagtgctgcgctttgcgcttcctgggctcctcctcgtggccaacgcaggaactggtgttcagaaacttagatagccttagggacttcaccaatcacagcaatcccgccaatcacaggcccagacgcactatgtctctccaaatccagaggaggcctgctcggttcgatcaccaatcacagctcgttggatttagttacctaaaagaacatctccccatcacacaccagcacatggccacggcagcaatcagaacgtaagattttaaaaccagttcccagggtagcagccgctgcccttccaccacctactaaacttctgttcccagcaccttgttccaatgtacgggggtggggggggtctttgaggaaggttccaggctttgtgctgcttccatgtggaagcagatgttagcatgtatggggcatgtataatgatattactatcagtaaatgtcatacccattatgaaaattaagataggcagggcgtgatggtgcatgcctgtaactccagctttaggtggccaaggtgggaggatcgctggatcccaggagttggaggctgcagtgagccacgatggcgccactgcactccagcctgggtgatagagtgagactcttgtctcaatttaaaaaaaaaaattaatgtgtggatataggagtgtggaaaaattataacctttgggttagacacacctggagcccatatactatctttgtgaagtaggacgactcacctccccttcctcagtcgtcaaaagagaatgatagtcatatctacatgtcatatatcatcacccaccttctctcaattattcaagccaacatcttgcaagtcacaatctttgtgttgtgtttctcatgccttccagttcatcagaaaatccagttcttgccaccctccaaacagaatctagattttccatctttccatctccaccccagccaaccttatgcatcatctctggaggtctgcaaaagtcttttcacttcttccctttttttttttttaaacctgccagggttggggaggggatctcccccgctccaccgccccccccgcctccccccccccccgcctgcctccaccccaccccttcactttttctcctgtggcttccctaccccctactcttcactcaggggccaagggtgatcttgtacaaatgtacattggctcagatcctcttctacttaaatttttatgacttcctatgcatttataacaaaactcatacaactcccacttaacactgtgaggccatgcacgcccttgtttttatatccctccgtgtccaacctcatttcattccacttgcccccacccctatcagcagcaggcatactagccattttaaagtttttctttcctgtcttgggggcctttgcatatactttcccctctgcctggaatacttctttttttttttttttttttttttttaagatgaagtttcgctcttgtcactcaggctggagagcaatggcacgatctcggcttgctgcaacctccgcctcccaggttcaagcaattctcctgcctcagcctcctgagtagctgggatccacacccagctaattttttaatttttagtagagacggggtttcgccatgttggccaggctgatctcaaactcctgacctcaggtgatccacccacctcggcctcccagagtgctgggattacaggcatgagccaccacacctggcctggaatacattttagtaagtgtttaatggatagttgttggatgaatgactgaaaaggtctttcaagaggaactgatagtgatgtaaacttcaagtgctcggtgcgtaacaggtattcaatgaaaaggattctatgcatatagtagaaattttggaaaataaaataaaaattgaagatttaaaaatcgtatgtgctccaacatttagaaaggttcaaactcttaatggctaaccagggtttcttgacctaagcactaatgacatttgggctagagaattctttgtcgtggggactgtcctgtacattgtccctggcagcatgtctggcctctagccactagatgtcagcagcacttttccctaccctcaaggtgtgataaccaaaactatctccagacatttataaatgtcccttgggggttgaaattatctccactgagaaccactgtgctgggcttctacccttacaagaaattttctctcagtcattcaatgcttctcaaatcttggtgtccataagaatcatctggggccattattaaaaattcagatggcagctgggcgaggtggcttacacctgtaatcccagcacttcgggaggctgaggcaggtggaccacttgagttcaggagttcgagaccagcctgccaaacatggtgagacctcgtctctactaaaaatacaaaattagccgagcgtggtagcacatgcctgtaatcccagctacttgggaggctgagacaggaaaatcacttaaacccatgaggcagaggttgtggtgagccgggatcgtgccattgcactccagcctggttaacaagagcaaaactctgtctcaaaaaaaaaaaaaaaaaaaaaaaatcagatggtggctgggcacggtggctcacgcctgtaatcccagcactttgggaggtgggtggatcacctgagttcaggagttcaagaccagcctggccaacatggtgaaaccctgtctctattaaaaaaaaaattagccaggcgtgatggtgcatgcctgtaatcccagctactcgggaggctgaagcaggagaatcgcttgaacctgggaggtggaggttccagtgagtgaagatcgtgccactgcactccagcctgggcgccagagcgagaccctgccttaaaaaaaacaacaaaaaaaatcagatgcctggggtcctacctccaggtgccaggaccaacagtgggcctagtcatcagattaaaaaaaagaaaatatttaataaatagaggtggggcatggtggctcatgcctgtaatcccaacactttgggaggccaaggcaggtggatcactggagactaagaattcaagaccagcctggccaacatggtgaaaccttgtctctactaaaagtacaaaaactagctgggtgtggtggtgcatgcctgtaatttcagctacttgggaggctggggcaggagaattgcttgaacctgggaggcggaggttgcagtgagaagagatcaggccactacactccagcctgggcgacagagtgagagtccataaattaataaacaaacaaattaattaattaaaaaatagagacggggggaggtgtcttgctatgttgtccaggcttgtcttgaaccccagcctcaagcaaatcagcctcccaaagtgctgggattaaaggcaggagccatggagcacctggcccaagtgtttaaygagcttctgggcacttctgataccaggtgccctcagaccgcactttgaaaactcctcaaggaggcctctcaatcacctgatcaccaaaccctgtgtgaggctccctacccacctggaccctctccttgaattcctctcctttccaattattacccttccctagatagcaagtggtgacagaaccaaaccctagctcagccaaagcccaaattgcctcatctcccttcagggaataggcaaaaaaaaaaaaaaaaaaaaaaaaaaagatcacagagttcagctgaaaccacttaggaaatatcagcatccccacctccccacccaaaaggactcctgagtggcagcctgagaggtgtgtctgctcatcagaataatgttgtcagactgtgttctttctgggggatcatcacactcccttttctgggaacaaatgttggccacttggtgggatgggccatcatgatctacgtcagacaaattcagtgagtcatgactcagcctatctctctagacccatcttttatgcccccttacttatagtctctctgagggctgttctcaactattctatttctctcctttccggcacatgatggggattacattttcttgcttcctttgaaatgagatgtgaccatgttacttgtttcaggtaacgagatgtgagcagaaacaacctgtgtcacacctgggcagaagctttaaaggccagtgctgcccttgttggggaagcaagtatagatatgaatcgttccacaacgcggagcgccccctgccgacccatgctgggcgtgtactataggtgagcaattaactttgctgttcaaaccattgagacttaggggtttttttgtggttgcaagctaacttcacttcacttgactgaacacagtctttccaaagtttcactaattttttaatgaccattatgattttttcatatctgtaacatttttcttacatcaactcacttctttttacttcaatttattttagaaagaaatattattactaccaaatgaaacagtatcataagtagaaagcaatgagaaaataaacagaatgaaagaaatcctgatatcaaatcctgacttaatactatttgcctttcaaagcctctggacctttggtctttatttaaaaaaaaaaaaaaaaaaaaaaaaaggagccaggggccaggcgtgatggctcacacctgtaatcccaggaatttgggaggccgaggtgggaagatcacctgaggtcaggagttcgagaccagcctgaccaatatgaggaaaccccatctctactaaaaatacaaaaattagccgggtgtggtggcatgtgcctgtaatcccagctactcaggaggctgagacaggagaattgcttgaacctgggaggcggaggttgcagtgagccgagatcgctccattgcactccagcctgggcaacaagagtgaaactccgtcttaaaaaaaaaatgggagccaggtgcggtggctcatgcctgtaatcccagcagtttggggggctgaggtgggcagatcacttgaggtcaggagttcaagaccaccctagccaacatggtgatatcctgtctctacttaaaatgcaaaaattagctgggcatgatggcatgtgcctgtaatatcccagccwcttgggaggctgaggcaggagaatcacttgaacccaggaggcggaggttgcagtgagctgagattgtaccactgcactccagcctgggggagagagttgagactccgtatttaaaaaaaaaaaaaaaaaagaggtccccaagagtacttctcaatcttttggatccccaaagctgtctaagattgtcagaatatttgaaggcagcacagtattgaggctgagtgtaccaattctggaacttgacatcctgggcttaaattctggttcagtcatggactagctgtgtgaccctggacaagttactgaactgctctgtgactgttttcttatttgcaaaatagtgaccataatgatgtgtatggcattaggtcgtggtggggattatttgtgttaatgtataaaaagggcttagaagtgtgcctggcacttagtgagtgctatggaggcattacctataaaatgatggcaggatccagatccaaatagatttggtgaattattgtttgttttttttgagacagggtctctgtcactcaggctggagtgcagtggcgccatcacagctcactgcagcctccaagtctccaggctcagatgatcctcctacctcagcctccagagtagctgggactacatgtgtggaccaccacccctggctaatttttctatattttgtagatatgggatttcaccatgttgcccaggctggtctggaactcttgggttcaagcaatctgccccttcttagtcttcaaagtgttgggattacagacgtgagtcaccccacccagcctggagaaatgtttgaactccatggagataagtaaaaaatcctctgcattggttaaaaataaatcacctggatgatttatttatttagtgtagatgggaaaagctaccttagcagaaagtgacatagcaaaattctagaggttttacttggtggcagctgcccaaacctctaacccagtcgtatgtatcattagagagaatgtagttcccaggtcagaggagctaagaggtccttggcattctactcctaaggagcatatatggacaattgtgtttagttttcattttaatatgaatacttaaaattttcctaggatggcagaggatgagaaagctatgccccttaggccgagtgcagcggcatggctcatgcctgtaatcctggcgctttgggaggccaaggcgggcggatcacgaggtcaagagatcgagatcatgttggccaacatggtgaaactccatctctactaaaaatacaaaaattagccttgcgtagtggtacgcacctgtagtcccagctacttgggaggctgaggcaggagaattgcttgaacctgggaggcggagggtgcagtgagccgagatctcgccaccgcactctakcccggcagcagagcgagagttcgtctcaaaaaaaaaaaaagaaagaaagaaagaaagaaagctatgccccttgaagaataatcaaagatccaaaagagttctgggctgggtattggagaagaggagagaaaggtggtgtagcagagtggtcagggccattgcctttgaaatatcagtggtgccatttacatagctgttggaccttgctaaaatcataagctcttcaagccttatttgcttcatctataaaataggaatcaatgataggaccttttcatagattgctttgtggagtaaatgtgttaaaccttataaacctggcaggtagctgcccagcatatagttgcgttatttactcaattcaaagtactttcctgccgggtgcggtggctcaggcctgtaatcccagcactttgggaggctgaggtgggtggatcacttgaggtcaggagttccagaccagcctgaccaacatggtgaaaccctgtctctactaaaaacacaaaaattagccgggcgtggtggcagtcacctgtaatcccagctacttgggaggctgaggcacaagaatcacttgaacctgggaggcagaggttgcaatgagctgagatcgtgccgctgcacgccatcctgggtgatagattgagactcagtctcaaaaaaaaggcaacaaagtactttcctttggaaaagagtgcccactggctgggtgaagtggctcacgcctgtaatctcagcacttgtggggctgaggcaggcagatcagttgaagccaggagtttgagaccagtttcaygtggccaacatggtgaaaccccgtctactaaaaatacaaaaataagccagatgtggtgtcatgtgcctgtagtcccagctactcaggagagtgagacaggagaatcatttgaaccctggagttggaggttgcagtgagcagagatcgtgccactgcactccagcctgggtgacagagtaaaactctgtctcaaaaaaaaaaaaaaaaaagctctcactgattcctacagcttcagagaatgaacgaggaccaaaatgtggatgctacagggaggaaacttgaggctcaaaatggagatctttctataaaatacaattgttctaccacaggaaaagctgctttattaagtagtgagtattccgtcattggaagtattaagcccaagctaaatggtcaactgtcagggaaggatggtgagaggattccagtgggttagagghcaaagagcgtctaccaggtgcaaaagtcttaattaacaaagtactatcaaaaccaaattcatgtttgggaaactgtatatccacatgcaaaagaatgaaatcagactctttccttacaccatatacgaaaattaactaaaaatgagtttgacggaaaagtataaaacctttggaataaaacataagggaaaagcttcatgatattagatttggtgatgatttcttggatatgacaccaaaagcacaggaaatttttaaaaattagataaattggactacatcaaaattagaaaaatttgtgcaccaaaggacacttgactgagtgaaaaagcaacttacagaatgggagaaaatatttgccaatcatatatctgataaggggttaatgtccgaaatatataaagaactcttacaactcaataacaacaaccaaaaactttaaaaatggacaaagaggccaggtgtagtggctcaagtctgtaatctcaccactttgtgaggcagaggcaggaggattgcttgagctcagragtttaagaccagcctgggcaacatagtgaaactttgtctctacagaaaaatttaaaaattagccaggcatgctgcacacctgtagtcccagcttacttgggaggccgaggtgggaggaccacttgagtcaaggagtttgaggctgtggtgagccacgatcctgctgctgcactctagcctgggtgacagagcaagacctgtctcaagaaaacaaaaaaattggcaaaggacttgaataggcatttctccaaggaagatatacaaataaccattaagcacataaaaagatacttaacatcactaatcattagggaagtgcaaatcaaaactgcaataagaggctgggcacagtggctcatgcctgtaatcccagcactttgggaggccagggcaagtggatcacttgaggtcaggagtttgagaccagcctggccaacatggcaaaatcccaaatctactaaacaatataaaaattatctgggtgtgggccaggcacagtggctcacgcctgtaatcccagcactttgggaggccaaggcgggcggatcacgaggtcaggagttcaagaccagcctggccagcatggtgaaaccccatctctactaaaaatacaaaaattagccgggcatggtggcatgcatctgtaatcccagctactcaggaggctgaggtaggagaatcgcttgaacctgggaggcagaggttgcagtgagccaagatcgcgccactgcaccccagtctgtgccacacagtgagactctgtctcaaaaaaaaaaaaaaaaaaaaggaaaagaaaaattatccgggtgtgatggcacatgcctgtaatctcagctacctgggaggctgaagcaggagaatcgcttgaaccctggaggagaagtttgcagtgagctgagactgcactactgcactccagcctgggcgacagagcaagactatgtctccaaaaaaaaccaagacaaacaaacaaacaaaacacacaataagagaccacctcacacccattaggatggatattataaaacaacaacaaaacagacaatagtaagtgttggtgaagatgtggagaaattgtaacccttttacgttcctatcactgctggtgggaacgtaaaatagtgcagcttctgtggcaagcagtatggcggcttcctaaaaaatgaaaaatagaactatcatatgatctagcaattgtactcccgagtatatacccaaaagaaccaaaagtagcatctggaagagagatttgtatactcaagttcatagcagcattattcataatagccaaaaggtacaggcaacccaagtgtcaatcaatggatgaatggatcaataaaatgtggtatatgcatacaatggaatattattcagccttaaaaaggatggaaattctgacacatgctacaacatggatggatcctgagggcattatgctaggggaaaagctagtcacaaagaacaaatactgtatgattccactagcctacaggaaagtagtcaaattcacagagacagaaagtagaaggggtttgccagggcctgggaagaaaggagaactattttcttttcttttcttttcttttttttttttttttgagacggggtctctctctgtggcccaggctggagtgcagtggtgcgatctcggctcactgcaacctccacttcccgggttcaagcgagtctcctgcctcagcctcctgagtacctgggattacaggcacgcaccaccacgcccggctaatttttttgtatttttagtatttattttgtatttttagtagagacgaggtttctccatgttagcctcccaaggggagctattttctaatgggtacagtttcagtgtgggaagatgaaaaaagttcaggtgatggatggtgctgatggttgtattacaatgtgaatatatttaatgtctctgaactgtacgtttaaaaatggtcggctgggcgtggtggctcacacctgtaatcccagcactttgggaggctgaggtggatggatcacctttggtcaggtgttcaagaccagcctgggcaacatagtgaaaccctgtctctactaaaaatacaaaaatcagctgggtgcggcggtgcatgcctgtaaccccagctactcgggaggctgaggcagaaaaatcacttgaacctgggaggtggaggttgtagtgagccgagatcacgccactgcactccagccgggcgacagagtaagactctgtttcaaaaaaaaaaaaaaatacatgcataaaagatgtttctaagagtgctaaaaaatgcctacaaattgataaggaaaggtaaataatacaatagataaatggtcaaaggatacaaacaagcacactcataatgtaggaagctcaaatggcaaaagagcctctccttctctagtaatagaggaaatgtaaatttgaaagtgaagcataattttacattcagtatcttacaaaatcaagtgctgatgaggttgtagagcaaccaaaactctgtaactattgttggaagtggaagttggcattcaagaatgagcaatttagcaacatctcttaaaagtgttgatatccactgtctaagatacagaaattccatctctgcatgttacctagagaaactctcatccacaggtataagaatagtctttggagcatcatctgagatagtgagccaagatcgtgcaactgcactccagcctgagtaacagagtgagactccatctcaaaacaaacaaataaacaaaacagaataaatatactcaggatatttacagacacttttattttattttttgttatttcaactttgttttttttacctgcctcccaggtttaagcgattctcatgcctcagcctcccaagtggctgggattacaggtgcccaccaccaggcctggttaatttttatattttcaatagagatagggtttcaccatgttgcccaggcttgtctcgaactcctgatctcaagtgatccacccgcctcggcctcccaaagtgcttggattacaggcatgagctaccgcgcccggctgcatgtgtttttaaacattgcctggcccgttatttcaacttttattttcgaatcaggaggtacacgtataggtttgttacaaaggtatattgcatgatgctggggtttccagtatgaatgaattcatcacccaggtaatgagcatggtacccaataggtagtttttcaacatttgccccctccctctctaacccctttggtttctccagtgcctattgttcccatctttatgtccatgtgtacccaaggtttagcccccacgtataggtgagaacatatgttatttgaatttctgtttctgcattagtttgcttcggataatggtttccagccatatccatgttgctgcagaggacatgatttcattcttttttatgactgtatagtacttcatggatacacagcattttatctattttatttcttttttattttattttttgatagagacagggtttcaccatgttgcccaggctggctcttgaactcctgggcttaagtgatctacttgcctcggcctcccaaagtgttggaattacaggtgagccactgcacccagcctacacagcattttaaatgagtggtctggtgcaacttgtatcatcatgaaaagatccagagacctattatgaggagtaataaaaggaagttgctgcaggatatgtacagtatatcatttaaataaattttccagataagcaaaatattttactttgcttatatagccacgtatggtagaactgtgaaaatgtgtctggtaatgacacattaccagataaataccaaatacacatgataaataccaaatggtgaccatgatcaccactgataagggtggcagggtgatgggatcaggaagacaaggggcttcaactctaagtgtaatgtttaatttgtcattaaaacaaacaaacaaacaaacaacatccaaagaaaacatggtcatgtagtaagatttgacaaaattgagaggtggatacataaatgttcataatattattctctatacttctctgcatatttgtaatatttcttactttaaaaaaaggagaaatgagattataaaaaaaagtcaaccatcttcctacataccagcgacagacaacttggtagtataattttaaaaatcatacaatttgcacaatgacaacaatttgcacaatgacaagcaaccgtggataaaaatctagaaatctatatatatatttttttctttgagacagagtctcagtctgttgcccaggctggagtgcagtggcatgatctcggctcactgcaacctctgcctcccgggttgaagcaattctcctgcctcagcctcctgagtagctaggattacaggtgcatgccaccatgcccggctaattaccatgcccggctaattttttttgtatttttagtagagacagagtttcatcatgttggtcaggctgatctcaaactcttaacctcgtgatccgcctgcctcaacctcccaaagtgctgggattacaggcatgagccaccatgcccggccctagaatcctattttttaaaagcaactaggagtatatctaagatatagcatttctctgtctgagagcagggagagcttgcataggtgtcaatgtccttcaagggactcttgaaactaattcagggccctatacactgcaggcatttcttggagtggccaaggtattgtcatgtgttaagaattctgagaagttctcggataatgaaatttgtgcagctttctttaattcagcagttttcaaacatctaacaatagaatccttcttgtctgaggggcctcgccttaggaaaggctgccctaacaacctcaaagttcccttccaacacccacagtccaccattctagtcttggctctgccactaacttactgtatgactttggccgaatcacctttcctcttggggtctcagtttgttaagttattaacaccctgggtgacagagcaagaccctgtctcaaaaaaaaaaaacaaaaacatttccctggcaaaaaatttatgactaaatcctccaaagcaatcgcaacaaaaccaaaaattgacaagtgacacctaattaaactaaagagcctctacacagcaaaagaaactatcaacagagtaaacaggcaacctacagaatgggagaaaatatttgcgaactctgaatccaacaaaggtctacaaggaacttagcaattctacaaggagctagaacctacaaggaacttaaacaattcaacaagcaaaaaacaaagaaccccaacaaaaagtggatagagcacatgaacagacacttctcaaaagaagatgtacaagcggccaacaaagatgaaaaaatgttcaacatcactaatcatcagagaaatgcaaatgaaatcgtgagataccatctcacactagtcaaaatgattattaagtttctttttttgtccccacccttgatatctgaagaatggctgtcattaaaaagtcaaaaaaataacagatgttggcaaggctgtggaaaaaagggaacacttatacactgttggtgggaatataaattagttcagccactgtggaaagctatttggagatttctcaaagaacttaaaacagaaccaccattcaatttagcaatttcatgatttggtatataaccaaaggaaaatgaattcttctaccaaaaagacacatgcacttatatgttctacacagcactattcacaatagaaagacatcagccaagcacagtggctcacgcctgtaatcctagcactttgggaggccgaggcgggcggatcacctgaggtcaggagttcgagaccaacctggctaacatggtaaaactgtgtctctactaaaaatacaaaaattagccaggcatggtggcacatgcctgtaatcccagctacttgggaggctgagacaggagaatggcttgaacctgggaggcagaggttgcagtgagctgagattgcgccactgcactccagcctgggtgacagagtgagactccatctcaaacaaaacaaaacagtagaaagacatggaatcaacctaagtgcccatcagcagtggaatggataatgaaaatgtggtacatatacactatggaatagtatgcagccataaaagggaacaaaacctcaaccaagttcaaggacagtgtcaaaaaaataaaaaagggaacaaagtcgtgtcctttgccacaccaggaatggagctggaggacctcatcctaagtgaatcaacacagaaacaaaaaaacaaatactgcatgttctcacttgtaaaaggaagctaaacattgggtacacgttgacatcaagagaggaacaatagacgctgcggacttctagaggaagggcaagggctaaaaaactctctgttgggtactatgctcactacttgggtgatgagctcaatcatagcctaaacttcagtgtcacacaatatacccatgtaacaaacctgtacatgtaccccctgaatctaaaataaaagtttaattaaggcctggtgcagtggctcacacctgtaatcccagcagtttgggaggctgaggtaggtggatcaccagaggtcaggagttcgagatcaggctggccaacatggtgaaaccccacctctactaaaaatacaaaaagaagccaggcatggtggtgcgtgcctgtagttccagctactcaggaggctgaggcaggagaattgcttgaacccaggaggcggaggttgcagtgagccgagatcatgccattattctagcctgggcaatggagcaagactgtctctgaaaaaactaaaaagtttaatttaaaaaaaaaagggtgtgtatagtttgatctcttaccttttcccagccataacacctcatgttggaccccacgtttaggggtttattaggggctttttaggggtttggttttatttctcctcccccagttaactgtttcttacttaactaaagcaggttcatggtagaggaattacaaaaatgcagagaaggatgattaaaaaagaattaaactaggctgggtgtggtggctaacacctgtaatcccagtgctttgggaggctgagttggaaggatcatttcaggctaggagtttgagaccagcctgggcaacacagtaagaccccatctctacagaaaattttaaaacttaaaaaaattaaaaagtaaacgttagacaggcatggtggtgtgtgtctgtagtcccagctacttgtgaggcttaggcgagaggatggcttgagcccaggaatttgaggctgtagtgggttttgactatgccactgcactccagcccgggtgacacagcaaaaccctatctcttaaaaacaaatcagatttactccaaatgccacttttggctctttatgatgacagctgacatttatagagcctttatgtgcaaagcgcagtggtaggatatctcgtttcacttctcgttgaagtggaagtcaagtctattcttatccttattttacagatgaggagactgaggatcagagagataaagtcacctgtccaaggtcatactgtggatgtagctctaacccaagccctcccgactgcagcacaaattctcagccactaccctattagccccttcatttgaaggtgtcttcatcattgccaagattccttttcctcccggccccctaagtcttcaggattccctcatctcatctccccagagaagccatgacaccatcttctccaaaaacaaagtcagcgctttcactgtagatggacctgtgttcttcccccaaactcagtccacctcatctccagaaaaactatatgacttgccctggagaagagggggaaaaaaaaacctcttcccaccaactccacctcccaaattactggatttggggtaaatttacaggctggagacagaagaatggatgtgtatttagctttcaaattgactattgttttatgtgaatgtctgataaagaaaacacaatggctgccagatggggcctgggagtgagatttcccatgtggagaattctagaagacatgcctggagttctggagcctggatcctctggacagacaggtggccagctaaccagggtggaggcaccaaagataactgtggggtggggagaagacaccagcccaagagatttgactgggattggtctacgcaagaatggaaaatggaggcagaatgagttagcagcaagcacacgtacactgctatagaatctgagggacccggccagtgctggccaatagaaatagaatgtgagccacagacataatttaaacttttcttgtagtcacttaaaaacatggtaaatctatgaaatagaagattgctcgtgcaaataaatgaactctgctttggtctcagtgatcaggggtcccacactcaagtgccctcaatacccagagaagtaactgaaataaatggaacagatagggtgtgagcaaagttcacacgttcctctaagaaaaacaatacagcaaacatggtgatttatgttcattaataagtttccgtatggggacactaaggaatagtggggactacggcaaattagaggaagcatgagaatctaaagtggctccaggagactgttgtctcataggtatcagtgttgctagaccttcactttttttaaaggaggtgaaagttgggattttctttaatttatttttttgacagggtcttgctctgtcgcccaggctggagtgcagtggcgatcttggctcacggcaatctccacctcctgggttcaaga

SEQ ID NO: 8856 - DNA, 60217 bp, Homo sapiens
  misc_feature (1)...(60217): n = A,T,C or G, or insertion/deletion polymorphism (see Tables 1-2)
gactattcgagctctactaaaccactctaggacatgccttctttgggtcatcaaaaatcaactctcctcgcctaggttttattcttgccaacttagcattcccacggcaattcactaaaaacgccttaaaaaatcattagctctcatttattcaacttgaacatcagcatggcctgaagctcgggaagaaacagactggcatagtgacgctgccagcaccaagtaaagttttacctcccagcgctccaggttcccagcaagacttccagccagggctgccttccactccatttcagcctggcaccctgactctcgctctaccagctgttggcacgccttgtgttaaccgagaatttgtgagaaaagcagaaccttcccactgcgtgttagttttgcttggcaacactcaacaatctcaaattggaaggccccaaggaaaattttttgttgttgttcttctgcccccaggatgattttttcttcttcttcctgaacctgtttggatttttttccacttaaaaaatctagcagcccccacctaactgatggatacttgtaggtaaatgactctatctgagcaatgatgcgctgactgggcctataaattatgacccattgtggttagttcaaataaaaggaggttccgataaaggaaaactgacactcggaattttctctctcaaaaaggatgatgtctagggatgcaaaattcaggaatataaagagagaccttgcaaatgtatcaggctcttctaaaatacaagggattggtataaaattgtcctggtgaaatcaaggggaagcacacaggactaaggaaagagaggcaagaaatatatttcttctcctttgcagggaaaacactgcattgggaagaagcttgctctttccaaatacattccattaaattgacaaccacagccaccactgccaccacaacaaaaatcaggccaacctagatcaaattactaggaataggtctaatgttacttttatgaccatgaggtcctggccctcatcagaacctctgggttacccgtcctatcacttggtaatgaatttcatatatgtatgtgctgttaaagcaaaaaaaaaaaaaaaagtaaactcataaataattcatcacactgtctcctgccaactgatcatatattgttcatgtttcaccggccatattaaataaaaatttaaaagtgtttccgtttttcatttaaaaacctagtctataattggaggtgaccacacgaagtgtcttgaaggtagcaggcattaaaaaaatcattacttaaattgcacagttaaaaaatattcattagaaatggctaaattaaagaaaaaaatgttagggaatcttagggaaatgtttctcctaaatgttgtccctaaaactgcttcactctaaaaatctgttttgagcgacctgataaaagggaaagagagagtttcagctcaaactcaggaaagaaaggctgtaccagtttcttcagaatggaacattaaaacaggccactactgaaacagttcttgtgcctttgtggctaattattacataattgatcttaaaaaaatttttttaagtttaggaaaaaaaattagaagcctagtgaaagtaccaaaaacactgtaacttttttgtttaaaaatttatatcatgaatcgaaaatcagaggagatggccgttttggcctggtctccgtcctttccttctctattttgattgagccagtcccttgttaagccatcagaaaacagagcacacttagagctcttaaactgctttagacacaaagaaaaaatttaaaaggaaaaaaaaagcaataatcgtgtgacatctcagagatgatagcatatactgttgttttgcttgatgacgataacacaattctttttgaactaagtatctctctagactacaactgggtcaaaattatagatattttttgtggccctggatgaattttctatttgccaaaactcaaaggattcaaaaccaggttgatgtctagttaaagatgatgctccaactgcttgagatgctagttcatttcaacagacattaagattgaaggagtgtcatagattgcttaggcaattagaaatttaaaaccgtttcaaagaaaagaaaaaacaacaacaacaaaaaagttatgccataggaagcatgaagcctcatttactaaagtggagaaatgtattttattttattgtccttatggcgttgattgccagttctgacacatattacaaatttcacattgtttttctgaatgctgaggtcagacctaccataagcttgtcccgttgtattaccaaatggctaattccctcccaggtattggagaaaaaagtcagaagggcagcatcctaagagaatgggtgcccagtatgacaaggagctgctaagataaaatgaactttctaactaaaaacagaaaagaaactataaaattgattttaaaatctgcaggacatttttttaaaataaaggataaattaactatgaatatattgagtggttatgaaactaatatatcttagcataacagagtagagacagctttaacttttctatgatactcatatagttatattttatgatgctctaataggtatagggtacataatgaagaagaagctgtttgtggattcattgtattttattttattttattttttactgctttgagtatgaagagtctgcccaaatatactacttataaatcataccaaaagtgcatcagtgaaaaccacagttccatttcttaggggaaaaaaaaaatcaagaatcaagttttagaatccaacgatcacattttccttaattacaaacgaagacatcatgtattatttttctgtatccacaagagatgagagaaatgtaatttttatcgcatgttaagttttcactgaatcacagtattattaagctttaaatcagaggattgtttccttcagctaagtctaacaatactagaaagtaaaagggggggacaacccccacctcatctggggctgcaatatttgctgaaaaaaatctacttcaaaacattaatcaaatttttcgcccactgggcaaccatatggtacagcagcatgtgaatctcacaaacttgctgatctcctgtaactgggtgcaattaattacgctggctgcatccatctcttggattttcgccttgtgaaaaaagtatttattgcaacagcttttacaaaacaagggaatgaaaatcacaattgattaatgagctgaatggaaatatttccgttagcagatttttttaaatgaataaggattaataccatggatgggaatgaacacacgtcgatctcgccttgtactttttggacccccaaaaaggtggcaaaagagtgggcagagacggtgctgtgagttctaacatgcataattcactagcaggctttaggtcgcaagtaataaagccttaaaactggtgaagtaataaagaggctggctttacaagatactatcctgggagacagaaagcttgttctttgatgtgaaaacacagatattaaatactcagtgggtgaggaacattacaggcctgacaaagaagagaaagggaagggctcttgaagtaagcaacctactttgtcctcagctatttaggtgcaaaggttgctgcacatatgggccgattactgttttaagatccctccataaaaccaagcatccgagagtccgtcagaatggtaccactgtccttacctactggctaaaggcacaaacaatgcataattgcaaaatcttcccccagcaatgttcagccatcatgcacttgactttgcttaacagtcagacctcgttctggtgctgagccatcctacggggcttcatggagcttgtttcttgatacacatgagggtcgtaatccctcccttctaacttaatttttttttttatttttatttttcagagacagggtctcactctgttacccagctggagtacagtggctcactataatgttgaacttctgggctcaagtgatcctcctgcctcagcctcccaagtagtcctccaaaggactacaggtgggtgccacccagcccggttaattttgttttctctttttttagtagagacagggtctcactgtgttgcccagggtagtctcgaactcctggcctcaagtgatcctcccacctcgcctcccaaagttctgggattatagatgtgagccaccttgcctggcctcaatccttcccttctgagggagtgacagatccaaggctgacagtctataaacaaagcagaagcagatgcactttgccccttttcagaagtgccctctgggtttaagtccaccagctagccaagcattaatgacatcatcattacatgcatgcctatttcagaaagatcagttccattttccctaaatagacagcagaggagaccgcttccaacattttgctagttgttaaatatgtatcttgagaaaacgaaactaatactaaacataatggaagaaatacgtaagtttgaaagatcaaatatcgtatgactcttgaaacagataaaggaaaaagctgttaggaccaagctttgtaagtcaactcttaagccaacccttttctttactgcatctattgcatttaaacttctaccaggaaattctgcaaaggacttggttaaagagaatttactattattttattaatgcctgcagagtgtgtgtggctagtatgatgatttctctgctcaagtttgttgattgattttgtagaaatgtccacaggagataaaatctgcaaactcctcaaagatgagactgtgtccaagaaaagagtaatgatactttataaaacaagaagtaagtgacatttgaaacgatggttcatctcaaacaacacatttcctctgagctccatgtttatgttaacatgtaagtttgggaatgctgatgtaatagacaaagataactcttgccacttcaaagtagcaggcatgcctaggtgggcaagaggttcagaaagccagcacttaaggtgttgaaggggtaatttttaaaaatcttaagaaaatcattccatttgagaatcggagccaccttacaatcaaagaagccactgttttgaagaaaccactatcctgcaaaaagtagacggaagttaccaacaaaaagtacttggctcccgaagaagaggaaaatcagatgggaacgggttgtccaaccccttaaaccagtgaccctacaaagtacaccaccacccaccaccacctctcagatgatctctaaacccctcctacacgcaatggttgttggcttaaaagtttaaagagctaacaaaatgttttaacgagatacaaatctcagagatcattaatcaatatgttcaatgttatttgtgataattcatcatgacgtgatattaatgggttactgtacccttcagaggtgagattaatgcaaatgagctgccacaattaactttactgctcccacctcacaggaatggacagatgattataaatgacaactatatgtcaattacaatatccaataaagtgaagcttagagaacaatccatctccttttattgctcttccttgacgtagctgaatttagctcaacccactgttgtcactatgtaaccattgtttgggggagggaaaagagatttttcttctttttttttttcttttttaatttttcgatgtcttaagaagtgcttcaaaaacgtccatgtaaatacgttttctaaaggaggagagccacaggaaaccaggaataaatgccacattcatcctatgtgagttaaagaaaactgtatccgttttcaaattgtagcagtaaggccagcaaggaaacaacctacccagctgtgtataatatatttactcaattaaaaaaggaagacattagcacagcatcctgaaaagccttgagtttcactaaacaaaagttatttgaaaatgactccatcgaagtaaataggtcacagagtggaaagcaggtatgaggccgagggcgggatgaaaggtttgatgtcagtctgtacacctgcacttggaggtgtggagtggggagcaggtcagtaaatactacagtgctggccctcacagcagagaatttctgtgtctgcatcgttcctccttgcatggatggagtgatttttgacagcagtctctctggtgaaggtaggcacgttgtcatgttgcctcctcaacccagattctcctgccgggctggtgaacccagaagctgtaagaattagctagtatctcacagctaccccttcctgccccannnnnnnnnnnnnnnnnnnntatgtccacgccgccctcttccccagcagacactggctcatcgctgactgccataggtcagccaggccctggtctcagtcaggaccaactctgctgtagaattcaccctccagagcttcccgtgggatcaagctgaagctgatcttcagctaagccacatccttcctggacattttccctgtccttttttttttttttttttttttgagatggagtgttgctcttgtcactcaggctggagtgcaacggcacgatctcggctcactacaacctccacctcccaggttcaagcgattctcctggctcagcctcctgagtaactgggactacaggcgaacaccaccactcccggctaattttttgtatttttagtagacatggggtctcacatcatattggccagcctggcctcaatcgcctgacctcgtaatctgcgcacctaggcctcccaaagtgctgagattacaggcgtgagccactgcgcccggccacattttccctgttctaagccactcttctcatttcctttctgaaagcatcctgacccccatcaaatcagtggaacaagaagactaccttgacctgtgcttccaggtaacagaacgcaaggcaggtatcaatgagatggaaacaggaatgctcttaatgcagtgcaatttacaaaagaactgttctttgctgaccactagtaagagaccatccaacaggctcctttctgaagccacatcccgaaaagatcccctcctgatgtctctagaaacatgcaaaaataaaaytgcaacgtcagaaccataaaaggatcatagcagattgacggtagaagctatagatttgtgtgtccagaatgtttccccaggtgcctccttttgcaaaattggacctcattttwccattagggaacggggcctctcagactcygtggagaagcagagaattatctccagccttgactgcccaggctgcagagaaccgcatcatccggggacatgactgattcagggataggtgtctgcctaaaactaggccaatcctggttctccctgtggcttttgggccaagggtagtggggaaaacagcttcttgtcactgggggaacaagccaagatgggacagtgctcgyctgccagtggcagccccattyggagagaattttccctttgaagaatataacccataaaagatcatcaaaactaagggawtaaataaagaggggacctcgatgacatatttaagctctgaataaagctagactctaagcaggggttggcaaactataaccgctgggccaaacacggctgtgttcttatacagcacacaggctaaaaatgcttcacatttttaaatggttgggggcgggggggaaagaataatattttgtgacacatgaaaatgtatatgaaattcaaattccagtatccataaataaagtttctcgcagccatgcctgctcctttacatrtcgtttatgcctgttttygcactatgagggcagagttgagtagttggcaacaaacactacaaggccccaaaatatttattaaatatcccatcacagagaaactttgctgactcttgcacaaaacttcgcattttgtcagccagtaatgaccctttcctcttaagctagtttraatttggagctttttgtgtgtaagaggaaactcctgatctactaaaagaaaaagctattcttagtccttcccagatatccctgaacctccacccacccagtctgctgggatcctgatatagtttggatatttgtcccygcycaaatctcatgttgaaacatgtccgtaatgggaggtatttgaatcactggggcrgagccctcatggcttggcgctgtcttcaccatagtgagtgagatctctggagatctggtcattttaacccttttcccatttgccccaagaatacttactggtgtgcagtgtttaccctgagatcgctttgccatgaaatatctcgcttttattatttttttcacatcactctagcatatcgactttggaaacgaaggatatcattctatttatagccttctgtttttagtagtggtatttccatttacaaaatataatagttctccatcactgaaaatgtcaaatccgagaaaatgtagcattcctgcatgtgatgttaacatcattctcgaacagttgttggctgaagattcatttgatgaatccgatttttccaaaatacacaattctgatgattcagatgattctgatgttagttctgttcagaaataattccaagaactgtttttatattttattatcactttgaaaatcggtcacatttgcttcagcttcaaagagcatgtttatgtaaaattaaatgagcgctggcagtgagctgcgctttttttttcctaaacaggaaaagggttaaaagtggggcacctcccacccccaccccacgctctgtcacttcccactgtcaccatgtcacctgctgctctctctttgccttctgccatgattgtaagtttcctgaggcctccccagaagcagaagccgctatgcttcctgtaccacttacaaaactgtgagccaattaaacctcttttcttataaattacccagtctcaagcatttctttacagcagtgcaagaacagcctaatacatatcctacaggtaacgtctcaatatccagatcaagtgactggttgtttctcttacctgtttcgcagaagttattgcattctttgttgaatatcacaaactgttaatatgttaatcttaaaacatgtgaaatatatataatatctatcattacaactacaattccaaatatttatatataacgtcagccatgccaatggacatgcaattctaggcccagcaatggacgataaagtaggttaaaagtgggggagaaaaactggttttaaaaaactgtacctgaagaacatatttaatttaaagggaaatcccacaacagctaaattgttcccccagttgggtagagcctgccatgattagctgtaactgcctggaacactctagactcagctgacgaaactccagttgcctggtgagaacagagtgattttgatgacttttgcagaggatcagaaagaggggaaacggattcatttgattcatttgtggtttcctgttttccataaggagatagttacaggattaaatttctcctcccttttccctatgcactcacacctgggtcccaggacagmaggaccaatcgtcaggaaaatacatccatactgcatcccctgatacttcatctcaggttgggcaggagggttagcagaagagttatttccctttgcgaagattaaagggtatctcacttttattttaacaatgtgaagacaactgttgttccttactattaccaatctactacactggattctaatagctctattacattttccatacattctcctggcatggggcataaatgggtgagacagctctggataaatcactgccagcagcagaggcattttctttagggaatgaaggcttccatatagcatttaactaactctctttttggaaacaccccatcacaaatgagtctttcaaactgaagaaattgaaattgatttcttagggtaataattaacctcagaaaataatgatgaaaagttgcttattaattattttttataatatactttgggaatatttcttttttccatgaaagatagagacaaaagtagacacattttacaatcatataaaatgtgattagactcatattttataggagaatgaaactcatttaatttgcaaaatacttaatatgagagggaggtgtccccctacacacacacactcttttcaagactcttaaatagccctttttaaaacaacacaatctctctgttctgttctttatttcttcacacataactgccttggagcttttaatatattattgctatttcaatcccccatggtttttctacttattcaaaaagaaggtatttttcatctgaatagccattgacagcgaactctggtgacatcctcagtcttccttgacaatgggaggaggagttgtcaccaagaaacttgttactatcccaagtaacgagctagcatccctcagataatacaatagagatggactagtgtttttcaaacaatttaaaacacacacacttatgtacacagaaaaacacatgtatacacgtacacgcacacacaaacacacacactttaaaacaccctctttttctttagtcacctgaagagtcgtaaagcataactgcaaactgataaaggtataaattaaatcatataatagatgttgttgcaaatcgtacatgtctgtcagatcaccgagatagaagtcaaaacatgaaaagaccaggaaatacccacaaaagaagatgtaattgatgagactattcaagatcttttattttttccttcttttgctagtggaaaatttttattctgcacttttctggcggagggtggtattttgttttctgtaagatacaaacaaaagacagttgtgtaaaattaagttatgagaacaacatagaactgtttcttgaagcattccaaagataagtttttgctaattaattaacaaattcaagctggttaaataaaaccttcttccaacacctcctatttaattgcagtttggcaccaacaaatatatatcaaaattatagtatttcccctgacaggaagctccttccttccacacactattatggctctctgcagagtaagccagaattgctgacaaccttgaacactgctacaacaatattactatacttggcagagaagtacccttgcggcaagagaaaagctgtaattttgactgtcacttcacattacactagatattatttcactgtatacacatacacacactcacaaactcttaatagactacagttttcgcactgcctgcctttccaatataaatggcaatataataccagcaaaccgccaatgagatcctggagagaaacaaatgtttggcattatggaaacatcatcagaggatgcattttaagggatatttcattgctttgtcccccactcacaccgttcacaccccatcatcaacttcataagatcatcaccttggttatcaaaaagaaattcactttttttaaccccatggtgggccaagtcagcattaacaaattccatgtttaaaaatttccatggtgttagcaaagggttgtgctatgactcgtaatattttggacattcttcaaatctgatgcctgttatgtaaaatttccagatttcacaaatgtatcctttttcctgcatttatctcgctttccttcacacccggggggagtttgttaaactgcagtgaccactggcagagtcccaagccaagccaaaccgtgcaaacatgaaacggccccacaaatcatgcaaaccctacacgctgtccctgccagagagcagcgcctgtctttgcagagaactaaatgcaacatatgcttccttcttaccaagctcacactgaagcagattgggccaggttccccactgtgccctcccccaccccctgcccagctttgatttacaagatgctatgttaatattccctctatttgtcccaggcaaggaattctgtgatgtcggtatgagctccaaattgagaactccctggaatccggagcacaggtcagaaggatgaatacacagagggagaaaactgcaacttccctcaaggagagaatgctagaaatggcaatgggcaggaaagaaaggatcctkacatcattttatagagagtcgttcatcccttacacaaacctggccaaaaatctacagaatgctgaggaaacacggctattcaacaagaaaatcggagcttctctctctacttaatctctgccatccccctttttttcctcccctttcaaattgctacttcaaacgatttaaataagatttaaacttgttttactgaatcaaggaaaagcaacagcaaactctttgccctctgttaagagaatgtatccaaaacttcaccgggtctgctgaccacaccgaatttaacaaggttcgcaaatgaactagagtaagtttcccacagtgacacattaataataagttccttatcccatccatcccaagccatgaatatgtaatgttataaaatgagtccttttcacacaacggaatctcagacgtgaataaataaaaactatccatcacaagcctgtgaaaaattaatgagagttcggagatgcaaagaaaaatggggacaaggagagatggcccagttcataaaagcctccctaaaactttcagacattaaatatcctagcccccgtccctcaccaaattgccaggtgtgggtggaaagcaacagattttatttttaatgggctaaaattttacartcttaaagcacaattcatgcaagcaactgagagatcacagctacaaacactggactttctattttctccatgcgatcccaatttcagctgcagagccagagtttatttctttaattattcataattcataaccaacctacttccagaaggatttgaggttgctcacagcagttatgagaaaagggagaagagtggggctcgcgcagggctcaaacatcaggagactggaaaaactctgctttgtgcattgttccttgacatcgctgtggacacacagtgcctgattaaattgtatgtgtcgcttgggttataattattatcattgtcaaaaccacttgctggatgctcactctctgcccagcattacactagtgctatgccctgcataaactctgattctcaccctctatgaccccatttgacaaacagggaaactgaggctgggaggagctaactaacctaccccaagtctaagagctggtgagagtaagagccaaaggaaggaggttagccagctccaaatcacctgtgcttcccacctggggccactcactaccactcatgagttaaggtgtatgaaaacggctttggtaacctccttcttgccatcatgaaactgcagcacgctaatactgtcagtctgtctcagaaacccctgccagccagaaggcttaactttgagatgaatgcaaagcagaatgaagcccaggaactttgggggtctgggctaaggctgatgctgggcagcagattagaggcagagcagagcccagaagtccagcctcccctcccagtgcactcctcgacaagaggctgcacttcctcgtcggaaggactccaggtcccactttgggaccagacatgctgcaaaaacaaagaaattcacccaaactggtttgccctttactggattttttctgagactgaaagtgttgccttaagggacaaataccaaaaggaagatttaaaaatggaccaatggggacaatctgcttaatctggcccaacctcctccctcctcccttctccaccatccattccatgtgggcagaacacgtgactcatgggattactgggagcctgccatgctgttctgttttcaactcactacttttgtctgcgctattctttcattcaggataccgccccaacctctccacctggctaaatcactcatcctttgagatgcagaagccaaagagatcctcagcacatacctccagaaagccagttactgcaggggatgcgtacggaccagccaggtaatgtcaatttggaaagcgggccaggtataaattaataggggctggttggtgtgagctgacccggtgggcacaagccccatcatccaactggggcggccaccgtacagggtgagtcaagggctgcgcccgggaaatgtgggagcaaaggtgccagaccttccagttttttaagagaaaccaagaatccaggtttttatgcgaactttaaaaaaagrggatgtgggggtgggggcagcaaacacatgcctgcaggctgaattcaccacccccctccacgttttagatcttataattacatcttctctttaggatccttaaagcataaaggcaagagccaagtctcagtaaactctgcatgggccacagctcggaaaagaaaaaaacctgttatatcgtgggagctcagtgcttgctgaactgaactgattcacatcatgacttgggattcatgaaccagaagcacaggaaattaataaaaactgaaaacgagccaaagagaagggaaaggctctcttaccactgttgagaatgttatgtttaatccctgcaagcagtagagactcagtgtacttccatgaagtgctgcttgggcattcatgaggcattaagggagaaagaatttttaaaatctttgtcttctcaaaagggaataccacgatggggccatgtctagagcaaggtgtctaaggtgattctagggccctcgcccaagaaacgaaagcagcattgaacatgtccaggaaggatgtgaagcctgaagccaatgcagaagacaaagctagataacccctgtctctaagacatagggacttagaactcttaccctgatgagcaacattgaacattggatgtgttcaccagaatggaaggagacacactcctgccgaaatcatgaagggcaaactgacccagaaaagggacaggtcaaggaaggtattacctctgcatagttctaggtgtcctgcttaactcattcaggaatttcrggccagagggatatycaacaggaattctaamctgaagagtttagaaaccagtaggagaatcaggatgaattcagaaattactataatatgcattttcaagtgataaatcccatcaaaaacagaaaaagtgcttgaagaactggaaggaacagtgatcattcttgtcagatggaatcttaaaatccagtgggtttcaaaggatgagcaggagctggacatgaagggattggaggatggggactggaaatggggagttcattgcaatcagaaggaagagcaagaaaggaacaaaaagcaagcagtgtttggggagaccaggatgtgattccagtttggccaaaatatagggtatactgggagaatctattgaggttttgggagtgtatttgtttgtagtttgaaaacacctaagcaattttgaagagaagcagactctttaagtcagatgctgggttctccagtccaaatatgccaatataattgtgtctggtcaatgtctatcctgtccatccctcctgagtgccagatctaaatccaggtgccaatggatgacttccacttgggtgccccacaggcgtcatgaattcagtatgactgaaaaggactcctcctatcttcagcgatggttccactacacaatacactgtccaagccagaagtcccaaactagccttctgtccttccttctccattcaccacgcctgtcatccccttcagagctgttggccaaatcttgttgattttaccaagtatctatcaaaatgtttcctcttcctccctgtactcactgcaatcacttttgctcaagggctcatcatttcgtgcctgggtgactagagttgtttcccagcaggtctccccaccctcctttctcacatggctgccagaacggtcttctgaaaggcaaatctgaccattcgacaactctgctctaaattcctcctatggatccccatggcttggatttaataaatgtttattgagtgaatgagttctctgcatacatgttgttctctgcctggtaccgtggaggtcaggctcgcacagaagcatacttatggtcagagttagtcaataaaaaaagtgatctattctgagttccataccaccccaaaacactgatcagcttggggaaacttagaaagttcaaccacctggggataaagtttggamaactaggctagggccaattcagggtacaggtggaggctaggaagtttggcataggatatcattaaaggtcttctaaggatgaaggcaattggagctacactataggaaggcacagcaggcggagaacagacttgagaaggatttgggaggtgaagaaacagctaaaagactctatctctgacaaagatataatgcccagaattagaagagtggaaatgaaggaatgatgaatgaaagagattatcaagaagaaacaaacaaacaaataaacaaacaaaaatccctgtaatcagtaaccatctattattatgtcccagattttggaaatgagaccctaatgacaagcactcctaaaccttcaacatagctgctgttaaggatgttgtcttgtgggggtgaaaggcagaccaaaatgatactaccaccctactccttaccgatgagtcctttctgattttaagcaaatggcatacagtgtggtgaattaaaaacagcattatcctgattttattactagtatcattactattagcattattgctactgctgttataggtaaaaatgggaacgttgtgaacatttcccattgcctatccaaggtgcttggtactttacatgatatctcacttaatcatcagaaagtttggagttattctataggtaatgagggagatgctattattacctgctgtggtggaataaagatggctgcaaattctttgtcacttctaccagaagaaagtgaggtgtatgtctgctccccttgaatctgagtgggttttgtaactgcttagtccacagcagtcatgctgtgccaacccctaagccaggccataagaaactggcagcttcctgttactttcttttggaatcctctgggagccctgagccaccatgtaagaaatctgatggccctatatctgccatgcaggaaaggccatgtgtagggctctgggyaagagtccctcagctgagccaagcatcccagtcatcctcgtgaaagtgccagacccatgggtgaccatcctggaccagctgaagtgccagtccaattcatcctccagcatagcaccactgactgaccccagtcaacaccacaaggggcagaagagtcactccactgagcccyaacttasagaaatcacaagataaaacaaaatggttgttgttttaagcctctaagttttggggtaatgtattatgcggctatacataaattggaacatccacgttttacagatgagctacttgttactccaaaagtttggctgacttatctgtagtctcctggctgatgaggtgtgcagcctggattagaacctccatctgcctgacctggctgcacacaatgcttgttaagttatcccggaaaacrtaaggccatacaggtgtggcagactaattaaattcaccatgctctttgggctgtgtgactgctaccaaaatgtcctaccctacctcacatattcccttgttaggtagagaaggctggacgatgctacaactgcttctccgccaggcctcccaacgccctcgctgggcagagtcccatgtgactgttttcactgctagaaaaattaacttgcataatgaccaggaagtaaagataaactcaaggatgagagaaaacctcccacctcagaggctccacctcactggggtgaacaagcactgaccttctatcatcctataaggaaaacaagaagaagagatgtttacttgaattactacataggctccctgcctacatccacatcttgaaaattctgagctgtgaagctcttgtggttggctcctgggaacttgagattcccagtgatattccaatgctgaaacagcccagcaaggtgatgcaggtaagcacgcttgtaggatgtaacaatgtgaaacctcagcacattgtggttatgtttcaaagcacgaggtgacggaagcaagagcgagtttacatgggcttgtgatttcctttgacaagatacacgcactcattccttcaacctaagcaaaatttccaggactacaacagatttgaaactcaggtggacgaaaaaaaccatctgtgaatgggataacatacgaaatcatcaaaggtaattgttttaaaaacgtgactcaagatggcacagaacagcgtccacagatgtattcttggttacttaaaaacacaatttaaagtaattagcttaatgttgatgtaattctaragatcgataaataaacctaaaaatcttaatttgatattgaatcgccccaaattaaacaacatattttcaaaccactaaatattgattcatttgtaagatgaggcctttcaatgcaactatttgacctgaacgcaaacaggaaagggttgacacattttctctgtgaagggccagatagttaagtaccttcatcttcgggccacgtatcgtctctggcacacagccttctttggattttttgttcatttttgttttttttaacgggtcataaataaaaggctactggctggagttagcctttgggccataattggttcattcctaccttttcataatctcagttattgatcaggtgatttttcaaactgtgaagggtctacacgttcamcctcttccttgtaagttaatgagttagctaccaagttttgaggaagctagcagaaaacaggagacccaggatcagatayagaggacttcgttactcatggcasagcaaacagcatgagctttatttctgcactgattcccattgccctggcccctagtcmcacagggaggatgtggaacagcccggtagatgccgtgctcatrgtacgtttcagtcatggctgargagccccaagcttasaaaccccaacctttatcaagcaaatctgccaaaccgttgtcctggaaggaggcactgtctttattatactggaaagaaagccatcctgtcctctgctcctgagggagacactatctgtaccttgcaagtttctttgctagacaacgttccttggaaagatggcctgaaaccaaagctgccagcacttctgttcccaagacatgtgaaaacacaagagacccgaggatcactgtgtccaaccaatgacagctaggagaaaatgcaaaaactagcattaccttaatcacaggggtctttttctatgaaccaatcaagcagatttatgtatttttttcagtgccgtaaaaaaaatttgatgattttgaggcttaacatcaaataccagtgagatcamaagttagatatgacatcatacacatcatttctgctgaaaaagtacctttagttaaaaacagaaaccaatttgtaaatgtgaattaaatgcatactccacaaaaaaatacctggtgaaagtaaaaaaaaaaaaaaaaaaaaaaaaacttccttatgtatagatatgtttcctgacagatgtaaatgaaaactaatacggtgacatttttcaaattagccactggaaaactgtgtgtgtgtgttttcaaacagcccgagcaattttcagttatgtcggcctcggaaagtatttatgaaaaggataataaataattaattctactggccagaagctgcaactcctttctgcttcgacaatatacattgaaatgctgtttaaattagaggagcaaattgattcaaaaggcttccattagtgagctggcaaacaggtttgaagttggctaataaattttagataaagatagagcttttgatgaggatggcaatgccggactgctgatctccgagtcaccagtttgttaaatcggtggctgaagtcttgatttcgctccctgtgtcataactcactgtgttaaacaatatgtcacagggcagcacgagcacagtcaaaccagaatggctgctgcaggagccatcagcatgactgtgtggcagctgctcacagagcagggactaacatgggaaccagrctagcttttgcgtccctttctgagtctccagtctatccgggtttgcagaacattaatcaaggttaattaggcccacctgtgacataaaaatttctacctatgctatgtcttgcagcataaagtcacgtctgacatatctattaagaaagattcttaatcaaaatcaagaaactacgcatgaagctcttaattccacttggatatacatactttagctggcttcaagctgctcctctgggttgtggaatattacacagctctgtaaaggaatgatttaaagctgtacatactagcctgaaagggcacacactgtacactacctggggatggtggagtatgtgtccacttatttcagaaaatgagaacaaaatcttatatatgtgtacatctatattaacatgaaggaggatgtacaagaagtacaaaatactaatcatggttgcctcagagggatagaattagatgaaggaatagaaagggtttttttaatgcctcctttagacagctctataattttaaaaaattattcaaataatgtataataatgttcttttataattaaaaaaatctaaaaccaagaaataaacaacatgaaggcttatgtgacttgcagaaaattataaaatggggaagtcatttatttgcttagcttatttctacctggccagtttggggaagcctgtggagaactgatcaatctgtctttctgtccatccactcttccacgtatttaaccaagaaaccagacctaggaaatggtgggtgaagagtaaacagctttagaatccaccaggcctggagagaaattctgcctctacccacttgcaacctatgcagctttggaccatgctctcgatgtcttccaagaataaaataattgtaagagctacagcaaatgcaggtagtgactctacaatttcatccacaaaggttagctcttttcctgtgcacaccaggatctcagtatggctaccctgagcagaataatctacacttggccaagatggcaacccaggatgataaaagcaaaacacattgcagagatctgattattaaggaattcaaatttacactttctcaaatttgtactacttaccaatggggaaaaatagaatgctactttttttttaaggaatactatattttcccttttatttgtagccacttttcaaatggagcctttgtgaagtacttccagccttggtcccaccatgggaaaggtggaattcatagaggaaaatcgtggagcaagccagacacggcggctcacgcctgtaatcctagcactttgggatgacaaggcaggcagatcgcttgagtcaaggggttcgagatgagcctgggcaacatggcaaaaccctgtctctactaaaagtacaaaaacttagccaggcgtgggggcacgcacctatagtcccagctactcaggaggctgaggtgggaggatcacttgagcctggaaagtcaaggctgcagtgacttgagattgcaccatggcactcctgggaggctgaagaaggagaatcacttgaacccggcaggcagagatgagcctgggcaatgagagtgagaccctgcctcacaatcaatcaatcaatcaatcaatcaatcaggtggaacagatactatccctcactacaagtggacaagtggatctgaagcagtgtagggagcaggatgaggacctcacaggcaggtctcttaaaagacagtgtcagatgtcctgcagctcatgtctcaggcttggtttccatgcctggatttcgctgccaaggactgagccttcctcaggggctcattcccctcgagtcctgggctgaccccagcaagagggaaggacagatacaatgcattccaatcagatggccttcctttaagaacactcatgaaagctactgacactttacactgactttcacattttaatagactacaaaataaaatatccaaattgtgcaaatgcagaaaatgaagcgaaaagtcagagtgattcatttttatttcttaattataaaacaagaaaacatgcaattaatatccgtgtgaccacattaagcactccacacataaatgaagcagaaagaacaactaaaaagtatttctcccctttcttagatacaaaaattacgtgtgtgtgggtacatgtgtgtatgtgtctatgtgtattagttcattttcacactgttgaaaaagacatacccaagacatggaagaaaaagagatttaattggacttacagttccacatggctgaggaggcctcagaatcatggcaggaggcaaaggcacttcttacatgctggtggcaagagaaaatgaggaagaagcaaaagcaaaaccctctgataaacccatcagatcttgtgagacttattcactatcatgagaatagcatgggaaagactggggcccatgattcagttacctcaccttgggtccctcccacaacacatgggaattctgggagatgcaattcaagttgagatttggatggggacacagccaaaccatatcactatgagagagagggggagagagggagacagagagagagagagagagagaatagaagaatagaacttgcatttatcaagcacttattacataggaggcgatgttggaagcgatgagtttagctaagttaacttggttcattccatacaacccaaggtagtggatactcattatttcttccatttgatgaggaatctgaggttgagaaaaataaaaaagctcacctacatccctacaggtagtcagcacagagccaagactagactcaagcaggctagttccagagagtcttatggtcaccctatgctatcctgccttcagagggaagggacaaataagaagaacaaaggcagacgtggagatgatagtaggggttgccaagctttctggaaaggagcagagagtattttaggctttatgggccatayagtctccatcccaactactcaactttgctggcatagtgcaaaagtagccacagatagcttataaatgaaggtgtgtagggctgtgttccaataaaactacttcagatctctctggaayttcaataaaagtttttaaaatttagttatgaacactgaaatttgaatttcatacaatttttacatgtaataaaacattattctattggttttttcccccaaacaattacaaatgtaaaaaccattcttagctctcgggctgtacaaaaacatgacaggccacatctgaccttcaaaccacagtgtgtagacccttcatatcagagacagtttgatgcaggggaaattgtttcacctttagtgtgagacaggtctggtgttcagcccatgctctgcccctgtgaaagagctctgcaaccctgggcaagttcttcaacagctctacacctcaattcccacatctgtaaaatagggattaacacccacttcatcaatgtgttttgaggattaaatgaaactggatgtatattaggccaagcattgtactggatacaggatagacaatttattaaggagtctatttacttgacaaataacttactgagtcctgttctgtgctagaaactattttaggatgaagacacagctgtgaaaaaaaaaagctgatacaactttgtgccctcatggagctgacaaaaaaagatattcgtgttttttgttgtttttttttttttgacatggagtttcgctcttgttgcccaggctggagtgcaacagcacaatctcagctgactgcaacctccgcctcccagactcaagcaattctcctgcctcagcctcccaagtagcttgggattacaggcatgcaccaccacgcccggctaattttgtatttttagtagagacggggtttctccatgttggtcaggctggtctcgaactcctgacctcatgatccacctgcctcagcctcccaaagtgctgggattacaggcgtgtgccaccacgcctgcccgttccaagatatttctaaatatgaaagcaacccaacttttcatcatgattcttagtccatccaggctgctataacaacatacattcaacagaaattaatttcttggctgggtgaggtggcttatgcctgtaattccagcattttgggaggccaaggtgggcctcagggtcaggagttcaagaccagcctggcctacatgatgaaaccccgtttctaccaaaaatacaaaaattagctaggcatggtgccatgcacctgtaatcccagcaacttgggaggctgaagaaggagaatcacttgaacccggcaggcagaggttggagtgagctgagatcgtgccactgcactccaacctggacgacggagtgagatttctgtctgaaaaaaaaaaaaaaaagaaagaaagaaagaaagggcaagggcaagggaggggaggggaggaaaggnnnnnnnnnnnnnnnnnnnnnnnnnnnnnnnnnnnnnnnnnnnnnnnnnnnnnnnnnnnnnnnnnnnnnnnnnnnnnnnnnnnnnnnnnnnnnnnnnnnnnnnnnnnnnnnnnnnnnnnnnnnnnnnnnnnnnnnnnnnnnnnnnnnnnnnnnnnnnnnnnaaaagaaaggaaaggagaaaaagaaaaagaaaggaaagaaacaaagatactgactgatttcttacagttctagaggctgggaagtccaagatcatggcaccagcagatctggcgtctaatgagggctccatctctacttcctgtatgtgctttcttgctgtgtcctcacatggcagaaggcagcaaacaagttcccatgcgcccgttttgtgaatgtaggggttatcaacaaacattgcagccataccacatgtatagaccctgcccgttgaagaatgagtcaagaaattgggtgggtgttctgtcatcgatcaactcttgcttatcacccctctgcagtgctgcatggaggtctctcatatacgtgatggaagtgatttgtgctttcagctgagagtagcactgtatccattccaaagtttcagttagcctcagtccctgatgatctgcaggaatttctccttctctcttaaaaaagaaggaacatgatatgccacttgcaagattaggatattytgtttaaaaagaggggataatttaagcagggctggcggtgggrgcggggagacaatggaaaaggctgacatctcctgagcatggctcaagaaggcataattcttccgcatgtataagaataaaacctcttaactcatctcccaacacactgatgtggtggcccaaagtaggctttcaggacagtcaccaggagaaatgttatcttgtgggctataactcaccttctcccaagtgggtccctggggccctctgtggtgatgagcaaattcatgccaaatgtcacttcgtaatgaccaagactcaagaagtgatcaccgttacaatattcagatacacttagggcaggtggccagaaacaaaccatccagagataaatgaacattttgcgctccacagcaaaaaaaaaaaaaaaaaaaaaaaaaaaagatttcacagccaaacacatatttctttgttgcattaagggaaaagtcgtgagatggcaagcaggctgtatttttaaaggatgaaatacagcaaggctgcttccacactggccagcctgagaagcacactggtgaatccatcccaaggcagagacttctagagcctgagagttggcttcattggaggcaggtgtactggggaaaactgatatcctttctacttactccaggtaagtggcagataaatctctgggaagttctggctcaggcattcttctcatcagtaattacaaacctaaaaattacgatctacatttgagtggaacaaaatggactggtggcacttctttcttttctttctctctctctctctctgttgacagccccatcacaaagtctctgcaaagctatgataacctcacggtaagtaacaaatcaactgcagccagcaagggttgattaagaggcgtttcatcactgcatggtgttaatgagcatttgctgttcttacctgtcctgcacttatatccccttctccccattcacctttgggcaacccctcttctctgtgcacttcaggggagccggaccccacatcctgaattaaggggtgagcacatggccctggatggaccaatcggagatggcctcatgactcaggtctgtccaatatgcatgaagccctgggcactgattggaactttgaggaaagagaatcactgttgtcctggtcttgctgagaggacacagtgtatttatttctttgagaggaagtctcgctctgaagtgcagaggtgcaatcttggctcactgcaacctccatctcctgggttcaagtgattctcctgcctcagcctctcgagtagctgagattacaggcacgcaccatgtttcccccagcttctggcttgctacactatggaatggaagacggatgcccaagaagaccaatgtaaggaaagcagagccaagggatggagacagagcatgccctgaaaaaataaggcaagcccatgagagttgagcagggctaaaaactgttttgtctctccttgttgtttgatagtgtttcaaagccctcagggaatgctgcaaatagcttctcaggctatgagaatttcagctcctacttttatgatcaacagagtaagggcatctaagaatgactttttctcaggctgtcacctccccacagcccagatgggcctatatttaaagatccgagtcttagcagtccaggggctatctgtcatcacagaccatctgtgggaccttaggtagggcaggtctgtaagtctaaatatcccctcctcctgagttcctgtcctgtcccctttgcctgaccttctccaactgttctcattagattatacttcatggaaaggggcatatatgccttatatgctggatggtaagctggggacaggggcctgtcatctctggtgtccacaggaagtcaactgaatggctgcatctgcccccattatcatctctgaaacctcagcataaggactagggtttgccatatagctggttctgaataaaatttactgaataaataaattaataaagagattgctccaaacagactgaaggtcccttgagagcaaatgtagacttctgtaaatctgatcttctaacaggaagatcagaatagcagaatactttgtatctaccagagattctctgtatctaacagaatgctctgtatctaacagagatacactgtatctaacagagaccgaaatatatttgttgaatgaagacagatgccccattagcagtaaaaagtaattttaaatccacttacaaccaactggtactatttgtaattcaccctggataggaggatgtatatttccctctttccttcttttttttttttttttttttttttttttgacagagtttcattcactctttttgcccaggctggagcagagcgcaatggcatgctctcaactcactgcaacctccgcttcccaggttcaagcgattctttcttgctttcttaaagccctactcagatataatgaggccttggcctgtactaggtcttccaatttgcattattgatctaaaatttaacttacacagtcaatttcttaatgcaagttatcagaattggtggagaaaaatgtgaattacaactgtgattcgagaacccaccacattataactatatatatatatatatatatatatatatatatatatatatatagatacatagatagatagatagacagacacacacacacacatggcaaatgggcccacatacaacatgttttagaaattgtgatattgcaagtggagcctcacgctgagatctgagattgttcttccatagtctccctgattcccaaacacgtagttgcaatcagactttttttcctaaggttaaaaggacaaatgcttgcaggtatatatgcaaaaatacatacacagtcaatcacagatgaaatacaaaactaaaaaaaaatctgcagaagagaaatggaatttgagtggctttctttttagtcttttctttttatacagctatgataccttttacaaaatatttatttatttatttatttatttatttttagagacagggtcttgctctgtcgcctaggctagaatgcagtggtgcaatcatagcttaccatacattaaaagtatcctcttacctaattttatatgtatgtatgtatgtatgtatgtatgtatgtatstatctatctatctaccttaccayacattaaaatcttacatttctacacgtgcaggactagaatgaacacacataaagcatgataccaatctgcttttttggccaccatataaacattctatgctaaaatgtcaagttgtttcattttacttaaaaaatgtgaatgtgaaatgatttaaacattcaaaaaaaaacttcgaatatcaataatttcacttaaagcttcacatcatatttgattaaaaccaaatatttatgaatcaataaaaatttcatactttcattattacttgtaatttatatttaaattttaatcaataacttttttttttttttttttttgagatggagtcttactctgtttcccaagctggagtgcagtggtgtgatctcgrctcactgcaacctccacctcccgggttcgagtgattctcctgcctcagcctccccaatagctgggattacaggcacgccaccacacccagctaatttttgtatgtttgstacagacggggtttcaccatgttgcccaggctaggttcaaactcctgacctcaagtgatccacctgcctcagcctcccaaagggcagagataactaatttttttttttagatggagtatagctttgtcacccaggctggagtgcagtggtgcaatctcggctcactgcaacctccacctcccaggttcaagtgattactcctgcctcagcctcccaagtaggtgggattacaggcacctgccaccatgcccagnnnnnnnnnnnnnnnnnnnnnnnnnnnnnnnnnnnnnnnnnnnnnnnnnnnnnnnnnnnnnnnnnnnnnnnnnnnnnnnnnnnnnnnnnnnnnnnnnnnnnnnnnnnnnnnnnnnnnnnnnnnnnnnnnnnnnnnnnnnnnnnnnnnnnnnnnnnnnnnnnnnnnnnnnnnnnnnnnnnnnnnnnnnnnnnnnnnnnnnnnnnnnnnnnnnnnnnnnnnnnnnnnnnnnnnnnnnnnnnnnnnnnnnnnnnnnnnnnnnnnnnnnnnnnnnnnnnnnnnnnnnnnnnnnnnnnnnnnnnnnnnnnnnnnnnnnnnnnnnnnnnnnnnnnnnnnnnnnnnnnnnnnnnnnnnnnnnnnnnnnnnnnnnnnnnnnnnnnnnnnnnnnnnnnnnnnnnnnnnnnnnnnnnnnnnnnnnnnnnnnnnnnnnnnnnnnnnnnnnnnnnnnnnnnnnnnnnnnnnnnnnnnnnnnnnnnnnnnnnnnnnnnnnnnnnnnnnnnnnnnnnnnnnnnnnnnnnnnnnnnnnnnnnnnnnnnnnnnnnnnnnnnnnnnnnnnnnnnnnnnnnnnnnnnnnnnnnnnnnnnnnnnnnnnnnnnnnnnnnnnnnnnnnnnnnnnnnnnnnnnnnnnnnnnnnnnnnnnnnnnnnnnnnnnnnnnnnnnnnnnnnnnnnnnnnnnnnnnnnnnnnnnnnnnnnnnnnnnnnnnnnnnnnnnnnnnnnnnnnnnnnnnnnnnnnnnnnnnnnnnnnnnnnnnnnnnnnnnnnnnnnnnnnnnnnnnnnnnnnnnnnnnnnnnnnnnnnnnnnnnnnnnnnnnnnnnnnnnnnnnnnnnnnnnnnnnnnnnnnnnnnnnnnnnnnnnnnnnnnnnnnnnnnnnnnnnnnnnnnnnnnnnnnnnnnnnnnnnnnnnnnnnnnnnnnnnnnnnnnnnnnnnnnnnnnnnnnnnnnnnnnnnnnnnnnnnnnnnnnnnnnnnnnnnnnnnnnnnnnnnnnnnnnnnnnnnnnnnnnnnnnnnnnnnnnnnnnnnnnnnnnnnnnnnnnnnnnnnnnnnnnnnnnnnnnnnnnnnnnnnnnnnnnnnnnnnnnnnnnnnnnnnnnnnnnnnnnnnnnnnnnnnnnnnnnnnnnnnnnnnnnnnnnnnnnnnnnnnnnnnnnnnnnnnnnnnnnnnnnnnnnnnnnnnnnnnnnnnnnnnnnnnnnnnnnnnnnnnnnnnnnnnnnnnnnnnnnnnnnnnnnnnnnnnnnnnnnnnnnnnnnnnnnnnnnnnnnnnnnnnnnnnnnnnnnnnnnnnnnnnnnnnnnnnnnnnnnnnnnnnnnnnnnnnnnnnnnnnnnnnnnnnnnnnnnnnnnnnnnnnnnnnnnnnnnnnnnnnnnnnnnnnnnnnnnnnnnnnnnnnnnnnnnnnnnnnnnnnnnnnnnnnnnnnnnnnnnnnnnnnnnnnnnnnnnnnnnnnnnnnnnnnnnnnnnnnnnnnnnnnnnnnnnnnnnnnnnnnnnnnnnnnnnnnnnnnnnnnnnnnnnnnnnnnnnnnnnnnnnnnnnnnnnnnnnnnnnnnnnnnnnnnnnnnnnnnnnnnnnnnnnnnnnnnnnnnnnnnnnnnnnnnnnnnnnnnnnnnnnnnnnnnnnnnnnnnnnnnnnnnnnnnnnnnnnnnnnnnnnnnnnnnnnnnnnnnnnnnnnnnnnnnnnnnnnnnnnnnnnnnnnnnnnnnnnnnnnnnnnnnnnnnnnnnnnnnnnnnnnnnnnnnnnnnnnnnnnnnnnnnnnnnnnnnnnnnnnnnnnnnnnnnnnnnnnnnnnnnnnnnnnnnnnnnnnnnnnnnnnnnnnnnnnnnnnnnnnnnnnnnnnnnnnnnnnnnnnnnnnnnnnnnnnnnnnnnnnnnnnnnnnnnnnnnnnnnnnnnnnnnnnnnnnnnnnnnnnnnnnnnnnnnnnnnnnnnnnnnnnnnnnnnnnnnnnnnnnnnnnnnnnnnnnnnnnnnnnnnnnnnnnnnnnnnnnnnnnnnnnnnnnnnnnnnnnnnnnnnnnnnnnnnnnnnnnnnnnnnnnnnnnnnnnnnnnnnnnnnnnnnnnnnnnnnnnnnnnnnnnnnnnnnnnnnnnnnnnnnnnnnnnnnnnnnnnnnnnnnnnnnnnnnnnnnnnnnnnnnnnnnnnnnnnnnnnnnnnnnnnnnnnnnnnnnnnnnnnnnnnnnnnnnnnnnnnnnnnnnnnnnnnnnnnnnnnnnnnnnnnnnnnnnnnnnnnnnnnnnnnnnnnnnnnnnnnnnnnnnnnnnnnnnnnnnnnnnnnnnnnnnnnnnnnnnnnnnnnnnnnnnnnnnnnnnnnnnnnnnnnnnnnnnnnnnnnnnnnnnnnnnntaggaaatgtgcaattaatggagccatgtctccggaaataaaatatttttaattatagggagaatattttaataaatgagcagctcagcaagtcataattgtcacacaattaacagattttcctacatcatacttacatacagtatgagctgcatttaaatatagttgtttttctgggaaacaaagtttgtgagattttatatatatagtctctgatgttttttaggagaaataaaaaaatattggaaacatactcagttcctgtttctagaaagaaaagaaaatcctatgcaagagagtggctatttgtcccacgtcacataaatgagatagtaccagaatctaagtcttagaaggctaagagttttgaaagttatcaaatcacttttccattcaaagcagcagagcatgagtgataatcgtttcaaatccttccaaaagaataaagaatctgggatctaatttttcttttttttaagcctcccaatgcagaaggaatggagatggaaaaaaccgctgcggtagacatcagattccattccttggttttaattgcgtggttgcagtggggaatgaggagagtaaacagcagtgcctcccacggagctccctgcaggttctccttgtaggagtgagattttgctggtgatttatattgtttgagasatacccaaagagtcttgtgtcactcaatccccagctccatccctggctcggaggagcctgcaccgcctcacgggagcctgtaactgtcaaatggcattccccgaatccatcaatactgtttgctgccaaataaataccctgctgctctacaggttgcaaatatttcaatcattgtgcagatctgcacaaacttggaaagaaaactcatgcaatctcawggccttatttccccttcctacataagagaaacatacatgcctaaaccttcactttccaaatgtttactagaagattagaaaaacaacagatgacaggcaatgtgtcagcctagaagaatcacaaaaatccttctttaaacaatctagtagccagatgaagaccccacgccacgagcctgtatgtggttaagaagttcatggggcgaccccattccttctgattgctgcgaaatgtaaaagacacggcctcaagtccaaagcctaatgtgccattaagagtagactgccttggcctcacctgaagcaaatgcatctagacctgtctgactctttgactcacagtgcaggagattagggattccctgtatggttgttcagtctgtacactgaacaactcagttggtcaacatttacatagactacgaaatgatagagacttctacaggtatgcaatcacagatgacagcttgtgtgattctaaaggggggcgtctgaggcaatctactaccattcaccaatgttctgctctactctctgttcatgtttctgtacatcaaccattcattcagtcattcaacaagtattcactaaatgcaaatgaaatgtcagtctcatccaatccttcaaccaccttatttggcagacactattcttcccattagtcccatttagcaaaggacagtttgctaatgaccctctcctggcctcagttaattgaggccaggagagggtcattacattgcctaggagggtcacaaagctctgtcctccaagtctgagtccagtacatttctctcctggactgagctacccagtttattggagcaaaaatttcctttctcaccaatgaatttaagagtcaagttctcaagagaagctggaaggtagggtcagagagattacagtgagaagtgaagcggtagaggccagtaggtttagaaaccagtgctgtgggctgacagggrgtgacaatttccagctttggttctcctcatttaggagagacatgaagtctcatggtgtggtagacaggccacacaagactggaagtctgaagtgtgctcacttcatggagtaaatgtgtagccttgaatgagttacttttttttttttttttttttttttgagatggagtcttgctctgtcgcccaggatggagtacaatggtgcagtctaggctcactgcaacctctgcctcccrggttcgagtgattctcctgcctcagcctcctgagcagctgggactacaggcacatgccaccatgcccgactaatttatgtatttttaatagagatggggtttcaccatgttggccaggctggtctcaaaccccttaccttgtgatccacctacctcagcctctcaaagtgctgagattatgagattacaggcgcgagccactgtgcctggtcgtgatttactcctttctttgaactttaagttcttcatcaataaaatgagaataataagacctcataaagctactgggaggagtacatggatttataagaactagaaaaatgtctggctattgtggatgttcaataaatgatgggtattattattattgactgttcttgggatgtgttctacttgggtgtgtctctggcatctcaagtgtacgtattttcctaagtggggtgtgtgtgtgaaggaagaagatgcccttcttttgtgcctcgccttccccaaaagacatcaggagagtaaacatgccccctatagtgccaagagagaaaaatgtaaattcttttggataaattagcttttgcagctacctctctctttgctatgacttctgtttctcctctgcttaagcaacaaagagagaagtaaccgcaaacgctaatttatccagcggaatttacatttctctttctcggcaatatagtttcttagtgtcttccamgtttttaaatcctttaggtttattcattatgttcctttttcctgcttctaaaaggtagctgttcttgcccactgttttggaagtaagaaaacctaggagctgttctgtaagctcataaacatagtgtgccagaaactgactagaaggacagcagggggacgggggatctgaatgtgccaagacagttatacccttatgggttatggcaaacattaaatggtctagaaaatcagaggccttggaaaagacttgtaaaaataacaatgtgagaacttagcataaaggccaggaacatgaaaggggaagccatgggtggcacatgttggaaactgtgctggaaacacatcctgaactgctcttgcaaagtgaggcctcttaagcagttcctgcaatcctcctcccagccctccataccaggcagaccaagatgtgctcccagcctctgggcagacagtgggttttcaacaaccctgactggggctgaggtatgagaggtgcatatcagagccccaagagggctcttagaaagggaagttggccagatgtggtggttcacacctgtaatccgagcactttgggaagatgaggcaggcagatcgcttgaacttgcgagttcgagaccagcctgggcaacagagtgaaaccccatctctaccaaaaaatataaaaattagccaggcatggtggcagtggcatgcacccgggtgctcaggaggctgtggtcccagctacttgggaggctgaggtggggaggatcacttgagnnnnnnnnnnnnnnnnnnnnnnnnnnnnnnnnnnnnnnnnnnnnnnnnnnnnnnnnnnnnnnnnnnnnnnnnnnnnnnnnnnnnnnnnnnnnnnnnnnnnnnnnnnnnnnnnnnnnnnnnnnnnnnnnnnnnnnnnnnnnnnnnnnnnnnnnnnnnnnnnnnnnnnnnnnnnnnnnnnnnnnnnnnnnnnnnnnnnnnnnnnnnnnnnnnnnnnnnnnnnnnnnnnnnnnnnnnnnnnnnnnnnnnnnnnnnnnnnnnnnnnnnnnnnnnnnnnnnnnnnnnnnnnnnnnnnnnnnnnnnnnnnnnnnnnnnnnnnnnnnnnnnnnnnnnnnnnnnnnnnnnnnnnnnnnnnnnnnnnnnnnnnnnnnnnnnnnnnnnnnnnnnnnnnnnnnnnnnnnnnnnnnnnnnnnnnnnnnnnnnnnnnnnnnnnnnnnnnnnnnnnnnnnnnnnnnnnnnnnnnnnnnnnnnnnnnnnnnnnnnnnnnnnnnnnnnnnnnnnnnnnnnnnnnnnnnnnnnnnnnnnnnnnnnnnnnnnnnnnnnnnnnnnnnnnnnnnnnnnnnnnnnnnnnnnnnnnnnnnnnnnnnnnnnnnnnnnnnnnnnnnnnnnnnnnnnnnnnnnnnnnnnnnnnnnnnnnnnnnnnnnnnnnnnnnnnnnnnnnnnnnnnnnnnnnnnnnnnnnnnnnnnnnnnnnnnnnnnnnnnnnnnnnnnnnnnnnnnnnnnnnnnnnnnnnnnnnnnnnnnnnnnnnnnnnnnnnnnnnnnnnnnnnnnnnnnnnnnnnnnnnnnnnnnnnnnnnnnnnnnnnnnnnnnnnnnnnnnnnnnnnnnnnnnnnnnnnnnnnnnnnnnnnnnnnnnnnnnnnnnnnnnnnnnnnnnnnnnnnnnnnnnnnnnnnnnnnnnnnnnnnnnnnnnnnnnnnnnnnnnnnnnnnnnnnnnnnnnnnnnnnnnnnnnnnnnnnnnnnnnnnnnnnnnnnnnnnnnnnnnnnnnnnnnnnnnnnnnnnnnnnnnnnnnnnnnnnnnnnnnnnnnnnnnnnnnnnnnnnnnnnnnnnnnnnnnnnnnnnnnnnnnnnnnnnnnnnnnnnnnnnnnnnnnnnnnnnnnnnnnnnnnnnnnnnnnnnnnnnnnnnnnnnnnnnnnnnnnnnnnnnnnnnnnnnnnnnnnnnnnnnnnnnnnnnnnnnnnnnnnnnnnnnnnnnnnnnnnnnnnnnnnnnnnnnnnnnnnnnnnnnnnnnnnnnnnnnnnnnnnnnnnnnnnnnnnnnnnnnnnnnnnnnnnnnnnnnnnnnnnnnnnnnnnnnnnnnnnnnnnnnnnnnnnnnnnnnnnnnnnnnnnnnnnnnnnnnnnnnnnnnnnnnnnnnnnnnnnnnnnnnnnnnnnnnnnnnnnnnnnnnnnnnnnnnnnnnnnnnnnnnnnnnnnnnnnnnnnnnnnnnnnnnnnnnnnnnnnnnnnnnnnnnnnnnnnnnnnnnnnnnnnnnnnnnnnnnnnnnnnnnnnnnnnnnnnnnnnnnnnnnnnnnnnnnnnnnnnnnnnnnnnnnnnnnnnnnnnnnnnnnnnnnnnnnnnnnnnnnnnnnnnnnnnnnnnnnnnnnnnnnnnnnnnnnnnnnnnnnnnnnnnnnnnnnnnnnnnnnnnnnnnnnnnnnnnnnnnnnnnnnnnnnnnnnnnnnnnnnnnnnnnnnnnnnnnnnnnnnnnnnctgtgttgttctaaaccgacctttactccttattgccatttgtaatgcatgcataattcaatgctgaagccgagggagaaataaggatgttggtctaagtggccctttttgggttgttttttgatgatttgctataatcctataaataatacaaagcttgtcactgtaaatatgtattgtgttatctagaggtatattcagtggctaaaacaataaaagctcgtctacgtctcctggcaatctcaaggcataattaatcgctggtaagatgtattctagaacgtgagagcccttaagtagaaggaaaaataaaggccattgtcaacacaaatgctaaaagaaatgcctaacgggcatagtcatttgccatctgggaaaagtgtttgctagtgtacttgtttggaaggcaagaaggatgattcaaaagggatttttgttcaggtggtgaagaagtgtgtgtgtctgtatgtatatacatacccacgtagtttttaataaattataaatcaagatgtttaccaagctaacttgtcaattttaactcatttctgttatttgtttacacacacctccatctgacaaatatatacaaaacaatgtatgtgtatgcacatatacatacatatgattttttttaaataaagcataaatcaggaggtgctcagagctagcttctgtccattctaacccatctgctatttgttcacttgcacacactcactgtgcaataaaccctttcaatgtgggagacaagtgcaagatgcccctctttccccaaagggcacctctgtgtgctccctcagatcatagctgatgacatgtcaatgaaacggtgcttgctctcatcccagagatcaaaatgagggcttaacctgcaatttactttacaagtcccatgacacttgccagatctgaagacttcattctaatcttccctgttgaaaaaataatcaaatactccaacaaagatgtattgacaactcttaattaaccatgctaatggagggaagagatagcatggataaatgaaatccacacataacccaaaaccttccttccccattaatttccaacttcttgactaaaccttactgagataagtgggtggggagtagggagaggctgactaatcctttaacgatagaattacttgatgtctacatctgtactatgccaatcagctgttggacaaggtaacaagcaaggaagtggccaaggacaccatgtgttcccaaagcatcggggttcagcggtaatgtttttgaatcttctcgggtgtaagtaaatatatttcagacagcttttagaatgaagttagctagaagarttttgcagcaatagaagctgatttgatgtagaccttcaggtttcttatctatttattggtgctgctcagttggatgggaaagagaggagaagctgagagacgcctggcacctgtacagagtgaaacaggcaatgctgtgtaacgagcagttgacagcaatgaataagggttgcagaaatggcaaaagagggcaccaaattaaccaaagcctagggaagatgacgaagccagagtattcattaagggaccagatgaactagcatttattgagcaccttctgtttgccagggcatataagaacatactgtgatgaggcaccatgaaatacgacctttgaacagaaactgggtaaaaaacaaaagtaggcttcctcctcctcctaacagcatctagtgcagccacattagatgggaagagccagaactaggcaagttattccactccctgatcctcagctgcctcggttgccatctctgcacctgcagggtgaacacaccccaatagcggtaacgtaagcatacccttagaatgatcctgtgtgggagatgcacctgaatgtgtggtccgggctggggaatccaggagtgaccaacccagagatttgtcccttatatataacagacatctgtgccccatgcctgtcccgtggaacacaggccaaacagaggattgaggtcctgagtttggagttaaatgaagattgccaggtagaggttgttagggggagggtgttaagtgaaggtgtgatataaaccacatgacatttgcaggtggttatggttttcctgcccagcccaccgccaccactggactgtagggaggtggatatcctgtccagcctactgccactggaccatttctgtatgtaaggtgggcagttgtactatccagcccgccatcactggactctctcccctatatgtaacctcctaataaaaccccatgtctatctgttggctctgagtgtcttcttcagctcttgaacctggtgcctttcctattgaggttaataggggttcagcatgacagcacctccacctcccatggcacagcatatgtacccaataagcagtccttacaataccaatagtttctatctgttgggcactgccaattagccaggcatgtcaaatggaagatctcacttaatcttgcmaaaaaaaaaatgttgttcgttgttgttccttctattacagaggaaaaaacaaaggcagatggaggttacattatttgcctaaagttacacagctagaaaggagcagagttaagaatcaaaccccggccatccagctccagaaccgagcttgtgaccctggcatgggtatttccggagctctcgctaatgtgccagatagacgttgtgctaaagaaatgatctgtgtgtgttttctcatttaatatccatacagccccctaaattggagattactactgttacacaaatgaggaaactgatcttggagagggccagtcagctgccaaggtcacagagccagggagtgggggtggcttgcccaaggccaggtctgtccctccaggtgaaggtaatgattaagaacacaggtctggagtgggtttgaatcactgtgtgttcagccgctcactggggacctggcctcagccctctgaytactgcagggctttattactttctgagttctctttgctatctcactcgccctttcctcccatttctccttctggtgccccttctccycttccaggcccccagcccccagcccccaccccacagccatctctgtattaaatgtttgtggaatgttcaccgttcaaaagccacgttctagtttgaggctttcaattcttgggaagaaaggggccatataaatacaaaaaatcaagtccgaaatgttgttgaaatgatcattttggtccacctaagtttatacaaaaacattttccatgctctgatctccccacttgcactgttgggtagcccaagttccagatgaacggccttctcacctgcatgctgaaaccagccgaggctgctgccacattaaaaactcagcccaggctgctcctgaaaatgtttctgccctcagagccacgtactaaaaattaaggggattaagggaactctagatttacatttaaaataaaggagaaactcattggagaggctaatgcggcgtgcactggaggtagctactatcactaagcattaagataaacaatacgagtggcattctggyccacgcctggcaaagtgcaggagtccctggaggaaaaggaatgagagtgcatcagcgacctcgtgaggcagtgcagctttgcattaatgcctgcagctctggaggcggacttcctgggttcacattcacaacacctccaccgccaccactccatgagcttgggaaagacatttaaccattccatgccttgtcatctataaaacggggcatgacgccagacacggtggctcacgcctgtaatctcagcactttgggaggtcgaggtgggaggatcacaaggtcaggagatcaagaccagtctggcctggtgaaactccatctctactaaaagtacaaaaaaattagctgggcatggtggcacgtgcctgtagtcccagctgctccggaggctgaggcaggagaatcacctgagcccaggaggtgaagcttgcagtgagccaagatcgtgccagcctggtgatggagcaagactctgcctcaaaaaaaaaaaaaaaaaaaaaggccggggggcataagtacttcctcagagggttgtcctgaggactgaatgatgtcatttaattcacattgatatggtttgaatctgtgtccccaccaaatttcgtgtcaaatttatttatttattttttgaaatggggtctcgctctgttacacaggctggagtacagtggtgcgatctcacctcactgcaacctccacctcccgggttcaagcaattctcctgcctcagcctcctgagtagctgtgactacaggtatgtgccgccacgcctggctacatttttgtattttagtagagatgaggtttcaccgtattgtgcaggatggtctcaaacgactgagctcaagcaatccacctgcctcggcctcccaaagtgctgggattacagagtgtgccaccgcacccagccttcatgtccaaatgtaatccctaacgttggaggtggggcctggtggaaggtgattagatcatgcggacagatttctcatgcatggtttagcacgtatgctgtgtggtgagttggctctcctgagatctggttgttgaaaagtgttttgcacctgcccccttgctccctctcttgctcctgtttgcaccatgtgagatgctttccttcccctttgccttccaccatgattgtaagtttcctgaggcctccccagaagccaagcaggatgctagcatcatgcttcctgtacagcctgtggaactgtgagccaattaaaggtgtcttttaaataaattacccagtctcaggtatttctttatagcagtgcaagaatgaactaatacacacatagaggatggagcactctgcccagctcatgccaacactccatcaatgttagtacttagcatcagcattatgttgcatagctgatgattcatatacacattactccctgcaatcaatgcccaagccttgcaagatatgtgcttcaatccccactttacagagggctatggatcgccaaggctccacctgcagttgggttctacataagtgtcctctttcctcacatcttcagtaaagtatgagacctccatcaatgcctgcttgggtgaggagcacaggtgggtgaaaggtaagggaacaagtggaactccatatccaaggtaggcacagtgtggaccagaagagcatccctaggacagtgaggtgatccacggactgacctgccccaaggccagagacgcaggagtggaaagtcacatggaaccatgagcttttataaggggcagggggcaggtgttgggaaattgcagaactagtgtttgagcagatgcaacagatccgaaggaaatagagattgcagttgaaatctgggtccaactggccctatcagctgcattcatgtgttacctccctggtcagctgtaccctccttcaggattaggactgcatccttaccaatgctgagtcctctgggatccccagaggcatcttttgcacccatggcaaaaaaaagaaaggtgggcagcagcaatgagaaccatgtccactaggtgcaagtaataacgggtgcattgttcgctaaggacttaaaagtattaataaaagtgaccaaagtttaactgctttttatcatcaccatgcttggtgattccaaacaatgtcagtgaaaacagattcctcctgctggcaggggggcggccacacccatcacaccccctcttggcaccgccatgattttacacactgcactcaacaaatattctctgaagggctgaaaaaaagggggctggggaagggcagaaatcctgttgatttctgagcagcaaacacgtaaacataactgacattaagatatacaaaatacatctttcaaggaaagatgtgccattctttcttgtgtgaaataaaaacacctccccatgcaagattccaactgcacagactgatactgctatggtctgactggaaacaggacatcttgcattcttgtggctccgaaaatcactctggggtccaaggatttatttcctctctcgggagtcagggacagataataaatacccctcatcagctgatcaattgctcgcacttccaggcaagcacccakcactccccaccaaacacaccgccccacgccacctgaacraggttaaaagaacggactcatgactgatggtcggggggaactggcttcagaagaggaagttgaaaatattaagaaatcaacacgggcatttaaaagcaaagccttttccatgccacagaagacgttttgctattcatcttgttccctgactctgcttcaccaacttgatggaagatggtttaactgacataaaaaccagctatacatgaacagcggtgattgatggaaccattccaaacatcagccaaaaatggcactgaaagatgccttgggcttcctgttaactgttttatgaggggaccaacaggtttcccccctcttctttaaagaatatattagcagtacaagtactttcaaaaacagggtagtgttataccaagagagaaacagaaggggaaaaaaaaggtaggaggtcttttgcatgttagtatatgtatgaagggagttaggacctggcaaactgggttatatgaggctttttccatacacagctctttggtttcacggtacatgatttaaataggttgtatttaattccatgtaataacaaactgtgccattaagtagttctcctgtacaaatgcaatgtttcaatggcaacagaaagaaaatccagcctttaaaaaatgcacagatgctccaaatgagccatgataaagaaaggggtggggagcgggatgatctgcaaaaaagaatgagggaaggcagatttgtaccacttgtgctaaagcgtggagccttaccattcagggagaatgagacgtttgcaaaatggcatcctagtctttgaatgcttcttaatatggaacggacgagaacagaggtggcaagagggttagaattccccctctttgttctcctttctggaatggagaggaccttttcctgcctttctttgctcttattttgaagaggttaattatgacctggaagcgcccaggcacttgggtctcagctattgtcgaggaagaatattgtctgcgctgtaccgcaagaactaacttaggaaacattcaaatttggaactgctttcagaagcctcaggaccgattccatgtggtggcattctatgggatgacaaatccccactccgttcccactacttgtctttgaagacatgcacattagtgaggcagaaaattcactcgactttaaaataaaataagctggttatttggcccatctagaatacattcgtatctcaacatttcaaatcaaaaggcccacttattcctgtcctcatcctggctctgaagccaagctcaaggtgctctcaattacatggtagatttctggcccaagttaatatgtatcaggacttctcaagcgtttgtacctttgacctagaaattctacttctggcaaatcaatcccatagaaataattttaaatgggaaaaatgctttagaaccaaagatgttcgtggccatggaaatgacgactgaaaagagttagtgacaacctaaaaatacagttagaaggagaatgatgaactaaaccgtggttcctctcattggtttactaacatgtccccattcaaagcactgttcaggaccgtctagaacaacctggaggcatgcttttaaaatgttaagagagaaaagaaactattatccatatgggataattaacaatgtgttaaaaatatacatatctctggaatatttgaattgcaggaggagaattaatttagagataacaagcaaatccatcacgagtacatatgccacaattgtaacaaaacaaaataaaacaaaatggcctgggcatttgaaactactgtaagaatatgtgccaaaatgctaagagtagatatatattggaggattttctttttcaatctttttttcaactttggagtattttcccttttttatgaatatgtccctattgtgtatgagaaatagctaattttaagaagaaacagaactccaagggggaaagaaaacacttttttttgctcctatgagaattcactggataagggctgtacatttcgggcccgcctacttcattccacaggaattagtaactgcaggtgcaagtgttgctactgctcgaaggctaagccctgataaggcctggggaggcccagagactaacaaatgggtttcttccaggactttgctgctgattgatcactgcacttaatcctttccagagatagttactcaaaaggaccaggaaaggtaaatttaccaacgcaggccaacgtgactaaaaatagaaccataaaaatcttggggagatgcaatgtggcaagaccatggtcttcattaaggcagggctgaaggtggaatcctattccagatacttcacagcttagatcttttgccaagcctctcacagtctcaaattccccatcatcagcaggagtcataacagattgcaaggaggtttaaatgaggcaatacatgaaatatgccataaacggcaatttatcagcatctatgatccctaacattaaacactgaccacttccttatgtgccagacacaaagctgagcacttcacatgtactgcttcacatactccgagaattattttatttaacccccatcgggaagagactattatcatctccttatcacccacagggatgctgaggttacgaggtatcaagggacctacccaccattgcacaggcagaamacaggagagccaagactgacacccccagcaggaggtgttccagccaccttggacaccttccaccacaggctgagccgcagtgaagggctttcagaggggcagtccacactggacatcaaacggtagagtggagattgggtcaaggacaggagcttcattatcttaaatgaattaatgcgggaagagaaaaccaactaccacatgttctcatttgtaagtggaaactgagcattgagtacacatgcacataaagaagggaacaataggccaggtgcggtggctcacgcctgtgatctcagcaccttgggaggccgaggcaggcagatcactcgaggtcaggagttcgtgaccagcctggccaacatggagaaacactgcctctacgcaaaatacaaaacttagccgggcatggtggtgcacacctgtagtcccagctactccggaggctgaggcacaagaatcgcttgaacccaggaggtggaggttgcagtgagccaagatggtgccactgcattccagcctggaagacagagtgagactctgtctcaaaaaaagaaggaaacaatagacactggggcctactggagggtagagggtggaaggagggagaggaccgaaaaagcacctattgggtaccatgcttctgacctgggtgacaaaagaatctgtataccaaacccccatgacatgtcatttacctatttaacagccctgcacgagtaccccagaaactaaagttttttaaaaaatgaaaattaataaaaattaaaagaaatcacagatgtttgcatatcacatcagttactgcagatatttcaaaatatcatttacactcaacactactcaaaagtataggtgttagtagatacactattacctcttgtgatttaatgtactatagaagaaacgtgtattactatagaacaataaaaatgttgatatttgtatttcaaaaacaaaacaaaggaataagggcttccaaactttaaaatgcaagagagcatcatgggatgacagtggaagaatggacctgggtgagaggaggctaggatggggagagggaagggaaggctcacatgtctctttttttgtttttggttttttttgagacagtctccctctgttgcccaagctggagtgcagtggtgcgatctcagttcactgcaacctccacctcccaggttcaagcaattctcatgcctcagcctcccaagtagctggaattacaggcgcacaccaccatacccagctaattttgttatttttagtagagatagggtttcaccatgttggcyaggctggtctcgaactcctgacctcaagtgatctgcctgcctcggcctcccaaagtgctaggattacaggcgtgagccactgtgcccggctggctttcatatctcttattctttctgcttccgctctctcctgtcccctattagccatgggttccagagaggagagaaggctcgggagagcaggggactcaggaggtcaccctgctaccctcacctttttaataaccctcctcaaaccctggttccacgtctccctcactcaaggatttatgtctcattttcaatggaatgttacatttggtcagaccacgaagaaaactcctcattatraactaggaaatgtgtggagagagaattatttacccaaggcagtgctcaatcagtgttgcccgaatatttatttagcccacacacggagaagttgtgttaatgtttgccaaagaatgtagctttataaagtaactgggtcaaaaaagacagcatatcattttacaaataactttaaaattgcttaagttaaatagctgggctctctcaggtttgtcttttcaaaaacgctgcagaaacaatatccagaattatgtctaataaaatacaggtattacaaagtggctgtttagcccattaaagaaaatggagagtgaaatctgaattatttctacccgaggcagaagcagacaaagttaccaaaattatgttaggccgacgtcgcaattcttcaagtctgcagggcggcaaggctaacagctcctgcaccaagactctattaggagagctgtatttttcagtcaacaatgacaggcattccatttctcagcctcaaatctagtgtagctatggggaattcacccaaaacatttgcttttgctttatcagtggcatttgtctgcctcaaaagccttgtgagggagagggctactacgtgacgctgccaggcaatgctgttggaggcagctgatttgatggacaagaaggggagcagtgaccacctgggtcactctgactccgccctctctgagccaagtgaatctgagcaatgatgtcataataatcatcaatagcaacagtggctgcgcgtgaggggcgtggtggttcacgcctgtaatcccaacactttgggaagcygaggtgggcagatcatttgagctgaggagttcaagaccagcctggacaacatgctgaaaccccatctctactaaaactacaaagaattagccaggcatggtagcacatgcctgtagtcccagccactcaggagcctaaggcaggagaattgcttgaacttccccagcttcaagaggaagagtctgcagtgagccgagatggcgccactgcactccagcctgggtgacaagagtaaaactccctctcaaaacaaacaaacaaaccaaaaaaacaaatagcaacagcaaccayaatcatcatcaccatcaaggctggaacaaggatgaggcaggcaggctctgatagcaacaggaggaagcagaccaaggagggagagaaaggaaggcagagaaggggaaaaaaaaacacaaatgataataatagatgctgacatttacggagcacttactatgtgctgggaaccatgctgacggcacaccgaatccactgaacaggtgggtaagtatcatgggtcaatatcattctcattttaatgttgacagtcacaagactttcatctgtacaatgggggtactgctggctcccaaggccagtgttggtggaatacagtgaatagaggtgagtaccgtgtgacaggaggctgcatcagtaagcaggggcagccagccaggtgaggaacatgcccactgagatggaggtcaggacgttgagagatccccaaattgcaagttgtcatcctgagacaagcgataccttgctggacactaattcattcttggagtctctccctctcrgccctttggcttcatgttctggagagaatgaccagagagacccatttactcaacgcttctcaatgagacagggatcttctaaagggcactgtcttatatagatccttgcacctgcaatacctgcctggcccagcctggccctcgcaggttcttgtgaaatatttgcttatgagtaagcaaatgcataacacgagacggctgctctggaatgacagttgcgaacacaggaggctgctgagacttccagagactgtagataaagaacaaagaccctgtgaagttcctccgggaaaccagatgtggcagtgtgctagggctgccctagcgtatcagcacaagctcaacagaaactgactctcacagttcaggagaccagaagtctgaaaccaaggtgttggcaggggtgactccttgtggaaaccgtgccaggtttctctcctcgtttctgggggctgcccatgaccgtggcatctcttggcttgtagacgcatcactccaatctctgcctctgacttcacagagccttctcctctgtgtcctctcctcctttttctgttttgtcttttggtgttattttttttttaagagatggggtcttgctatattgcccaggctggcaatgaactcctgggctcaagtgatgccccctccgcagcctcccgagtagctgggattgcaggcacacccaccactgtgccccctgctttcctcttctcatgaggataaccgtcattggatttagggcccactctaaagcctgaatgatttaaccttgagattcttagctaattacatctgcaaagaccctgtttccatataacgttacatctgtgattctgtgtgggtgtggattttggggagacgctattccacccactacccttacactgcaactcacccacactgacagcttcccttgcctgtgtctgtccaactggcttagaaccggagcatggcatcgtcaccatggactttgagaatgtataaagacaggtgcctggtcccattccctgtgagtcttgaggaaaaaagaaaagtgagcttcaaaaactagaagagccagcctggtgtggtggctcacatctataatcccggcattttgggaggttgagactggcggatcacctgaggtcaggagttcgagaccagcctggccaacaagtgaaaccctatctctactaaaaaatacaaaaactagccagacgtggtggcatgtgactgtagacccacctactcaggagactgagacaggagaattgcttgaacccaggaggcggaggttgcagtgagccaagatcgcgctgctgcactccagcctgtatgacaaagcgagaccctgtctcaaaaaaagaaaaaaagctagaagaaccaaatcactaatgcctaagcaagaacagaggggatagaggggcctgggaagcaaggcctgtaagatcccttgacaataacacaccagtcccatgagcaggaacacaaaacattatccctggacccagttctccatcagggtctcagcatgaatgaggctcttccttcctcacggggatgggaggaccaccctgctttctttgcccttcccaggaggaagggaacagcaccttccccatctctgccagcatctgtccatcaagagctggtcaacagcttagactcaggggatgccacagtccacattacagtgtcactgggccagggctgggagaagccgtgggagaaatgcagaatggggaggctgaggcaaagtcaggatgaaccaaaatgtaggtgagcaccagacacagtggccacctgaggaggaaacacacaacagctgagaatccacgggggatgcgtggccaggttagagcatcctggaatcaggcaggtacgaggagtccacgaagtggagaggtgatgcaaatctgcaggccttggggacaagagcacatcaaacccttgggggccgatgccttcagtattcctaattcctccatgttagaaaggtattttgggccaggtactgtaatcccagcactttgggaggccaaggtgggcagatcacctgaggtccggagttcgagaccagcctgaccaaaatggagaagccccatctctactaaaaatacaaaattagccgggtgtggtggcacatgtctgtaatcccagctactcgggaggctgcggcaggagaatcgcttgaacctgggaggtagagatcacggcragccaagatcacaccactgcactccagcctgggcaacaagagcgaaactccatctcaacaacaacaaaaaaagtaatttagcacatatactgcatattacaaaatacctttgcggggtttggggcaacatcctataacaatgacatttctatttcttcagtgaaaatatgattattcagcctggccaacatggtagagaaaccgcatctctacaaagacacaaaaattggctgggtatggtggcacatgcctggagtcccagctacttgggaggctacagcaggaagatcgcctgagcccgggaggtcgaggcttctctgagctgtgaacacactactgcactccagcctgggtgatgaagtgagaccttgcctcaaaaaaacaaacaaaacaaaatgaacattcacactagaaasgagaaacagggacgctaaagctgaagtcaaatttcaccaccaaataaatttgctataaatatacaataaatttgtttttgcttttcagatctctttgggttttggaataacaaaaaagggactgtacatggatatttccaagctggaaccgaggcactttctagacgaaggcagccttatccccaggaggtaaggtgtggaagtgagttgagggttgaggccagcaagactcagaccacagcctcctgctccaaacagccacatcacttaatctattttgtaaaccaggcttccctcaagggatctggtttaatgagagaatttgggagctacaaaaaagactgaaaattgttgttggacatcagatgctggcaaactttttttgtaaagggctaaatagtaaacaacttaggctttgtgagccaagaggcaaaaccgaggctattacagaggtatttacataacaggagagaaaaacaaatttctgcaaattttttattgatgaaattcaaaactttatgacactgaaatcagaattccatatcattttcctccttcaagaaataatattctcctctttattcttttttgcagatgattgaaaatgtaaraactrttctgagcctgcaggccatagccaaagaggtaccggctgtattttgtccatgggcaggagcttgtgactgctggtctaggtcattccaggtcaaccaggggcctctcccagagtgagaaccactggtgattccccagagtgggaccaagtgaaagcacttggctggatcagagggataggagcctggctgctcctaaaacaagacactacttgcctttgatgttcaagtcatttaagaaygcaattgcttcctactcaatttttcaaaaccaaaataacaaatacgatatgagccataacttagcaaaattacgtgttttaaacagtctctttcaaaaaacaatagattaaaaagtgcaatatttttaccccctcttaaattggaatcatggtatagcaggcaggatacaaacttctcatttccrttacacattttcagtgccatcattaatctgaatgayatcaacaaaatgcccaatgcacataaatcagtcagactttgaatcattcctgcagcctctgaacatttaccatggagctcaataagccaggcaagaacacagatttttttttttttttttttttttgagacggagtctcactctgtcacccaggctggagtgcaatggcgtgatctcggctcactgcaacctccgcctcctgggttcaagtgattctcctgcctcagcctcctgagtagctgggattacaggcatgcaccaccacaccggctaayttttgtatttttagtagagatagsgtttcaccatattgatcaaggtggtcttcaactcctgacctcgtgatcctcccatctcggcctcccaaagtgctgggattacaggtgtgagccaccgggcccagccgtaggaacacagatattatcatcatgggacaagtcatccattcycagattccatgaccctctctggtgtccactgtggatttcagcacatgtttaactatgaaactctagtcacgctttttgatatacaggttcatggttactagtgtcttatcctgcttgagccaagaatatgcactaacacattagacaaaccttgaattaaaatgggcaacccaccatccaaatggggaaagatgattacagacaagttcgtacgagtaaactacttgaaggcaattcctgtgcttaaaatggccacgtgaaaggtgtccctgacatggaaaggacaaaccatgaaatgacccttgaagctcttaakgtgtctgtcaaaaaagcaaagccaactgtcaaactgaaaagccaaaatcatcacaaaaacacctattcttcagaggcctcaaatctcaaactatctcccaccatcctttgtaagtatgtataaggaggccaggaaactagcatttgctgagactttattctcagctttgtatgctttgcataaatgatgtcatagaacacattgacagtgagaaaactaacgtattaacattttaattaccttgccctatcacgagattagaaagattcagatatgagacatccaaagtctgtgatctgaacaccagagtcagaggctggcaacctatggcccacgggctgaatctggcccactgcctgttcctataaataaagttttattggaacacatccgtccatttatatattatctgtggctgctttcctgctgtaacaggagagttgagaagttgcaacagagaccataaagcccacaaagctaaaaatattgactatccagccctttagagaaaaaggccatgcccaggctcctgtgggtacctgctatgctacagcccctctgctgggggaaaccagcccactcacaggttcccagtgaggcaggatctctgggcagttccttagtaattggtggctctgtgacttccttcccccaatcaccttgaccatctagtctggacaatatgagcgcccatgacgtgaggacagccttgtaaacagggtggcctggctggaaagccttgtccaaaaggcacaacagtgactacactgaacccatcccatgcatccttttgagagttagaaggaggcaattgcaagccggctgcaaaagaaaaaagacaccagagacttagaaaccagtgaagccacgctgaagatgcagacagagagctagagacaaggtcaggggcctctgttgcactccagacccggtccggaggcttttccatgcttaggggcaaggattgtcagggttctgctgtccctttctttaacctcctttatgattccccaagagcatcctgagtgcacctccactccctgccaccaggggtcagatgagccggcctggcaggcttgtttccctccaccagacaacagcaaggaccaagattggcaaagtgacacatcctctccaaaagaagaacatgcagaacaaatcaaagaacacaaaccacgactgacaaacacagccacactcgattttaaagtactgagctgtttgaagaaaggaagcatggcaaggccccttcctactaataacagtaacaacaataatactaaatattttataataattttaaattcttaattatttatgatatttccctccattaacatcacgaacatcattacgtgtgtgtgtgtatttttctcattttaaaaccagcagatgagagtaaaggatttctttttcctctcccccacctctttacaggacctactgttaagttttcaagaccacccagaaagaaatttgaagttgggtttatatccttaatccctcagttagaaaaaaaagaaaagtgaagaaactgcatctccaagatcctgctatatcaacttcagttttttgaagttaaatttgatttttaaatcccttggctgatgagacctgtgtgggttttttttttgttgtttttttgttttgttttgttttgttttatcattgtacctctattttaaaaatagagacttgtggttctttttccaaaagcagtccaacagaaagtgaatggtggtcaatgcataataaaatgagagttaccttttgacttggaagaattattagcattttgatttgatgggttcttagctcttcaaattcaaaaataccttattcaagtctaggagttttgcaaatacttcggttctaaagattaccctttttcgatgctttgaaaactaaaagggcatatcagaatagaaatctggctgttgaataacttgtaagctctgcagagacgtacaaaaacatggccactttagccagcagtgtggcgaaagtctggggcccacactacacacacacatatgaacttctcatgaccctcaagtatattcacatgatatatcacaaataccataaagcagcattgtaattacagggaggaattgattttaaaaggcctacatcaaaattaatagtcataaaagtataataacctagactggaaaatttagggattagagcattttgaacattatacctcaaatttataaaggctgtatattagcattcacaaaggtttttaaagatggaatagctatgtacacagtgaatttattctaaaatccagactcaaaaaaaaaatgaatatgaactcctccccaccgtgttctggactaaaatcaataagttccctttaggtaattaaaatgctggtcccacgacctgccatcctattcccaggcttagaatgttaggaacactgtttctgctttgagaatggaagagagcaggttaccctgatgcctctggggccaaacacaggggatacattttcccagtagaagaaatcagccctgatcctcaagaagaagaacatattggcatattttagtgagacggaggcatactgcatcttggggtaaaaactgaatcatcaggccaggcacggtggctcacgcctgtaatcctagcactttgggaggccaagacaggcggatcaccaggtcaggagatctagaccatcctggctaacacggtgaaaccccatctctactaaaactacaaaaaaattagccaggtgtagtggcaggcgcctgtagtcccagctactcgggaggctgaggcagaagaatggcatgaacccgggaggcggagcttgcaatgagccgagatcgcgatagtgcactccagcctgggcaaaagagcaagaatccatctcaaaaaaaaaaaaaaaaaatttaatcatcaaaggaaaatgtttcaaattctagggtaagctgacatggtacacatatacagcgaaatacacccagggaggctgaaagtccaataggccaccacagcacgttaaaaatgtcctgttttacctatagtcaacaataataataaattatatatttaaaaatttgttaaaagggtaggtctcatgttaagtgtttttaccacaataaaatatttgtttaatgtcctctacatggctattatgattggaaaaggcataccttgaacagagatgaataaatctgcatatctgtgaaatgtcagttcagcatgttgatcgtcagtaatcttttcagaacatttcagatatatgaaaatagcaccaatgtctgagtttgaacctgaactggtttcagctaaagtgatcatcttcagccaaaataatgggtatttctttcttggccttccttctacagacttctaaaagacagtggaagcactgaatatccttttagaaacaaacaattacaaattagctgggcatggtggcgcacgcctgtagtcccagcaacttgggaggctgaggcaggagaattgcttgaacccgggaggcagagattgcagttagccgaaatagcaccactgcactccagcccggtgacagagcgagactccatcttaaaaaaaaagaaaagaaaagaaaagaaagaaaaagaaaaacagctacagatattcattcctttttaatttcttgataaataatagaccagtaagaatcacataagaagcagtctacatttttcaaagagtttttacagatcccatttgatcttcaaaagggcctccattaggaaaaactaaattcaagtttaaaactatccattttatttctcccataaaaatatattcagcccctggagataatctccaaattcctcagattttaaaagttaatttttcttatcttgacccaaaatctgtagaaacaaggatttttcaccaacagtgagctcccttttcataaaatccttatctaccaagatttacctctgcaaacctctacagtccctggttgtgagcccctgatggaagaagctagcataaagaagttcacaactactggggagggaacgacctgacaagttgcaagcaagaaaggagtgaaaaactgagttaattgtacaagaatttgtgtatttataaatgcaggataaataagatcacgtagaaactctctttagacttccatccttactgctgtaattgaacgaacagacgaatgtgtttgaccgcaattgccctaatactatttttcccataaatacctgaaattcttcaattgtaagttttcctactctggcaattttaaggaaagtgattcttgaggctgtgggtgaaataccacattcattttttttaaaaaaataaggtatacttacttgtactttctaccattttatatatattctctgtttaaattgtgtagcccctaatagactgcaaagacaatgataaaaaggaacttgccttattcacaggtacatccttggaacttagtaaagggcttaacctccatagcaggcagtcaagacttactgaatgattaaataaaaacactgaattccatattgtgcaggaaaaaaaaaatcaagattagacctcagaaaaaattgacatgtctagtagaacttactatctgggcaaacttgaagagaagtgcaatgggaaggcctcctcaaaaaagacattgaaatcaagatgggacccgttcctaccctggatttctctgaatcagctactccttaagttcgtattttgttccactcagccaatggcaattccaggagagaggcaattgataataattatgttttctgccttctcttgggttatgaatttatcatgatgcaaaagtcgagctactccgatgccacgttaacaatgaaaaacaccataaagacaaaaagaaactgaatttaagcatttggattctgcagaggagtttattgaacagattaactaaggaaaggcaaagctacacaattatggaaaacaggtagcaacactcaggctgactattttcgatggccacctgagagcggatttccaatgccctcatttctgtaggtacattatcctgtgttttattgttagtcacagctgcaagttgattaatttgcattcagaaattctaagtggcaaatgtgcaatgcatagtaatatacatttttttatggacactgtgaaaatgccgaagccacatctcataagtaactcttgctcaaccagtgagtaaaatccataaaagagtttgcaaaaggctttgaaagagtttggtttgaaaggaaaactgcaagagcaaatccctctcctccaccccagcccttaaaaaacaaaactaaactaagtctgaagcaaaaccaaacaaagagaacagttgggtgatgtcaagctgccagaatcataaatgttgtcagttcacgtcccagtcttcctgctctcttggcattgccaataaaatccagaaacaccagggatgactcagtaccacagtcagtgcgtaaataagggataaagatacctgttaaatccattgcctcaaagcaatcatgggagtttcttaagaatactgaacctcctctccgttttctgcactaaagagataaggagtggcatggagaatctaaatgtgtggaaaatatatatcattggtgtgagaacacatattgtgataggtgttcccctccatcagccccctagtctatactcctagctgctttatcttccagatcatgcctcccctgctcaaagtgaatttgccttccctttcacactgaccttagaagtggatctgagaccatgcttcctagcaggagaaaacaacttttccatttgaaaacctttgcgaattacccacaactctgacaacaggtgctcagcagttgatagtattctttttggaaagttttatcaaccacttaagttaacttgaagacgcctaacagcaggatatggtcaagcaaacatgttcatcaattaattcaaatgcaattttagtttacttttatatgatttcccatgcttaaaactactaattgctttcccaggctggctgcatgaacatggcccaatcaaaggatgcaacagtcaaatgcttgtgtacatcatgttacctgtccatttccatcagagacatcatggacacagctgaaatactaggcctggccttttgtaagttcattagagcatcacaaacataactgcagctattctcactgtttgtgactctgtgattcaaatgttttcacaaaccttccctggcactgcgtattagatggattgaaagatgctgaaacgtaaggccgggcacggtagctcacgcctgtaatcccaacactttgggaggccgaggtgggaggattgctagagcccaggagatcgagaccagcctaggcaacatggtaaaaccccatctctacaaaaaatataaaaattagctgggtgtggtggcatgcacctgtagtcccagctactagggaggctgttgcagaaggatcgcttgagccccagaggtcgaggctgcagtgagccatggtcatgccactgcactccagcctgggtgacagagtgagatcctgtttagaaaaaaaaagaaagaaagatgttgaactatacacaagaaatgaaaagaaatagctgagatatggctcttggggagaaagaacaaagcatcaactaatagaattcagaaagaaaaggaggtactcatcaaggcactctgctaaggtttgactaatgggattccacatggtctgcatgtttatggcttaaatgagctaccaacactgaaactgtccacttaattagcccccaaaacaagaagtacagactgtgagtctgagacctacagagactccaaaaacagaaactaccatcgcctcaagctaatcactctaagtcctagaaatacatctgaggttgcaaacagtccatttcattcattattttatatatatatatatatatctatatagatatagataaatatatatacagatatacatatagagagagagagataaaacagaaaaaatctaaatgtctaaaggaccagatataagttaatcataaaacgatgacaacaaaaacaaaggcttcttgagttaaaaagaatggaaaatatttaactagagttaaaaagaaaagcaatttgatcaagagtcaggaattgtaggttctagtcctggctctttttattctttttatttattcctgttttttttttcattt

SEQ ID NO: 8857 - DNA, 32363 bp, Homo sapiens
gcaacaaaaatatttctagacattagagatgttacctaggggtaaaatcactcccagttgagaaattgtggtctgactggccctccccccataccttttccttatcagtccattggtccaggacatctttagcaaagttgaaatactctggaatccccagtttgaagtcctgtttcatggattcatagttggagaaattctgaggggttgctgttctattatctttatgcagtgccctcacagaaccaaaaattgctaggcgctgaaaacacttggcatgacgtagcatcttcctggtgacacgagctagcatcagtcttgttggaagctttagcactcaggatttgcacagagaccagttcatctaaaagacaagcaaaaaggacatatatttgtttctgtcctgaaggtagccataccccaaagtggctaagttttgttattagtattgataatcatcatgatagtaccatttgctgcgtacactctgtgttccaaacacagtgctcagtgttttatagacactttcttattaaatcctcagagaaaccctgtgaagtgggtactattatcatctctgtttacagattgagaaaatgactagtaagaggcattggctggatttgaacccagaactatcaggtcctagcccattctccagaatactgtgcactattgacacccatatgcatttctaaagaagtaaagatctgggtcacccacttaatctcactgaaagcaaagggctaaggcttcttgtctaatatctttcacctgcagatttcaaagtagggtagaaatgttaaggagcatttttcacagtggataatctgtagatgaagaaatcgagagtagcccaataacaattagacatgaaagcactgtcacagtttatgaactgtctagttgataggttgcagttcccatgctctcaataggggcccatactacttttaagtccaggcttggagctgcatttaatagagatgtaataatggggctttaacatttaggacttttgtcggggaggcccctctgggccatcgcctgcttctgtgggaaatcatttgatcacaatgtcatttacttggttgaggctgttaaaaatacagttctagggattatgagtgtttgagattctcctcattatacttcctgtaattttccaaatttcctacaatgcaatatatattactctcataatcattaaatcatcattctaactacaattctagctgtgtgccatgtaaggcagtctggctatgtggaagcatttctgtattgatacattgccaaaacaatacataattgcagatgtcagctaaatggacagtttagctgacatctacagttattgcagttttaccctaagcagacctggtgtttgggcatcatgttgatataaccgatgcatcaggaaacctgggtacttctgtccttcccatttatgtgtgtgaagacctgacaagtcagtgatcttgagccctctgacaccatctggtttcagctttttcctttttcacctgcaaagaaaactggagacccagagaggggaaacagcctgcttcattctgtcataccagagttagaactagaactctggtctttggattaaatgtttttactgtcattcgacaggatttcaatagagcagtggtttgcagtccagctgtacatttgaatcaccaagaaagcattaaaaaaaaatactctgatgcctaggtcttggatcaattaaatcagaatatttcagagtgggctctgggcccatttatattttttaaaatgtcctcagattttaatgtgcagcagccatggttgagaatcactgatttagaggctgtgatttgtgaaccaccatcatcatctttatcacctagaagcttgttagaaatgcacattctcaggccccactctagatctactgaattggtagatgttgacattttaacaagatcccaggtgactggtatgtacattcaagtgtgaaaagcaccagtctatggcatgatggttaaatacactggctactgagtcatatggtcatgtgatatggtctcccagttttgcctcttatgaactgcatgaccttatttgaattattaatcactctgaacctcagtttcacattttaccaatggagcgactaatagaacctccatcagagatttgtcctgaagactgaatgggatactgtatgcaaaatgcttatcatggtgccaagcatattactctctactagaataggggtcagcaaactttttctgtgaagggccagacactaaatatttgaggctttgtgggccatatggtctctgctgcaggtatttaactctgccattgagagagcagccattgacaatacataaataaattttggcatggctgtgttctaataaaaccttatttatggtactgacactagaatttcatttaattttcatgtgtcatgaattagtgttcctcttttagttattttttcaaccattaaaaaatttaaaaaccattcttggttcaaaggctatacaaaaacaggcagagggctggatttgacccatgggctacagtttgctgatctttgcactgtgatgtaagttctaccagagcaggggccttgtctgttatgttcctgggaagaattaacaaaaatttcttggcaggctttaggagaaaaggctgctcttaagaacagaactaaaatcactctgaatcccagttgccctgcaggttaagaccttaagtctaacaatgtcattctgtttggcattggggattgggtacagagggaactaccggtccctgttttttgctggcaagtcacaacctatgcttttggctgctctcctcttaacagaattagcatcaggtttccttcaactgaaagaagttaagtaatcaacactacttgtctctctctgtttttaattttttttcgcataatatcttcaaatggctcaaaaaaactgtaaaaggtacagagggaaaaaaaaatatctgcctcccacctctagtctcaaagctgcccactttgctctcactcccaggaaaccactattattatttctacttatcttttcagggtttctttatgtgcattcaagcaaattatgagtatagattcttatttctccaccaattttacacaacaggtagcacagaatacacactattctgcccactaaaaacatttttaacaatgtaccttttaagggctttccataccagtgcgcagagatcttcattctatttttttaaatgaagtatttattcatttattctttcctttttttccctgcctaaagacaggatggatctcactctgtcacccagactggagtgtagtggcacgaccacccctcactgcagcttgaacttctgggatgaagcgatcctcctgcctcagcctccagagtacctagaattacaggtgtgtgccaccacacccagctaagtgttttaaaaaattttttagagatgggggtctcactatgttgcccaggctggtctcaaactcctgacctcaagcaatcctcctgtgctaagcactttgcagttatttattattatttccattttacagacaaggaaatatacacaaacacgcacacggcctcccaaagcactaggattacaggtgggagccaccacactcagccctgttctgatttttttcttttaacagttgtatgacattctagtgaagaactgcactgtcatttcttaaaccggtcccctatcaatggtcacttgagtttttgtataattttgcaatttagataaaatgttgaaactatgtcttccaaaaggaacgtcctgattctttcattacttggatgtaaaaatgaatagtatttttaagtggttgtgaagtattagaaacaatttctgattctattaaataaaaggcaggaatttggacaaatatcttaaggtcttgagcttcattcttggtaggttggcatgattcatttatttattcaacaattattaatcacttgccatgaattatttcagacatagaggatacaggagggaatgcaagagacaaggtcctccttgctctcatagaaagacacatatagtaaacaagggaataaataaatgtgatgttacgcaagaaaacaaagagagtaatgggagaaaagggaccttttaggaggtctctctagggacgtaacatttttgctgagatctggcaagtggttgtactgttaagcattttgcagttatttattagtattttcattttacagacaaggaagtatacacaaacagacacacatatttaaattggacaacgcatttattcattacccgtgtatttattgaacacttggtatatgccagacctgtactaaatgctgaaaatatagctgtgaacaagacacggctggtcttgctcccatgaagcttatagactattaaggaagacattaaataattatgtaaatattaatatgattggagataaatatatcatacttagcttgctgattctgaatagaatcagagtttagtatgatttgttccctagctcccatacaatactctacaccacattcagaatccttcaaacgtatgttgaaaagaaaattgatcagtcatttggagcttaaaatgaacctaaccattctgttctaccaaaaagcaaatatcgacatcctcttcatcaaaaccataagattaccttctcctcaacaaagttcttttcctcccttttcatcgatcttagcattttacaacttctatttcccaggtttataaaattatttgtaggtaaaattgctgagataactttcccagggtgactccagatttttatactgagccacagaaacattggtaaggaaaactcttctaagaaagacagtaccacccctggtcagatgggcttctgaaagtatttaaggtctcatctgaaatgcaagctctttgtccctacagccaagggggctttagcctccccacagctccctaaacatccctccctctaagtatccaagtaataacagtagtttaacatatacagcctcaacgcaaggtaaattcactgctgttgtctccaaacccaaccagaccctgcctgaagcccctcctatacagaacttttgcagctgcccttgaccacctaaaggagaaaactggctgctcttaggtttgcatctgtgtttcccaaagtttcctggaagtaatttacatactttctggatgatgcagaagatggattcccatctgtcactgagcaaggtggggagctaagcagacagtacaatgaaaatctcagccactacctggtcttttttttgagatggagtcttgttctgtcacccaggctggagtgcagtgatgcaatctcagcttactgcaaactccacctcccaggttcaagtgactctactgcctcaggctcccaagtagctggggttacaggcacctgccaccacacctggctaattttttattttcagtagagatagggtttcaccatgttggccaagctggtctcgaactcctggcctcaagtgatctgcatctgcccaccatagcctcctaaagtggtgggattacaggcttgagccaccgcatctggttcaattaaaattaaaaaaaaaatttatcaacttaatacatgtacatagtttttcaaaaaatcaaatagcaccaaaaggctcaacatgaaaactcagctgctacatttatagccttttgtgtgtgcatactcctcatcacttaatagatagtatcacacaactgagaaattctgagagaaactttggctgcccaagactttaatgacagcatttttgattgttggttttgttcatctgtttgttatctttgctcaaaaaacagatgtgccagttcaggaaatcttacacaggaggggagatgaggtactcactagttaacagattccaacacagatggagattatggcagacttgtttcttagaagagcagccctgaaccttgagttctcacatctgctttttcctcgtggcagtctaaagaagagggaggagcagtctgacaatccggaggagcargactggcccaaaacactttccttgattggtggagacattctggaggaggagccaagctctgggctaaagtttacaggactcccagcggttmctcttacaggtaatgatttacagaaacagcaagcttttgaggggcggagaaagcaaattattaacaagaaggaaagtgtccaaggagttgccgaagtggttagttctgtaaaggggcagagagagcacttctcagaaggaagaacagatggaggaagccatagaggagttttgaaattgaaaggaaagaagttgaggggcggttatgggttggcctaaatctcatcaagcccattggtgcgtttatctgtcgaagtggcaggactaaacataaacgctatcaggttactcccctgctcaaatctttcagtgcttctttttccactccaggtaaaatccgagtccttacatgaactgcaaggagttgtatgatctggcacagggtcctctgatccacagcccattctccttcctctgcctcactctgcacagccaccggcctccttgctttttctcaaacacacttgcctgtttcagcctcaggctttctgaattcacagtttccactgactggaactctttcctcagatatccccctggccaaattcctcattttctgaggtgtcttattaaataactcttcccttacctcattttctaaagtagcactcttcattttttctcttttaccattttttaactttttacatctcttactatcacccttgagggtaagaactctttttgtttgatggtgtatctattgcctggaatagctactggcaaattttaggcattcaataaatagttgatggatatgtgaataaataaaggactctttcaattacatgtgagagacccaactttacttaaagaggaatttgttggtcacttttgagttctaggagtcttttgttgttgattccttgggattttctgtgtaatcacattacctgtaaataagtaaacagatcttacttctttctttcagatctatatgcgttttatttccttttcttgccttattgcgcaggctagagtgtctagctctacgttgaataagagtgatgagagcagacatccttgccttgcttttgatcttagagggaaaacattcagtctttcatggttaggtacaatattagtagtaggttttgtgtagatgccctttatcaagttgaggaaattctcctctatttctatttttttctgagtgtttttatcatgaataggtgttgaattttggcaagtgttttttctgcatcagttactataagcatgtggtgtttttcttctttagcctgttaataagatagattacactgatcttctaatattgaaccagccttgcctccctggaataaaccttgcttggtcctgttgtatatttctttttctgtattgctgaattctatagttatgtctcttgacaaatttgagaacttttcagctattatttcttggagtaaatttttagcccccatgttagatcttttatgatagtttcayaggtccctgaggctctgttcttttttttcttttttttcccattctagtttctttcttttgttcaggttgagtaaattctggcttccagttctttgatttttttcttctattatttctattctgatgttaagctcattattagagacagggaaaaaacagtgtttttttttctactctcacataccattcagcataatgttagcagtggtgaatccatacggatctacaataacttgattcttgcctcttcaaaggaaagaattcatccaagaggcataaggcagagtgagagactgaggcaagtttttgagcaggagtgagagtttattagaaagttttagagcaggaaccaaaggaagaggggcaagcaggcaacttgagagatccaggtgccctgtttgacttttgactttgcgttttatacattggcatgcttccgaggttttgtatctcctttgattttttccttggcatgggctgtctgcacgtgcagtggcctgtcagcacttgggaggggccacatgtgcaatgtctttactgaagttgtgcacattctcatttgaggcgtttttcccttaccagtcaagtgttcctagaggaaggttgtataccagttaaaatctgccattttgcctcttagtacgcatgcttgagcmcacttgcccagttcctgagatcttattggaaagctgctgatcaccagctttaggtgttttctatctcttaggagactgcctttccctggcacctactgcaaccaattattttagagtgacagtttaataaccgcctgaccatcacctgattgtcgcctgacattcctgcctttcctgccttgcccatatctgcctgactacctactctaacaataacacttctgacactagacgtgtggggggttttcactataccaagcaattctccagtggacaccagcttgggtgtcatgtcctacttagttcaacactgtctacctggaaatagtgtcagatcctacaggttaaggtctcaatctgtaaactaaaaagtatctgagacaggtctcaattaatttagaggtttattttgccatggttaaggatcatgacccatgacacagctttaggaggtcctgagaacatgtgcccaaggtgattgggttacagtttgatttgatacattttagggacaaagaagttataggcaaagacataaatcaatacatgctgaggaggctgaggcagaaaaattgctcaaacctgggaggtggaggttgcagtgagctgagatcatgccactgcactccagcctgggcactccagcctgggcgacagagtgagactccgtctcaaaaaaaaaaaaatgtgtatacattrgttcagcctggaaagttgggacatctcaaaggaggaagaggctgggctttcaggtaataggtggatttaaagatctcctgattggcaattggttgaaagggctaaactctggctgaagaattgaaatcagcttgagttaaggtaaagggtggggggttgcggaagccaaggttcttttcaagtagatgaagcctccaggtagcaggcctcaaagagaacacttgtgaatgtctcttattagacgttaaaaggtatcacactctctggaaatacatagtaaagatgaagaaggaattaatgaaatcarctataacctaatagtagtggtaacagaaatttttaaatcctcttaaagttgctgcaactttaacttgagttatacttaagttaaaagagaatattaacagcctgtcttctctctgtggtcagtggaccttatctatattccccaactccacattcatcaaagtttattacaggctcagtgagttcctgcttacctccctagcatggcttcagggtcacaagaccgataagtttaggttggaagacatgtttttctcaagatgtaagaaatgttgtaatgcttgattaactgcctttgtttctctcttccgtaacttacttcctgcctcacatggttccygccttaagatgtttaaaagtaggaaagcctttagtttggggctcagactttctggatgtatgtctggctgagcctgtgatcaccttaataaactctcctgaacctttttcagtctctccagtctttgattgtcccgcaacaaaggaaggagattttcctacagaatgcagcttttccccacaagagacagctttgcagggccatttcaaaatgtgtcaaagaaatatattttsgggtaaaagactttgattttcttcagggcctgctatctgttatrtgatgctgtactagagtcattttagaatttggatcttattgctacaaagagtctgttttgtcagttttaagatcactgtttcaatgttaatgttggtcagttgtgcttgaactccaaaagggaagagtataatgaggcatgtctgtccccgccaccccctgtagctgcccctactggctttccatcatggcctaatttttcagatttccttgggtcctcttggtcaaaaggagggtcaattcagtcagtttgggggcttagaattttatttttgatttacaagtcccacaagactgccccccacttcaagtgtcataagattcaaggttgtaatctgtacttctaacccctctccttgagttcaattaatttgctagaactattcatagaacaaagggcaacacttacatcaacccatttattataaaggatattacaaaggatacagatgaacagccagattaaagagatgcatagggcgaggtgtgggagaaggggtacagagcttccatgtcctcaccagatgttctaccctcctagaacttcctcatgctcatctacccagaagctccctgaacccagccctttttttttttttttttttgagatggagtcttgctgtgtcacccaggctggagtgcagtggcgtgatctcggctcactgcaagctccacctcccaggtttacaccattctcctgcctcagcctcctgagtagctgggactacaggtgcccaccaccacacttggctaatttttttgtatttttagtagagacggggtttcaccgtgygttagccaagatggtctcgatctcctgacctcatgatccgcccacctcagcctyccaaagtgctgggattacaggcgtgagccaccacacccagccccttttgggtttcttagaggcttcattacacaggcctgactgattaaatcattggtcattggtaattaactcaaccttcagcccttctttcctcccaagaggtagggggatgggaagtggcgtggtggtggggtgggagagaaagttctaaccctctaatcacaaggttggttctcctggcaaccagccctcatcctgaacccctaacccctagtcatctcactagcatacaaaaaagctctcttcagcaaatgtaaaagaacagaaattataacaaactgtctctcagaccacagtgcaatcaaactagaactcaggattaagaaactcactcaaaaccgctcaactacatggaaactgaacaacctgctcctgaatgactactgggtacataatgaaatgaaggcagaaataaagatgttctttgaaaccaacgagaacaaaaacacaacataccagaatctctgggacacattcaaagcagtgtgtagagggaaatttatagcactaaatgcccacaagagaaagcaggaaagatccaaaattgacaccctaacatcacaattaaaagaactagaaaagcaagagcaaacacattcaaaagctagcagaaggcaagaaataactaaaatcgagcagaactgaaggaaatagagacacaaaagacccttcaaaaaattaatgaatccaggagctggttttttgaaaggatcaacaaaattgatagaccgctagcaagactaataaaaaaagagagaagaatcaaatagacacaataaaaaatgataaaggggatatcaccaccgatcccacagaaatacaaactaccatcagagaatactacaaacacctctacgcaaataaactagaaaatctagaagaaatggagaaattcctcgacacatacactctccgaaggctaaaccaggaagaagttgaatctctgaatagaccaataacaggatctgaaattgtggcaataatcaatagcttaccaaccaaaaagaatccaggaccagatggattcacagccgaattctaccagaggtacaaggaggaactggtaccattccttctgaaactattccaacaatagaaaaagagggaatcctccctaactcattttatgaggccaacatcatcctgataccaaagccgggcagagacacaaccaaaaaagagaattttagaccaatatccttgatgaacattgatgcaaaaatcctcaataaaatactggcaaaccgaatccagcagcacatcaaaaagcttatccaccatgatcaagtgggcttcatccctgggatgcaaggatggttcagtatatgcaaatcaataaatataatccagcatataaacagaaccaaagacaaaaaccacatgattatctcaatagatgcagaaaaggcctttgacaaaattcaacaaccttcatgctaaaaactctcaataaattaggtattgatgggacgtatctcaaaataataagagctatctatgacaaacccacagccagtatcatactgaatgggcaaaaactggaagcattccctttgaaaactggcacaagacagggatgccctctctcaccactcctattcaacatagtgttggaagttctggccagggcaattaggcaggagaaggaaataaagggtattcaattaggaaaagaggaagtcaaattgtccctgtttgcagacgacatgattgtatatctagaaaaccccactgtctcagcccaaaatctccttaagctgataagcaacttcagcaaagtctcaggatacaaaatcaatgtgcaaaaatcacaagcattcttatacaccaataatagacaaacagagagccaaatcatgagtgaactcccattcacaattgcttcaaagagaataaaatacttaggaatccaacttacaagggacgtgaaggacctcttcaaggagaactacaaaccactgctcaaggaaataaaagaggatacaaacaaatggaagaacattccatgctcatgggtaggaagaatcaatattgtgaaaatggccatactgcccaaggtaatgtatagattcaatgccatccccatcaagctaccagtgactttctgcacagaattggaaaaaactactttaaagttcatatggaaccaaaaaagagcccgcatcaccaagtcaatcctaagccaaaagaacaaagctggaggcatcacgctacctgacttcaaactatactacaaggctacagtaaccaaaacagcatggtactggtaccaaaacagagatatagatcaatggaacagaacagagccctcagaaataacgccgcatatgtacaactatctgatctttgacaaacctgagaaaaacaagcaatggggaaaggattccctatttaataaatggtgctgggaaaactggctagccatatgtagaaagctgaaactggatcccttccttacacattatacaaaaattaattcaagttggattaaagacttaaacgttagacctaaacccataaaaaccctagaagaaaacctaggcattaccattcaggacataggcatgggcaaggatttcatgtctaaaacaccaaaagcaatggcaacaaaagccaacattgacaaatgggatctaattaaactaaagagcttctgcacagcaaaagaaactaccatcagagtgaaaaggcaacttacaaaatgggagaaaattttcgcaacctactcatctgacaaagggctaatatccagaatctacaatgaactcaaacagatttacaagaaaaaaacaaacaaccccatcaaaaagtgggcaaaggatatgaacagacacttctcaaaagaagacatttatgyagccaaaagacacatgaaaaaatgctcatcatcactggccatcagagaaatgcaaatcaaaaccacaatgagataccatctcacaccagttagaatggcaatcattaaaaagtcaggaaataacaggtgctggagaggatgtggagaaataggaacacttttacactgttggtgggactgtaaactagttcaaccattgtggaagtcagtgtggcgattcctcagggatctagaactagaaataccatttgacccagccatcccattactgggtatatacccaaaggaccataaatcatgctgctataaagacacatgcacacgtatgtttactgcggcactattcacaatagcaaagacttggaaccaatccaaatgtccaacaatgacagactggattaagaaaatgtggtacatatataccatggaatactatgcagccataaaaaatgatgagttcatgtcctttgtagggacacggatgaaattggaagtcatcattctcagtaaactatcgcaaggacaaaaaaccaaacaccgcatgttctcactcataggtrggaattgaacaatgagaacacatggacacaggaaggggaacatcacactctggggactgctgtggggtgggggggggggagggatagcattaggagatatacctaatgctaaatgatgagttaatgggtgcaacacaccagcatggcacatgtatacatatgtaactaacctgcacattgtgcacatgtaccctaaaacttaaagtataataataatamtaataataataaaaagcacttaccacttcagaaattccargggttttagcggctatgtaccaggaaactggaatgaagatgaaatatatattttatagtatcataccatccaccaagcttttgatttctcattgaattttttagttctaatatttattttcatttagttgttcttgatatcttctattttttgctgatatatatttttttcatttatttcaagcatacctaattgttcactgaagcatttttatcaaggctactttaaaatctttgtcagatgattctaacatttctgtcatctcagtgttagcatctatccatcatctttcttcattcatttgaactcttcctggttttggtatgaggagtgattttcaattcaaacacagacattcttgtaataagactctgcaccttatttaaactttatattttagctggctttgacactgcccaggtaggggacagggaaggggcaccacctcattattgccaggtgaatatagacatctaggttctttacccagctttggatgacacctgagttgcaaggagcttcttcttattgttgggtggggactagagttccagctcccgacatggtctctatggacactggcctgttccctgcttggccttctctcacaccatccccagccttcgtcacaataattcctctgcccctctaaaatcttaagtccattgacttaagcacacctccttcatgccttcacttatcttctgcccagcttggattctctgtgccattcagattctttgtactgctctccctccaccatactcatgtgggaaaacccagctctatgcaaaactccagataattctacttatttgtgacacttgagaagcttaatatggctctggagaattgcacatggtatttgttggtggtcctaaactcaatggttacacttgttacaagatagactaaggcacattaaaattttaaagcatacatgtgagcaaactgatccatgaatcaggcagctccaaakgggaagtaattcagggctctattgcagggcacaaagggagggtgtttatagggtgaatgtggaagctgagcaaagaaattacttgattggtaaargtttgaacaattgccttatttgcactgttctggtgggaagttcaagacaatatactaaagcccagttggctgcctgtgactggctgagcttatatttcattttattttaaattctgagttaggcttcagtttgcttatgtgggaaccctgagtgttagagccacctcagtctaatggcctcctatttaattatgttagcacactttaacttcctgactgcaaaatattcatgtgggccgttctcactctctgacaaccccactacatttctacacttggagataactgtttcactccttcccctgtttctctaaactagtacctctccttctcccctcttatttcactgagatttataagtgagaaaagccagaagagaatgtccttattccccctaaccagttaaccaaccagtactcttacaactctgcccatactttctgcattccttccaatgaccatggaaaaattgtccaaggtcctagcgtgggtcaccttttccactgtggacttgacaccattccctctcccttactccrggatattactccctcagttattcttcctctctcttgcatcatcaatttctttctttctctgtcttttttttctttctttcattcttttctttctttctttctctctctctcttttctttctctttcttcttttcatttctttcttaagagttgtaatagggaaacaaagtcaggcacaaatacatggtaatatttcccatgtgaaaataaaatttcttgggccatttgtctccctccacctcttcattacttgtctcctttttacagcaaaatttctcaaaaatagttgtctgtatctgcagcttttacttctttattctctgtctgtatatctgtacctcttctcttggtctctctttttcttccttattgtggaaaatccttatgtatctctaaaagatarggactcttttaaaacctaatcacaataccatttaatacctgaaaaagccataataatcctctattaatataatttttcaaatttcatgtttccagattcactcttttttttttttttttttggagacagtctcgttctgtcacccaggctggagtgcagtggtgcaatctcagctcattgcaacctctgcctcccaggttcaagcaatttctgtgccttagcctcccaagtagctgggattacaggcatgtgccaccatgcctggctaatttttgtatttttagtagagacggggtttcaccatgttggccgggctggtctcaaactcctgatctcaggtgatctgcccacctcggctcccaaagtgctgggattacaggtatgagccaccccacccagccagccttttccagattcaattttgttttacatttgtttttttttttcaactcagtgtccaaacaagggcaacacattgcattttattgatatatatcttaagtttttaatctataaattccatctctctcttctttttctttgtaattcattgtagaacatacggcattgtcctctaaagtttcccaaattcagtgttgattttgctaattcaatgtggttgagtttaacatatttttctgtcccgtgtagtttctataaactaatagttaaatctagaggatagatccatttatagcaaaaagattgcataaatatctttgcagaattctattgcatcacatctggagaatcataatgttgtgttggctctccttttgtgatgttaaggcatcacctgatccattcattatgtttccagcagcttttcacctaatgcagctattgataattgttatctatatctattatttcatagggatctccattttctctaaaaatagatcaggttttcttctctagcactcaactgaaatctaatctccctcgacccctacccagttttaatcctagggagtaacctagtgccactgaggctttatctaagaaggattccgacataagtgattggaataattcttatattcaactgtcttaagaaaaactctaataaataaatgtagttcccagccaagaccaggcttttgagagagtcttctaacatatcattttccatcaactgttttcttttatcatgagacaaccacaagaaaaacaatggcaaggaacagcaactagggttgggaccattccttatacggagcagaagtgaatttttttttttgagagacagagtctcactatgttgcccaggttggtcttaaaaccctgggctcaagtgatcctctggccttggcctcccagaatgctgagattacaggtgtgagctaccatgcctggctgagtagaagagaatgaccactttttttttttgtgagacagagtctcgctctgtcgcccaggctggagagtagtggtgcagtctcggctaactgcaagctctgcctcccgggttcacaccattctcctgcctcagcctcacttgttgaatgttttctgtatgccaagtgttttagatagctcatatcatttatttctcatagcagctctgtaagctaagtagtactatatatccattttttttaatgtgaggaaacgaagtctagtagagagaaaacaaccttgaaataagtcacagcttgaaagtgattctgacagaaggttaatgtccttttgttttaatgccaagttgtttgactatacctagaatcagtttggctggagcaaagattttgacaatgaacatgtcaatatatcccttaaatgtgatttttgccttctcataaaacccccaagggaagaagaatggagaagccaaggtgacataaccgatgtgtaatgaaaccccatctttccattccttttcttcccaagagaccctggctcccacatagaccagctctggtacagctaagcagaggaagaatggcagggcttctccgagccccactgagctctactatcacttggcagggggatgatgagcagtgttttatagaattggcataagtcagtcaaaatggggaaaaaaggcacctggaatattttcccagtttctcctgggttwctatctctcatcagccaagtttgactacatcttttcttaaatgtaaaatagcttgaagttatgaattttttttcaaatactttaaacaacaataaaaaatcctttaaaaagaaaaacatttttataaatagttctacagggaaacaagaaacaggaaaaaggacaaagctttatagaactgtcaactattttgtaagttacatacagatagaagaccttgaattctgtttcatgtacattttgtaaggaagggggaagaggtttttcatggtgttctagcagaaatacagaaggctggccactggttcaggattttccactgattctaccaagaaaataacagatctaggctttctaccaaaatctgacaccaactgggcacagtggctcacgcctgtaatcccagcactttgggagactgaggcagacggattttgagaccaacctggccaccatagtgaaaccctgattctaaaaatacaaaaattagccagtcatggtggtgtgagcctgtaatcccagctacttgggtggctaatgtaggagaattgcttgaacctgtgaggcagaggttgcagtgagccaagattgcaccactgcactccagtctgggcaacagagtaagactccgtttcaaaaaaaaaaaaaaaaaaaaaaaaacctgactccaaaacttatattctctctactacattatgaggcctcttgctctcttaatttgtctgaagcacagtgtttataatctctatggacaataaagttgtaacaagaatagtgaagacattctgaacaaactctggattcccagtgtattagtcaaggtgtgctaggctaggctgcagaaataaacaaatctaaagctcagaggcttaagtctgatgcagaattttttgcttaatggattttcctaggtggctgtcactttaagtagtagactcagratccttatattcagaggccccgctctcccctaagcctgagtcctggttggatcctctgaaatcagatagctgacaagaaacragagagaggggggtgtttaggggaagagaaatgcatttatgaaggatctcatgaatttaggcctagaagtagcatgtatcacttctgcccacatttcaatagcctcaccctcacttccagggacctgagaaattagccaatctgaggacccagaagaaaagagaaatactttggtaagcatctacatcaagaaataacactattttaacatataaaaataatacacgcatatggttataataaaagatacagattgatataaaataaagagtagtctcaagggagtaagtgggatagatatatgtaactagttttccaatcaagtcttaacactttttcccccaatttttgttttccccctttattatcccttaatgtaatgaccttttggaatgattccacaatttcacaatcactttcagtttttaaaagttggtccactcagaaatttaaatctcaaacccagtgtatgttgtacctgtttgcctctccccagcataggcttgacctgtacttctagggacctgtggtgggcagttgggttgtccactcttctcctctggctctgacacctggaatagagacacatggccttatttgtcactgacacctttcccttctccttcttttacactctggagcctccattgttgagggcgaggaaacaagattggagttagagggcttactatgctgggtgtgactttcatcctctgtctgttgggtctacctggtcaagcccaggcamcttctgaagatccatttgatgtaccagatatgcacatatacttgcaacaccctatcttatgcttcaggcttctcctctgctgtcctccacccctgctctactgtctctgccttgccatctgtctctacttctctttctggctcagtttctcactcagccaggcagaggggaatatcaaccaaggaatgtgatgccagtctcttcttagaaccacctctcaccttcacaggggattcccttggtaaccctgacagcaaagggggtgaaaatactcttctcccctttcccaggcttctaacataagctgagaagcaggatggtgaggctgggaaattggtcagaggtagcagagccagtagagttaccttttcacaaacctggagagagatgcttcacttagtccttgttgacaattctctttagaatgcaaaaatcagaggtttagtgtctcttcattcttatctttgggctttagttgggaaatgtggaaaaacagtaggtcttattaaccatcattttcatatatatataggattaaaatataacacacatatatatacatatgtgtatatctatgtgcacatagatatatagatattcccctttaaaacataagttagttcatattacacrtatctcactttgaaaatcttttcttttttctttttttgtggagacggagtttcgctcttgtcacccaggctagagtgcaatggctcatagagtgcgattatggctcattgaacctccatttcctgggttcaaatgattcttctacttcagcctcccgagtagctggggttacaagtgcccacaaccacacatggctgatttttgtatttttagtagagatggggtttcaccatgttggccaggctagtctcgaactcctgacctcaagtgatctgtctgcctcggcctcccaaagtgctgggattacaagtgtgagccactgcctccagccagagcttttcatattaacatgtttagatataataggttatctctggggtactgagaaccagcaagaagtggctggaaacacatcaaagcaaactgaccaacacaaaaagcctgagtctcaacctcaacttttttggtaaaaattatctctaccaaaccttccagttagcaacagctacaacaaaacagcagcagtgaacacttattgaatatttgtatgtgcaactgacatgaatattttattcaatactcacaatgacytttaagatagatgctgtggctattctcattttactgatgaggaacatgaggattagaacaattaacttccccaaggtcacagaactagcaatgtggtggactcagtatttaaactcaggatggtgtgacccctaaaatatattcttaatcaatttgtctttgttcatctatacattgaatgctgtactcttactgaggatgtggcttcccttcaatttttcatttaaatataaattattcaacctgagtattcatgtagataattcttatttaggccttatttrtactgaaagaacctctaaactccagttaccctagactctttgtttatttatttatttatctatctatttatttatttattttttgagacatggtctcattttgtccccccaggctggagtacagtggtcagatcatggctcactgcagccttgacctcctgggctcaaacgatcctcccacctcagccccccaagtagctgggaccacaggtgtgcaccaccacacctaagttttgtagtttttgtaaagatggggcttcaccatgttgcccaggttggtctggaactcctgagctcaagcgatccacctgccttggctgcccaaaatgctaggattacaggcgtgagccatcatgcccagctagactcttacatgtacactatacctaccctgaaatttatatttcttatatcagtgttttactcaagactagtgttctgcattggtggaatatgcagtccatagcatgatttgagtggtaaatggaattatctttctgtaacttattaaactgagatgccaccattggtgattcattctttggagcattgactgaagtgaaagtaagaagcaggcggatgatctagaagtgctcaaagaagtaaaactaaataataaaactgttgcaggaattaagggacaggagagaccaatgggtgggacaggaggattttattaggtgagcaccagcccagcggattaacacccaaaggctgagccctgaacaaagacagggcttgacttttatacatgaatttgaaagggggttggccagtttgatggtgtgaaacctgtagggtgggtaagcagcttacagaagcagaacaaaggcagtttgttaaacagtgacaggttttgcaactgaagcatatcttgtgaccttgccatgctgtacagaagggaaaaacaggaacttataaaactttgcaaaataattatgagaatgataagggggaaggcggaagctgaaagagaagaaaaacttgtttttctcatccctgctctgggatggcagggagaggctctggaacccatcccttgagggccctggctctgcagatagtgttatcaaagcccttccagagccctgtctatcgctgggccttgcaktgagtcagcctccaagaaaacttgtttttttttttatatctcctgcttcaaaacaattactttggaacatagattattcaaccaaatctcaaaggagtgggaaggaagtacccacaaaacaccaggaaaagtttaagaagaaagacttgtatgtttagagtataaaattgaaagataaaattggagggaaagagatttaatgacttttgcccttaagaacataggccctcaaagtgccaagtttgccatagagaaacatatctgtcaaaactgggacccaggcactggtggaatgaaatkaattagaggtgatggggatcagtataggacactcagcagggctgagtaggtacaaaggccaggccaaatttgactcctctaggggcagactcaagttcacattggtttaaaattgggttccagcctgggygatcaggctgttgggtgagtttctcacacagcgtctgggtgtaatgaaagcacaaatgtgacaagtgctgccagtgaggctacaaagctagtgaaaggtgggatgtcattcaatcaaatgtgaggcagaaaccagctggcagaggtaaggcatgccagtcttacgcattttatgttattttactttacgctatatatacttttaaattccccttttccacagaggaggtctatagaacaataaaataaaaccccttttagtctcctaagtaaaaggattcaacagcttttagtaaaccaaaaatataaaagaaccattaaattagagaataatagacaaataatgaggttaggtgatcagactgagggatggatacttacatcaaaaagaaaaaaacaggcttccatgattcrcgactgagtctgaaagcagctgtttttaagcacatgttgactgaacagtggctgagagctaagcacttgtcatgactgatcttactggattttcctaataacccatgatgtgagtattaytatttccattattattatttttaaatctaacagggaatctaaaccttggcttgggtaacttactcagagtttcacagccaggtcatggccaaagcagaatttgaacttggtttggctttagaacctgggcttttaatcgtacttgatacctactctgaaggcagcagatattgggaatcaagtcagaaggagactgggattcacagccaggatatccattccctgaagatgctgggtaacaagagactaaggcaggaagtgtggatggggagcaaggtcagaacacgaggagtgtctaagagcatctcctacctgggttctgtactgaacatacaagtagaacttcagggacagtaactttgaaggttaggaagagaaacagaaagggaatctagaatgtgtcacaccattccccccttgcttggctgtgaggccttctgaatatctgaagcaaataggttaattaaaacaaaaggtaacatcctcagatcaccttaatctactctagatggtgccacaaggtgccaagtggtctctatttatttatttatttayttatttattttgagacagagtctattttgcccaggctggagtgcagtggcacgatttcagctcactgcaacctctgcctcccaggttcaagcaactctcgtgtctagcctcccaaatagctgggattacaggcatgcaccaccatgcccaactaatttttttatttttagtagagatggggttttgccatgttacccagtctggtcttgaactggcctcaagtgatctaccctccttggcctcccaaagtgctgggattacaagcgtgagccaccgtgcctggccccaagtggtcccttctaagagaggttttcaagcgacagagtccctggtgtctaaggatagacactgggccattgtccatgtctgggaggtaacctaaggaggtgaaagttcacacagccatgaaataatagatgtagtctaaagaataagcaaaaaagaacaaagaagaataataaggaataaatgaaggmtgagttatttagagctggacgagggcctgtttcagaagaggaagtaagtggacgcagccccggcagctgccacaggatgagtgtgtgatttagataactaacgtctagactgagagctacagggttgcatatttttctcacttcattggatattctctgcacagtcagcaaccatgaaatacaataaactgttaaaaaactttagacaaattaaatttaacagaattaaattgcacaaggaaggattctcaaatcaggcaggcccctgacccactaaccggaataggtttagagacatcctggtgctgccacatggtcagagatgatttatggacataaaaagaaaagtgaggtgcaggaaatggaagtaaggtacagaaacagcccaataggttacaactcagtatttgccttatttaaacgtggtttggctgggcgcagtggctcatgcctgtaatcccagcactttgggaggcgaagtgggcagatctcttgaggtcaggagttcaagatcagcctggccaacatggtgaaaccccatatctactaaaaatacaaaaattagttggccgtggtggcatgcacaggtaatcccagctacttgggaggctgaggcaggagaatcgcttgaacccagtaagtggacgttgcagtgagccgagactgcaccagtgcactccatcctgtgcgacagcaagactccgtctcaaaaaacataaaaataaaaaacatggtttgaacaatcagccacctgtgagtggttgagcatggcttctgtgcttggytgagatttggctacttgttacaacagccattacagtctgtttacacatccaattaggttatagttcactatgtatggagaaacctgtaggccagggatgtccaatcttttggcttccttggaagaagaatcctcttgggccacccataaaatatactaatgctaacaatagcagatgaattttttttaattgcagaaaaacctcagagtgttttaagaaagtttattaatttgtgttgggccggttgaatttcaaagctgtcctgggccacatgtygactgtgggccaacaggttggacaagcttgatttaggccaaacttaaatttagcctaaagctgcctcctcacatattttaamaaaactgagttttkgtttttcaagtttgcctccatatagtactcaaatatgcttgggacttgaaatatatatattttaacttgttatctgtatgctaatatttgatatcstaaggacaggtggcagagtgtgggcaactgaaacccagccagcagaagagagagagatttgggggaaggccaatgccagtgtcatgacactgctcttcacaaacaactgaggacttctagaaatctctgctgtgcagtgtccaccaaagaaattctgaaaattaaatgctgtattgaatacacaggtaaaagcaaacaataagatgataaaatttttggacatagtggtagatctggggttagaacctagggtttattgactgtgaattcggtgtccctttcaaaatatcagattacatcttttagggctttgtaggaactcaaatctgctaagaggtttgtacctgaagagtagtatgagaagcacttgttttttaaacacattcttcaaaagtggcatcttcaatgatttttaaaaagacagtaacatgataagttgccaagactatggataaaaggccgcaacgaaagcagcatgaaacaacaccagccaacatccttggttttaagtgaaatagaaacatagcctggaaaattgaggctgaaatggaatttactggaagccttttgagtaactgttctatgtgggaaatgcgcgaggggaaaaaacaagacaaaatacggccaggcgcggtggctcacgcctgtaatctcagcactttgggaggccgaggcgggtggatcacgaggtcaggagattgagaccatcctgactgacacggtaaaaccccgtctctactaaaaataaaaaatattagccgggcgtggtggcgggcgcctgtagtcccagctactcgggagggaggcaggagaatggggtgaacctgggaggcggagcttgcagtgagcccagatcgcaccactgcactccagcctgggcgacagagcgagactccatctcaaaaaaaaaaaaaaaaaatagacaaacatacaatacctttgggggtaaacaacctttatcccacgtaaatggcaatgcagatataataagcaaatgatatagtaagcaaattgcaatgggaaggggagaagggaaaaaaaaaatatatatatatatatatatatatttacacgcaccagactatgttggattcatcaccagaccgggaagcaacagcctgggctccagagtcagccacttgtccgtgcacagaggaggaggggtctcaagaagcttccgtgtggcctgggaccctggctcattttttttttttttttgagacagagcctcgctttgttgccaggctggagtgcaatggcacgatctcggcttactgcaaccgccgcttcccgagttcgagtgattcccctgcctcagcctcccgagtagttgggactacaggtgcgcgccaccacgcctggctaattttttgcattttagtagagatgttggtcaggatggtctccatctcctgacctcgtgatctgcctgccttggcctcccaaagtgctgggattacaggcgtgagccaccgtgcccggccgaccctggctctttttgtaatgcgttgattggcatgaggcccagtcacgagggcccttctcgactgggctcaaggaacacataaaggtcaacttgtttctgtgattgtctgtttttcaataactcaagtacaggtacagagttatctgtaacagtgctggatgaatgaatgcctcaaggggctcatgcaacctgttacgggacttgaccattgtgtccacgttcaattgagttcaaatttaatatttaacttttcctccacagtagctggcagaattatagggaaggctggaggaacaggtaccaaggttgggtggaagaagctatatggctggagccagcttcaagggcttgaggagccaccgacaccacttccagaatggctgctatgctgcctctactggattcaggttgcagtcgggaggcggggcaggaggcggggcttgggcgggtatcactccacccctttcacgattgcagaccggccttaggacctggcgcagcacggaatgaggcttcgaggccggctaggggaggccgtcgctcatatccgacgtcaccagttcgcgccggcggtagacgaggacgccaacagcagcggagaaacgtttctctttcctctcagtttgcgcacaccatggcggcccctgcccagcagactactcagcctggcggcgggaagcgcaaaggcaaggctcagtatgtgctggccaagcgcgctcggcgctgcgacgctggcgggccccgtcagctagagcccgggctacagggcatcctcatcacctgcaatatgaacgagcgcaagtgcgtggaggaggcctacagcctcctcaacgaatacggcgacgacatgtatgggccagaaaaggtaccggtcccggggtgggcgggcgggccggctgccaggccttgcgggaggagggaagggtggagggatggctgctggtatgggcatgcgcgcctcgggtcgtcggcgtgacggctgtaggggcgtggcctcgccggcgtttccgtccctagtcctgagacgctcgcagacttcggtgctatcggttttgtgcttgaagtgcttgcaccttttcttgccatcagtaaccacggtagctcccattacttttatttttatttttgtgagacagggtctcgctctgttgccgaggctggagtgcagtggcgtgatgatagctcagggaagcctcgacttctcctgcctcagcctccagagtagctgggactatgagtgcgcgccaccactctcggctaagttttgtaaattgtagataaggggtctcactgtttggcccagggtagtcctaaaccctacactcaagcgatcctcccgtctctgcctctcaaggtgctgagattacaggcgcgagccactgagcccggcctacctcccacttaaggattgctcattgagggccaggcggtgtgctgaagctctttcagaaacacatttttcatgacagcctcgtgaagttggagtaataatgtgtttacctgaagcaataatatttctgaaataataggtttactactaatgctagttactgcacttaaaatacattttagaacgtaaaaacttttaccaatatcacctaaagtcttagtgtttggaaatcatattactggcttagaatctggaccaatacacacacgcacactgagggattaaatgaagaagggtaatacagagggaatttaaattcacggctcatcctctactagcttggggactcggacatgggcacattatttgatgctgctgagctagataaaaaagagaatactttaagactggctagtgagttgcttatgtacataaaatacatactggtatgtaataaagtttctgtaaatgtatacaattattattgtgcctgactggcaatttcgttgggcactagggggcagagagctgggcaacaagcacatatcctgtctactcctgtactttaagcaaattctttttttggaagcggtcttgctctgtcacccaaggtggaggttggagtacagtggcatgctcttgctcactgcaacttccacctccggggctgaagcagtcctcctgcctcagtccccgagtagcagggactgcaggcatgtgccaccatgcccgactaattttttgtattttttgtagagacgggttctcaggctatgttgtccaggctggtgtcaaattcctaggctcaagggatccgcccacctctgccccctaaagtactgggattacaggcatgagccaccatgcttggccaaaattattgaacaatgtatttctgtgccttgttccttaatagaacaagagtaagggtttttaattccacaggtatttggtctaatctcaccaaaaggacagtgtcgtgtgaggcacacagatacctggtcaacgtgttaaggtccaccctaaaatgattgatctggtcagcacgtttctctctgcctcaaactgtcaggatgcttttgaaaacattttcaaattttacattctatagtctgcgggaattccctcttcctccacattttttttttttttttaatttttttgagacagagtcttgctctgtcacccaggctggagtgcagtggtgcaatctcagctcactgcaatatctgccttctgggttcaagcgattctcctgcctcagcctcctgagtagctgggattacaggcgtctgccaccacatcgggctaatttttgtatttttagtagagacaaggtttcaccatgttggctaggctggtctcgaacttctgacctcaggtgatctgcttgcctctgcctcccagagtgctgggattatgggcatgagccaccacttccggccttgctccacgttttgaagggtgtggtgtcccagcttcgtaaaaaaagctttattatcaatactgagtcagctgggcatggtagctcacacctgtaatcccagcactttgggaggctgaggcgagtggatcacctgaggagtttaagaccagcctgaccaacatggcgaaaccccatctctactaaaaatacaaaaattagctgtgtgtagtggcatgcgcctgtaatcacagctactcgggaggctgaggcaggaaaattggttgaacccaggaggcggaggttgcagcaagtcaagatcgcaccactgcactccagcctgggaggcaaagcgagactccatctttagaaaaaaaaaaaaaatcaatactgagccacctgccgccagggacttcacataaataattacttatagtgtttaaatgtgagctgttgtgtcatttctgctcattagttttatgcaaacagtttacagacaaggatcagcagccctctggaagtgagggagaggatgatgatgcggaggctgccttgaagaaagaagttggtgacattaaggcatctacagagatgaggttaagaagattccagtcagtggaaagtggagcaaataacgttgtcttcatcaggacacttgggataggtgtgacaaatacttgctaagattatcgatctcataacatctgggtatcttcctgtctcagggaatactgcttacaaaatggcttcttgggcatgactcagttaatcatttgatggcagcttctgtacactgtattagcagttggcctgtggagaggtagaatggggtggtggacgtagcattggcttatgagtggaaacctggctttgctgcttccttcgtatataacttaaggcagaactagagtgccagttctgtgtaaataaggggcagctgctactcagctccagccagttgttgctctttgggaatgcagggccaggtatttgaatttctcaaaagaagtttgaaatctggagtttttttgtttttcagtgtggtcaactaatttacaaattttcggagcagccccaaatatacttgtatgtaggcaagttgcagcctgaggacctccctttcatgatgttgtgcccagcatggttctgggattcctcttgggtctgagatttagacttgtgtgctaacttagctaatggattaattacatcttttaaagtgactcacagaattttttttttttttttttgtaaaaaagtgtgtactgtttaatgtactctgttgttacaggaaaacaacagcatggtgttacggttggataactcaggacatcacaaaaatgttaacaacggtgtctacctaaacagtcatttctagtgcaagcagtaataatgatgaaaagttaaaatatattagatacattatagtacgtattaggcactgaagaaatactgtttggaaagaatgactaggtagattcatttaaaattcattatgagaatttcttctgtcaacttatgtcattgccagtgaaaattcattttagagttcgatctttaagatgtctgagaaattatcttcttaactttttttttttcttaagagcctgagaaattggtgcatcatattctccaggatatgtacaaaaccaagaaaaagaagactcgagttattttgcgaatgttacccatctcaggcacatgcaaggcttttttagaagatatgaaaaaatatgcagaaacatttttggaaccctggtttaaagctccaaacaaagggacatttcagattgtgtacaaatctcgaaataacagtcatgtgaatagagaagaagttatcagagaattggcaggtatgtttctcttagtgattttccataggcattcaatggtaaat

SEQ ID NO: 8858 - DNA, 52745 bp, Homo sapiens
ccttctctttcagaggggcaggtccttggagttctcatttacactctcttctagggtggtctcatccagtcccgtaggtttaaataccatctgtatgttcgtaactctagtactgacgtcttctataaatgtcagactcacagatccaatgtcttctgggtatttttccacttgtatgtttttataggtatcttctaactatctttctgccttaaaatcctttataacctatgttttaaaagggtacccagcattttttttgttgttgttttgagacagtctagctctgtcacccaggctggagtgcagtggcaccatctcaactcactgcaacctctgcctcccgggttcaaatgattcccatgtgtcagtctcctgagcagctgggattacaggcacatgccaccctgcccagctaattttttagtaaagatggggtttcgccatgttggccaagctggtctcgacctcctggcctcaagtgatccatctgcctcggactcccaaagtgttgggattacaggcgtgagccaccgcacccaaccctaggatttgttttaatcaggtataccaagacacacagacacagaaatgactatgatgaaataagtttttatactcacagatctctagaaacaggaaagcagagcatgccacagagggccacacggagaggcaccagtacatgtcaggagacagagacagtgaggagaaaacatagccaagagcctttgttgtggttcctgggttgaggcagggtaagcaagcttagcataggctagttttaattagttcagtagactctggggttataggggctgtccccagttgtctggtacatggacctggggcaattaggaaaagagaatactggcctacagtatgacagccccaggagaaccctgatgaaggaggtgattggaagtatggactctgggttggttggtttgcctatgaaaggaaagctcagaggtgacttgttagctgtatctaggaattagctagccctgggacacgtagtccttctagtgtcgagaaggccccaagatgtcaaagcatcaaatatagaaactagaaaatgtgattattacacttgataatcctttctatttctgtaaagtcagtagtaatgactcctcttttattcctgatgttagtaattttagtcttcttcttttttctttttttggtcactgtaggcaaagaattataaattttctatcttatcaaagaaccaacttttggttttattctttgtattctttttaaattctctattgtgtttctactctaatctttattatttccttccttttgggcttagtttgctcttatttttctagtttctaagatggaatgttaggatattgatttgagatcctttttcatgtaggcattcacagagacatattttccttgaaacaatgctttcactacatctcataaatttgttttcattttcatctatctcaaaagtattttctaatttctcttgtgatttcttatttgacttattatttagaagtatattttctaattttacatatttgtgaatttttcaaatttctgttattgacttctacttttattccattatggcaagagaacatacttcatataatttattttacgattcttgagacttgttttatagcctagcatctggtatatcctggagtattttccatgtacacttgagaagaatatgtgttctgctcttgttgggtgaagagttctatagatgtctttcaggtctacttggattatagtattgcccttctatatccttgctgatattttgtctggttttttattcattattgaaagtagatattaaagcctccaactattattgttgaattgtctatttcttccttcagttctgtcagtttttgcttcatgtgttttgggactctgttgttaagtgcatttaatttatatttattatatatttttggtagattctttgatcattataaaatgtccttctttatctctagtaagaatttttatcttatgtctattttgtctgacattagtataaccactccggccctcttttggttaccatttgtatggtatattttttccatccttttactttcaatctgtttgtctttgaatccaaaatgtatcttttgaatgcagcatacagttaggtcatgttttctatttttgttgtttgttttggtccattatgcccatctctattttttaattggaaagcttaatccatttacatttaatgtaattactaataaggtaggatttgtctgccatttttctattttttctacgtcttttgtctttttttttgtttttcaactcctctagtactgccttcttttgtattaaatagatatttgccagtgtgccacttaaattatcttatcatttctttttttttctttctttctttttttttattgagatggagtctcactctgttgcccaggctggagtgcagtgatacgatcttggctcactataacctccacctcctgggttcaagcgattctcctgcctcagcctcctgagtagctgggattacaggtgcctgccaccacacctggctaattttttgtatttttagtagagatggggtttcaccatgttggccaggctggtctcgaactcctgacctcaggtgatccacccgcctcggcctcccaaaatgcagggattacaggcgtgagccactgtgtccggcctcatgtattttattggttattggttgcactaggaattaccagcaacatcttaatttataaaaatccagtttggattaataccaatttaatttccacagaatataaaaactgcttctctatggcttcactttccttccccatttccttctgctgttattgtcacaaattacatcttcaaaacattgtccatcaacttatatttgtaattactgcattatgtagttgtcttaaatcagatgatgggggttacaaacaaaaaatacgtttatactgtctttttcatttacctgtgtagttacctttactggtgcttttctttcttcatgagaattccagttgctgtttagtgtctttcactttcagcccaaaagactctctttagtgtttctcccagtgctagcaactaacgggctcagctttagtttatctgggaatatcttaatttctccttcatttctgaaagatagttttgctggatataaaattcttggttgattcttttcacattttgaatacatcatcacactaccctctgcatgcatggtttttgatgagaagttaactgtttttattttattgttgattccttgtgcatgatgagttgctactttcttgctgctttcaagattctctttgttttcaaaagtttgattatgatgtgtctaggtgtagatctatttgagtttttcctacttggaattcattaagcttcttggatgtgtagattaatgtttttcatcaaatctgagaaattttagccaaaatttcttcatatattctcgctttcctttctctctctctcttctccttctaagacttccattttgtgttattggtatatctgatggtgtcccacaggtctctgaggctcttttcatttttctttttcgtttctgttccacagaccagataatcatcaattgatctatcttcaagtttgctgattttttttttctttcgcatgctcaaatctgctgctgaacccttctagtgaatttaacatttcagttattgtactttttggctccagaacctttattggttccttattataatttctgtgtctttattaatattctgtttggcaaggcatcattctcatcctttcttttacatttttagagatggtttcctttagctctttgaacatatcaaaaatagctgatttacactctttgtctacaaagttcagcatctgggttttcttaggaacagtttttattgattgctcttatttcctttgtatgggtcttactttcttgtttctttgcaagtcacataatttttagttgaaaattggacatttcaaacaatgtgccaactctcaaagtcagatactcctctctcctcagggtttgattgtgcttattttagtattaggttggtgcaaaaataattgcggtttgcaccaacctaatagttgctgtttagtaacttttttgaactaattttttaaagtgtgtatcttcattgtgtgtgactattgaagtctctacttggtcaactaatgattagatggagatttccttaaacacctggaaccaatatgtctcctagtctttgccaaggggctctgtatgcactttggggtatgtcttcaattttcattaggcagtttgcaactctgcatagcttttatttcctgctagcacagagcctcagtgtcagctagtagtgagaggttaggatcttctcaggtgttaacagagcatgtgcacagccctacacatgcacatggccttctaaattcctgaaaatatactggagcttttcaaagcccctatggacatctcttccttcaacgtttccttttacatttctttgttagtctattgtttgcccctaccgttacctattgcctcagccagttacaatgttaaaatatttgacaaatcactccctcttcaggtggaaaaacctttaggactgagctagttccaaagaggttgaataaagacaacccttttcaggatttttttccagggacccactagataggttaaataatgactcttctttgggaatgagactttgaagtagctccagccctgtctcctccctctggtacaggtactaggaacgtgggctgtaagttttcaaggctgccatggaactagagatgggggtgcgataggactagggtaaattaaaatactataaatattgctgttcttactgagagtttgctgtttttcctgactaaatgccagatgggttgctgcaaacctgtgactaatttctagggctctaagaaagttgattctgacaatttttgtcagttctttccttgcttcctttatggaagggcaaacttgctgggatacttaatccaccattttcactgacatcactcttcctttctttttttaaaaatgttattttattgcaaaaaaatatggaaaccacaactaaaattaactttttttttgagacggagtcttgctctgttgcccaggctggagtgcaacggtgcgatcttgactcactgcaacctccgcctccctggttcaaactattttcctgcctcagcctcccaggtagctgggattacaggcacacaccatcacacctggctaatttttgtatttttaggagagatggggtttcaccaagttggccaggctggtcttgaactcctgacctcaagtgatccacccacctcggcctcccaaaatgctgggattacatgcgtgagccactgcactctgcctaacattttaaattaaaaattaacattttaggctaggcgtggtggctcactgtaatcccagcactttaggaatctgaggtgggaggactgcttgaggccaggagttcaagatcagcctgggcaacaaatgagacagtgtctctacaaaaaaatataaaaattatctgggcatggtggcacgtgcctctaggcccagctacttgggaggctaaggtggaaggttcgcttgagcccagaagttccaggttgtagtgagctatgactgtaccattatactacagcctgggtgacagaccaagaccttgtctctaaaacaataacaaaaacaaaattaacattttatacaatgaaaacattaaaatcacaattaaaatccaagagaaaacccttcattcaatttcctaattaaataaattcattttcatttgtccatgttactatctagtctttatccatacacttattatttacatttttgtagtaatagtacaggtaattttttttttttttttaaagatggagtctcactctgtcgcccaggctggagtgcagtgtcatgatctccgctcactgcaatctctgcctcccggattcaagcgattctcctgcctgtctcccgagtagctgggattactggcgcccgttaccacgcccggctaatttttacatttttagcagagacggggtttcaccacgttggccaggctggtctcaaactactgacctcaagtgatccgcccgccttgacctcccaaagtgctgggattacaggcgtgagccactgtgcctggcctatagttaagatttttatattcatttttagtgaatgttataccgtataccgtaagtactctccccccacaatctttctgcctctcatcttcccttttccattttcctaatacctcctactgcctcctctcaactacccttgtgtgtttcttcatctttctccgtgcttattcaaaaatatcctgccacacacacacacacacaggcttctctttttgttattcagacatttaaaaaaattaattcttgatcattcaacttgattatttagacatttctgtacagccatcttttctcgtttaccaccacatcatggctgtctgcccctctacatccgcacacggagctctaacgcatgcttgttaaacagccttcgtaatagtctttaaagatcaaccacactgttcccacgtaaccctacctcccaggtagggttcccccagtaacactttcacacataacttatttactgttccttttacttctggaagattccgagaggaaagattgctgggtcaaaggtcacacgtgtttycaattttaatagctattcctggattacctcytcaaagggctctaacaactcgcattgctctcagcgtgtgagagggtcctttgctctgaagggtcttctaaaatatttgttcaatcrttacttagcaggggctgggagtaacggattttattttattttattttattttttgagacggagtctcgctctgtcgcccaggctggagtgcagtcgcgcaatctcggctcacggatttgctcttttaaaggacatacccttttatgtttaaatgaaggaactcattgatgcaccgaggcgaaaggaacctttaattaagtgcgtcttctatgcggagtgatcgcttttgtcacttgttcgaggggtgagagctcccgtcagttgtccctgtttctgtgagccgtctacgaagcccgggcttggcctgggcgacgctgagcggctttaaccggcggcgtccagccggctccgccagcgctgccgccgccctcgaggctccctctgactgaaggcgcgctgagcatcgcggcattaggggctcctggtccctcaaacatccagggaagccattttcagggactaggtactgacccccgcgagccgccacagccacagcccgcgctccgggccgaacgcccgagctcaagagctcccgagcttccgtcgggcggcggcctcacagctgggggccctgaggcggaaggcgcagccgctcagctgcggaccgggggcgtggcgagggcgcacaggttctgtttttcgccggcccggggccgctttcggtttcgtttcccgccggcgtctccaccctgcgagagccgcccgccagccagcgtccgccgccgtccgcgtcgcgccacccgcggtccgacgggagcaggcccagcggccatggcccaggccggcgtcgtcggtgaggtcacccaggtgctgtgcgcggccgggggcgccctggagttgcccgagctgcggcgccgcttgcggatgggcttgagcgccgacgcgctggagcggctgctgcggcagcgtgggcgcttcgtggtggcggtgcgggcgggcggcgcagccgcggccccggagcgcgtggtgctggccgcctcgccgctgcgcctgtgtcgcgcgcaccagggctccaagccgggctgcgtggggctctgcgcgcagctccacctctgcaggttcatggtctacggcgcctgcaagttcctgagagccgggtaaggcgccgcgccgggagcgacggcgggcggaggtccygcgcgcccycacgcacttccagcccgcttgggggtcctacttgaagtttgagcagacaattcggtggctctgccctgacctcgcaccgtcattcactaaagcgagcgtttaatgagcacctgcggagtacctggcacagtgcgagggactcagggtcgagtggggtcctctagacgcctggggggagagagtgatttacatagagcatggtagtgccgggtggaacacccgggtgtggccgtgtggggtggggagggagggaggcggcggcttaggggaactccacgacgccgcgggtcgccccttgccagctttgaggccagacaatgaaggttttctctgcccagcagctggtagagatctttaaacccagttcaaccctattaatctgcttacaaactggaaaatgcagactccctgccatcgcccacaaggtcctggggcactggtccctgcccacccaggacccttctgtgactggaacacccccccccccccgggcatttctgggagcctgggcatttctgggagtctttgctctgcctggaatgcccttcttgctcttggttggccctatttgttaatccttcaggcctcaacctaaagatcacatcccatttgaggatttttcctccccttactcttggtcacagggaactgtttattttcctcatggcacccagctgccagtagaatagaaactccctgagggcagaggctccagctgtctccccagcacttagcgtccatgttctgtgcatagcatgtggccagtgggatgtgtggaagggattgctgaggtttatgctaaagaatttrggcctcaccctggaggtgatggggcgggtaaaatggcaggagagagcaaccatcaggtttgcgttttaggaagtctaaggtagtggtgtgggtgccaatttaagggaggatgttgtgggggaaccactgggaagctagtcatcaaggagaattccttcctcccctgctccctcctttcttgcttgctccctgttttgtgtgtgtgtgtgtatgtttgtcttaatagagtagatatttcttgctcatgtcaggcccagtagtgagcatggggtgggggccttgatccatacagtcattcagggatgcaggctgactgacctccgctctgtgcccctcagcacatggctcttgaggccagcctaggttatcaagttcgagggggctgatcgaaaagagggatgcatgggaggtttttgtgggccaggtctagaagtggtggatttcctttcacccacatcccmttgaccagaagctgtctcgtgaccctgtctagatgcagggtgactgggaaatgcctctaggaagcagctgtctggaagtatctagattagagctttccaagggctatgtgtgtgagaaatttgggatagctggtgacggtgtgatgagaggatatgtgagaggtgacgactcttcagtctctgttcctgcggtggcctgggtgttgttcactgagagagcaagagagggttttagtttggaagcatgcccaggaggcagctgttcaggtcagaagcttgggaggaaggccagggccccaatgcgctgggctggtttgggagatattgggcggtgtatgttgtagttgcagccccaggagtggatcagatctgaggtagcgtctgaggcctgaaaagaggctgagggtggaactctggggaaatcagccttcagggatgaggcagtccagggrasagcagggaacaacagcccacgaggaggaaggcacacagcaaatggtggctggatagagccactcatgggggtaactggtagatctgtttcatgttcatatttggtaaaataaagatggcagccctgttcttaagctagttcccaaaatgtggggtcaggtctgacttgtctcggaaatctgtagtgtgatatttactggctcagatgaccttgagttttcttctttcttcagttttctcttttccttgtggtttacacaggtgagtttcttgaaccttccatttctgactcactttagggagagtgggtgtggttggctgcacttttctgcttcccctgtgactctgcttgtcttcctgaaccgcagggtcagttcttttagaaatagctcatcagtcctgctgcagagctggtacggagtcctgggtgcctgactcttagtcctctactcaggaggcattgagcctggtggtctagggcacagtcccaagatccagcccaccttgtttcaacctgggctctgctccttgctagctgrtggcttcrggcaagtgactttacctccaggtctcagttccctcatctgcaaagtggagttaatgatattactaccctcacaggctggttgaggactgaatgattaactcataaaacattttggcaatccccgatatttggcagttgctcaataaattttagtagtcattatcattgttaccatcagtcatcgttacacttattagatatatttggctctggcagcaccaaattatttgcccctcttctggaatgttcttcctttctcttgctgtctcctcctcaccctttaagtattccactcaggctttatgccatccagcatgctcccctgatttcttccccagttctctcccagccctgactggctcaggtgcccttccgctctgcgctgacagattctgacaacagctgacgttgcactttccactccgtatcagagtctcctctatgtctgtcacctccgctagatgagggaaagagagcaggcaaggatggcttcagggtttttggtctgtgcagtgggagagggaagttgccttttactgagctgggggattctgtaaaaggtgcaggtttggggtggatcagggtttggcattctcctgagatgtggcataggaggcatggcagtgccagagtcaaacaaatgctgttggcctgactcttctgggtcctggtgactcaggcagtcatttaaaggtttatctttgggttctcagggcatggtgccaatgtctggctcaccctggtgcttatcagacgcttgtggatggaaagaatggaggaagagagcaaaaaaaaaaaaaagagctaggttcagggctctgtgtgtgtgtgtgtgtgtgtgtgtatacacgcctgcacgcatgcacatatgtaacctataatgataagatgccatgctcattgattcagcctgtggctaactgcttaccgactgactgctgtgcagcaactcctctttgtcattctcatcaaatgcttgttcagaggcgctgtcctgggccttagaccttgcaaggccccatctcctccttggtaaatacacattggattttttgttgttgtcatgtagacatgctggtttttctttttttctttcttttttttttttttgagacagagtctcgctcctgttgcccaggctggagtgcaatggcgcaatcttggctcaccacggcctccacctcctgggttcaagcgattgtcctgcctcagcctcctgagtagctgggattacaggcatgcaccacctcgcccggctaattttgtatttttagtagatacaggttttcttcatgttggccaggctagtctcgaactcccgacctcaagtgatccatccaccctggcctcctagagtcctgggattataggcgtgagccaccatacccagsctacatgctggtttttctctggtgcttgtaaatactgtcaggaagtgtttctgaaaaattgtcatgaagactgattttatcagctttcagtttgccagcgctgccataacaaagtaccatagactaggaggcttaaacracagaaatcgattttgtcacagttctggaggctagaagtctgagatcaaggtggcagggttgatttcttctgaggcccctctccttggcttgtagatggccaccttctcaccatgtcctcgcatggtcttccctctgtgtgtgtctgtgccccaatctcttcttttttttttttttgagactgagtctcactctgttgcccaggctggagtgcagtggctcactgcaagctccgcctctcgggttcatgccattcttctgcctcagcctccagagtagctgggactacatgcgctcaccaccacgccccgctaattttttatatttttagtagagacggrgtttcactgtgttagccaggatggtctcaatctcctgacctcgtgatcctcctgcctcggcctcccaaagtgctgggattacrggcatgagccaccgtgcttagccaaatctcttcttataaggacagtagtcttgtgggtttggggcccaccctrtggacctctttttaacttaattacctctttagagaccttctttccaaatagagccatatcctgaggtcstgggagttaggactccaacatagaaattttgaggagactcaattcgacatataacaccagctctgcttctttgcaggaagaactgtaggaatagtcacagcttgacaaccgaacacaacctgagtgtgctgagaactcatggcgttgaccacctgagctataatgagctatgccaactcttgtttcagaacgacccctkgcttttgccagaagtgagtgccaggggaagtctgggttccacagctccctggggacattcctgtgtcttgggaaatgtaatgactgggagtggaatgggtgggcccttggtgatctctggtctggtttccacctgcagaaatttggaatgtggagcagaaggagcagtgaagttcaagggccagctttgccaacaacccagttccacaaacatcacacagatgccatggatagctgkgcgactagggctgattctttaacttctctgagcctctcagtgtgctccattgagaaatgaaagggtggtatttggccttctctaagatgctttaagccctcagagcctctttgactttgaattgtagaaaagagagctcagagaaaactggggcttggggaagggagagttgatgagtcagtgtgggaagagtataggtagattgtagaggtccttaggatgtagccatttgatttgcattgtctcatgtgaaaggagcagctctagtcactttgaagttcttggattttcccagtggaggggctgattctgtgcagtctcctttccatttcgttcccmttttagccaagggcatttgttagcagccgtcatctagagtgagggatgtaatagctgtgttctgtgtggatgatggaatcacagcttgtgaagcccctttctcaccagtggactggccactggggaggtggtgtcgtgtgagaccttcctgaactggtggttttttccctctctgtcaacagatttgccaacattacaacaaaggagatggaccccacggctcttgtgcctttcaaaagcagtgcatcaagctccatatctgccagtattttttacagggggaatgcaagtttggcactagctgtaagagatcccatgatttctctaattctgagaatctggaaaaattggagaagttgggtatgagctcagacctggtgagcaggctgcctaccatttatagaaatgcacatgacatcaagaataagagctctgcccccagcagagtgcctcctctttttgtcccacaggggacttctggtaaggctggtggggagtggtaaggctggtggggagcacgggaggtcctgggctgggggttcccggattccagctagccattacatggaatgtgtgactttgggcaagtctggtgctgcttttagtaaaatggagttgatgatgctttcctaacaaggcagggagtgcgggggtgaggataagttgaaatcatagacatgatcaagcatgccatcctagacaaatgtgaattggtattgatggtgagtgaattctggatgggcctagtctgcactgaaatgggagacttggctcctccccctgtgcagtcacccctatcttcacccccacgagagcatgctcttcagggaggaacccaaagttaggaatgctgtgctgcacagctctggggagcattccttgtgttgtattctgattttacaaaatgagtgaaagaagcataccttaattatggcattggctgtattcctgacatcartaagtagagtttttgagccattgtaaatttgctttgttccctgctcatctccagcacctagacagtgcctggcccacagtaggtactctgacatttgttgaatgaatgagtgtgctaggatacttattttttaaaaaagacygtcaggtttagtgacaggcagattttgaacagagatttttatttaataagcatttcttgagtacctcttgtggggcagatgaataatgtggtctgtcagggagatgatgatacactggcattcattggatttcacagtatcagccattggctggccattctgttacccactctttcattcagcacctttgtgtgcttgccacatgctgggcgctgtcttgggtgctggttattccttggcgaagctgagacatgcctcccctcagagcagaatcaaaccctctcagctgtagtggtggctacaattttaatagagcacttcctagaatgtcagttgcatgccaggactacctgcaaacaaaagcaccactctaattgtacctgacttttatatttaaaagttgtcttttgaatttgttttttctttacattgtcttcaattatgttttgttgatttctttcagttgtaggaatcctagaagtagacaggttttgtattaaatagatctttaggagtatcttacagccttgaatacagttggattatagccttgtcagaaagggaggagggatccactgccagtgatgtcagctgcaagagcagtcaccatcgtcgggagagagggagatgaccttcggggtcccatagacctagattttgagtgaagtatctcaggggcttataaaaagaaaagggaagatgaataacgacaggtgacactaaatagggatkgcaaattaattttatgtgctcattggggttagctgggtgagggtaaatgtcataggtaaagactcattggcatggtgctagtaaaggtaaaatagaaaggatttatgtgccctttttatattaagatcctgataattaacctaaaattaattaaaggggcttcattttgaaatgtggactttctttttattactcttgtcttggtattagtacccaattctgatagttcattaatgaatgtttgctatatagcttcaaatctagtttataaaattagccctctgtttgccctcaggggtcatcacaaccttaggcatagaaggaattgtaagatgcctcaacatgtaagacaatggttctccccttattacaaaagtgtcccaagtcccacccctggaggttctgattcagtcagtctggagtgaagtcagtctagggcagaatcaggcacttgtgtttttaaatgggtctcctagtgaattgartggacagcgagagttgagaaaggagtccccttcatggagtcctggatctggcaagcagccatgtggcgtcaggctgccagcctgtcactaaaaagtagwggatccacctgtgtaggagcactttcaccccaaacacgatagggctttgtgagcttgcgttgcccacttttgtgcagagaactgaatgaatcctctttaactctcttttataccccatatcagaagctgacatatctttgtggtgtttctttgcagaaagaaaagacagttcaggttctgtgtccccaaacactcttagccaggaggagggtgatcagatctgtttgtaccatatccggaaaagttgtagctttcaaggtaagttggargaggctccttcattccacttgtgggaggggtaactgcttgtcattcccagagctgtgctctgaagtcaccccctaccaaacctctaccccatccggagaggatcagggcttggcactttggccaaaccaattctgaaggtattttgttggggagttgaagatggtagcaattctttgagttttcagaaattaaatgtggatcatttttgggaacataactggttcatgcaccaaatgagtgtcaagtattgagccttggtcagcttagcatgaggtcacagacctgcacaggacagggaactgctcagcctggtgggaacaaagataagggtgatgataggctgagagctcccttagaaactggaaaggacctcactgcgaaggaaacacttgtgttagctcttggaggatgagtagttgtttaaattggggttttttttctgtattgatccagtgaacaatccagtgatctcttttttatcagaagcagcaattctggtgtgcatgtgcstgtctgtattttcactaaacctttgttttcttcttaaatgctgtcctgggctttgactgaagaaaggtttgttctcaaatttggtgactccccttgacaaccaccaaacttcttgtttcattttcagtttttaaaaattacccaagcaattaatgaatactttcactctgtaaaacagttcagtaatacagagtgaagcatgaagtcctccatcgtctttgcccaaaggtaaacacttcccgtgtggttgtgatatttgttttatatgtttttaaacagataggagcatgtgataatgttattattcaatctgcatcttaacattgtatcttggrgattttttttccatgtcagtatgtgaaagtccacctcattttaaaaacaagtgtgtagtagttgattataatgatgttccattgagcattgaagtacatatatgtgagtatttccatagatagattctggggaatggaatgataggtcaaggaatatgagctatatatatatayacacacatatatatgtgtattctgaaagcaatattactgagctatagtttacacaagctaaagtgtaccattttaaatgtatactgagttttgataagtatatatgctcatgtaaccatctctaccatcaagatatggaaccccctccaaaaacattgttttatgctcctttataattaatcctcaccccctagtttgtcacgcccaggaaacccctgatctactttttgtcactatagattagatttgccttttctagaatttcacatacatggaatcatacagtgtattatcttgtgcctggcttctctcatcagcatgtttttgagattcagtcatgctggcatatcgatcatttgtttctttttattgcacagtagtattccattgcatgattgactgcaatttgtttatccattcatatgttgatgaacatttgggttgttgccagtttttggcttttacaaatacaacttctataaatatttatgtataagttttcatgtggatatatgtttccatttctcttgggtaaaagacttagacatagttactgggttatgtcatgtgattgactttgtaagaaactgccaaactgtcttccaaaatagataataatattttatgttcccaccagcaacgtgtgagagtttcagttattgtatattcttgctaacacttggcattgtcttttaagttttagccattctaatcagtgagtgatgatgtctcgtggttttaatttgcatttccctgatgattaatgatgtttaacttttatttacatgtacttttggggcatctgtatattttctgtgaagtatctactcaaatcttttgcctattttttatawaacagctttacacacacacacacacacacacacacacacacacacacacaaaaggggtcttcagaaagtttgtggaaaatgcatattatgaaaaaattatgcatggagttcaaaagttttgcaccaaaataaattcatactaacttgtaataacatatctgaagaggatctagtttgaggcactaagaaggataagacatcaatttggaaagagcccctatcaaagcaacatgaattttgctgcagttgaagcaagaacaaatatcaaattaatggtgactcttgggtggcagaatgacaaaatcattgatgctttacaaaaaagtttatgaggacaatgtcccaaagaaatcagtttataaatgagtaagtcattttaagaagggatgagagaatgttaaagatggagctatgcacatcaatttgtgagaaaaaaaattaatgttgtttgttccttaattgaagaccagtgattaacagcacaaacagtaactgacaccagacatcttgattagttcagtttatacagtctgccagaaaaattaaaaattaaatttgagcaaactttccactctatgagtgccaaaaccattctgcctggatcagctgcagacaagagcagaactttgaatggaaattttaaacaagtggtatcaagatcctgaagcatttctctgaagagttgtaacaggagatggaacatggctttaccagtaggatcctggagacaaagcaatggctcctaaaagggggaagtggcccagtcacagcagaagtgatcaggagcagaagtcacagcaacagttttttgagatgctgaagacattttacttgttggctttctagagggccaaagagcaataacatctgcttatgatgagagtgtcttgagaaagccaaaactttagcaaaaaaatgcccagaaagcttcaccagagggtccttctccaccaccacaaggctgctgctcattcctcatcaatcaagggcaattttgcaagagtttcaatgggaaatctgtaggcattcactttacagtcctgatttggctctttctgacttctttttgttttctaatcttaaaaatctttaggtcggtcatggtggctcatgcctgtaatctcagcactttgagaggccgaggcaggtggatcacttgaggtcaggagtttgagacccgcctggccaacatggtgaaaccctgtctctactaaaaatacaaaaattagcygggtgtggtggcacatacctgtaatcacagctacttgggaggatgaggcaggaaagtcacttgaacccgggaggtggaggttgcggtgagccgagaccgtgccactgcactccagcctgggcgacagagtgaaactctgtctaaaaaaaaaaaagaaaaaaaatctttaaagggcacccatttttcttcagttaataatgtagaaaaaagactggattgacatggttaaattcctaggacccttggttctttatgggtggactaaatggctggtatcgtcttttacaaaagtgtcctgaacttgatggagcttatattgagaaataaagtttatattttttatcttttaattccgttttccatgaactttttgaagtccacttacatatgtaatattaacacagaattgggcagccatcatcataggcaatatgaaaacattttcaacacccccaaagtaaccccgtcttcattagcagtcttccctccccccagctcctgatgactacagatgaaggttccatctctatagatttgcttgaatatttcatataaatggaatcatacagtattggtctttagtgacagttatacccatttttattgggttatttgatctcttawtgagttgtgttttgtatatgatttatactgaagatatatccttccagtctttcatgtttatttcctttatagtgtacaggtattttaatagtggtgtccagataatattttttttcttttatggtttgtgttttttgtatcctaaaaatatttgcctattctaagcctacagaatgttttctcttatggtgttttcctagaagtttcaggggctaggcttttaggttgaagtctagctgtgaatacttgttctcttaactctgatcattctgtccttaggtatcgctgtttctgtgtgagttgctgcctctctttgaattgttttccttcatgtgttgagcgactcttggttgtctgtcacgttggtgcttgagaatcccgtatacctgttggttgatttccatggggctgatttggattccaggccctcattctagtgatggtggggaagaggcagaaggtcctgcttggtgaggtgggaggctggcatgtagcctaggactgggacgggggctttggtggccgtctcatttgcttttctcttgctctaacccttatattcacacttagtttaactaggaagtgcacagcaagcttccttcacacaagcaagttaggggaagggagtgcctctgccaggggctcccattgttctcattgggattggcctgggtatcgttcttgctcctggcttcatctgactctgaatctgtgatgaccccagatcttttctacttctgtggtatgttctgcacattttgtctgcatttttctctcttctttttatatctatttgattctcattgctccatagttttagcaattcttgaataattctggtcttttgatggtattttttattgttttccagtgcttttggatttattattctctctggcctgttatttcaaggactatagggaggaagggctggggtggatgtggtgttttgtctgccaaattgatttgatttctatgactcacgtcctagaaagcccctggaatgccaacgtgaggtagggaacattagaaggcgggaaaagaagttgagaaaggggacaggaagaccaggacaagggaaaggaccttatgtctctaccgctgtgctgggactaggctctcaccagctgctgtggctgcagtggcttacctggtgcctcctgtcctgggcaccttccagctgtgaacagtgtggtctatagctcagctttgtttcagaacggaagcctcaggcctgctgtttgattatagtgcattcccctggcccccatgtccttcctgaggaagcatcagcctggagggccctaaggagtgcaccttccccaggatgtgcctgtttgcagggagatcctgtctcaggctgtccatagtacacctgtgcytggggtttgtaggtatagcatttgactactgggatgccctggggtggccttctgctctcatccctgatcatttcctctaatgcctttcagggagggaacaggaactggttggttgtgaccttggaccatagctatttgtctttcctggcccagccctttaattatctgttgtgtacacacctgcttgagagagttcaagaggttcctgacctagtgagctgtccatgttcaaactggacaagttaggagatcttcagtccctggtgtggctgttttcagccttgttgaacttagaggagtttccttgcttgggtgtccccaccttgttccctcagtcctctcagcctggcactctcttctgccctgtctgctcggccccatacctgatcacacaatcccaggcaccctcccaccctcctccatgggacttcccccaccaggtgcttttgcagagcctgggaaagaagtggcattgagatgtgcctgaaagaatgcacacaattttagaaaattttaatttttttcaagtatcaaattagctagtttcattattattttgaaatacaaattaaaaatgtacaaaggacactcagtaagaaataagtcsccctcacaccagttttctccagaactcaagtcccctccaagaaacagccataattatccattctttgaatatcctttcatcgagactgtatacgtgtacaagggtatgtgtctgttcagtttccttacacaggcacgctagcatggctttctacctttttcacttaattagatgtataatttttggaatatattatatcttcttgtggttcaaagttcaaaacatgccaaaatgacagaagtctttgcttataactttgtctccagttaccaggttccctctgcaagaaataatatgtgcatgtgtgtgtgtttagttagaatatgtctaaacttacttttttttctattttttacccaaatagaggcattctgcaccttgttctctatcttcctgccttagagcaaatatctcagaggtagctagctgcatgtcacagtgcaaagagcttctcattctttttctctcctttctccctgtcctctcatgacacttctctgtgtggatatagcagaacctcacataggctgttgacaggtagggagagggtgtgggtggcgttcccggtggtggcaggcaccagcaaagacagggcaggcagcgtgtgcttggagtgatgagagaagtgaggatctggctgcccaggaggaacatggggttggtgaggggagcagctcaccggaacccataggtctgggccattgtgtggatgttggtgggagagtgtcagggaaggagtgagcatgttgttagccagaagagatgcaaggagcctgtaaccatgctgctgacctgccttcagttggacgtgttgggttgggatggatttctggtagggatgaatctggctccatctttgctgtgatctctgcccgtccacctgccacacagagagtgatattgaggagtcagactgccccctgcagtgatgagacctttgaccttcgcataatcagcttcttactctcattaaataaagttcatagatgatataaaccatcaacatacatatttctaaaaaattgccaggtgtggtggctcacacttgtaatcccagcactttgggaggccaagatgggtggatcacttgaggccagaagttcgagactagcctggccaacatggtgaaaccttgtctctacaaaaaatacaaaaattagctgtgtggtggtgcacacctgtaatcccagctactgaggaggctgagatgggaggatcacctgagcctgggaggttgaggctgcagtgagccgtgattgtgccactataccccagcctgggtgacagtgagaccctgtctcaaaaaaaaaagtaaggtcctgttaaaaagtgagacataaagaaggaagatgtatgtcttagtccattttgttgcttataacagagtacctgaaactggataatttataaagaaaaggaatttatgtcttacctatatggaggctgagaagtccaggttgtcaagggcctgcatctgatgagggccttcttgctggtggggactgcagagtcctgaggtgctgcagggcatcacatggcaagggggctgaccatgctagctcaggtctcgcttcctcttataaagccaccagttccactctcatgataacccatacacccattaatccatttatctatgacccagtcacctcttaaaggccttaccgctcaatactatcacattggcgattaagttgtaacaagagttttagaagggacagacatttaaatcatagcaatgtatataataaaatgcaaaaagtgtttctgtatctaaatgctcaggcatgccggcactgaaaaaacagactccaccacacatttcagaatgttcccaggtcagtgggcagcaccacacctgttgacaaccacaaggctagggcatgctgtgtattgcccagctatcttactcctttatgtttttatttcagataagtgccatagarttcatttccatttgccgtatcgatggcaattcttggatagaggcaaatgggaggatttggacaacatggaacttattgaagaggcatattgcaatcccaaaatagaaaggtaggaaatatgtcccttgtctctgctttgtgcctgggcttctgtgtgtgacacacacacacacacacacacacacacacacactgtgagcagcctagtctggaggtgcctgggcttctgtgtgtgacacacacacacacacacacacacacacacacacactgtgagccacctagtctggaggtagaaggtgggctggaatcgaaagtcagcgttcatactggcagtttggtggctttgttctcccacctccctctcctttcagacaggagcaatggggaaaggagaagatggtaccaagaccaagtattaagttctcaattgtttggtgctgggattgatcatgtacatctatactcattattacagaaaagcgagaggtgataatttctatttgtgaaattttggcctttggcctatacagccataccgctgaactgctgtttatggtttaacctttaactttttttttccccaagcatgtcctagtattttcccttagttagttcagagtaaataggggattcccggatagccttcttttcagatacttaacatatttttcattgaacttgctgaaatatgttgccaagaagagaatttgagcctgctttttgagtgtgtaaaataaatttgcacttagagtacaattacgtgcaaattgctattggtaaagtatgtgaaaccaattactcctgttaggaggattaaatggttcacataccaccccaatctttctttttgaggcaaaatttacacacagcgaagagcctagatattaagcatacagttcagtgagttttgacaaatacatacacttgtgtagccagcattctgattgagatacggatcattttcctcaccccatctccttccagtcagtgcctactccyatcgttcaccaccgttctgacctctgtcaccatagatctctgtcttgcctgttcttgaacctcatataaatagaaccgtgtggtatgtactgttgtgtctggcctctttcactcaaattcttcaccctccaaatgggcaaactacaaggtcagacacttcccggcagaggaagcacaggtggccaataacgtggatctggatttatttctgccactcattataattgtcactgtgacccactttttgtatatttcttttctctttttgatcttcttgtagatttttttcctcacttggttttttccctttactagtttggacgttatatactgaatttttattttttcagtggctgctctggaaatctaaacagactctttatcttaacagacttttagctgagcttaagccaatcagtgccttttgtcattctgtcaaacaatgaaagaaccttggacacttgaattctgactagtttcattcaaacttatttactaattatataaatttggccagattacttaatctcattttacctcagctttactatatgttaggtagacaaaataatagtttctacgtcacaaggttattttgagaattaaatgagttaatatgcataaaacactcagatcactgccaggcacataagatgtgggtcgagcgcagcagctcatacctgttatcccagtgctttgggaggctgaagtgggaggattgctagaggctgggaatacacaactagcctgggcaacataaagagaccttgtctctacaaaaatttttaaaaaaattagctgagcatggtggcgcgtgcctgtagtcccagctactcaggaagctgcagagggagcaccatttgagcccaggagtttgatgctgcagtgagctatgattgtgtcactacactccagtctgggtgacagagctagatcttgtctctattaaaaaaaaaaaaaagaaaaagatgcactgtatgtattgctgmtataatatttttaatcctagaggttagaaattcgtattgttttaggcagtcagtatttgtttaagcttacacaattaccattttgtttcttactcaccattcctttgctcacacttctccttgtttatcattttctttctttaagttcctctgttggaggttgctttaatgagagtctggaggtaattgtgtattttgttagtctgaaagggtttttattcccttctcattcttgaaagatagttttactgggtattttccctcagttcttcaaagactatttcattgttgtctggattccattgcttctacttagaagttagctatcagcctaaatcgaggtggtattagttcacttcttagggctgctgtaacaaattaccatgaacttgatggcttcaaacaacagaaatttattttctcggttctggaggctagaagtccaaactgaaggtgttagcagggccttgctctgtctgaaggctttacaggaggatcctttcttgcctcctccaggattctgatgcttagaaatccttggcatgccttggcttgtagacgcgtcactccaatctcagcctccattgtcacaggcatttccccatgtgtctgtgttcaaatttccctcgtcttaaaaggacatcagttttggattagggcccacccgaatccaatatgacctcatcttaacttgattatatctgcaaagaccctatttccaaataagatcgcattcatgggtaccagggattagaccttcagcatatcttcttggggacacaattcaatccagtataatagatagtctgtttttttctctctggctgtttttaatatcttgtcattctttggtgctgtgcagtttcactaaaatctgtgtgtggatttaaaaaaatttatgctactcatattttgctgtgctttctgatttcctcagccatgatctccttaagtattccttctctggaattctcattagatatatggtgaagtcttctcactttatcttttatgtcttctaacttctcttttattctctttctaaactctgccacatttcttcctctcaggctctcagttcattagttcagactcttctgagatgcagtgtgtcccatcgaagtatgatttttaaatttcagttaatttaattatgtttaaaagttctaaggtcgggagcagtggctcacgcgtgtaatcccagcactttgggaggctgaggagggcggatggcttgaggccaggagttcaagaccagcctggccaacatggtgaaactctgtctgcacaaaaaaatacaaaaattagctgggcgtggtggtgcatgcctgtaatcccagctactcctcgggagggtgagacaggagaatcgcttgaatccgggaggcggagatcacgatgagctgagatgatgccactgcactccagcctgggtgacagggtgagactctgtctcaaaaaataaaaaattaaaaaaaagtagtaaaaaaggaaaagaaaaaaagttttggagggagtggaggagaaagaaaagaataatgaatagtaaaagttctgtttttttccttaaatttacccagtcagtttttatagtctcttgattcttactcatacttttgatgctcaattcctttttaaaaaacatatcacgtatatctgcatctgagaatactaatgtttatagttcagggtggtctgattttgtttttgttaacttttgctcatagtgtctttgtttccacattttgtgatcgattttgagctcatgtttgatttgatggaaatttctttggaaattctttttttttgagatggagtctcactctgtcgcccaagttggagcgcagtggtgcggtctcagctcactgcaagctccgcctcctgggttcatgccattctcctgcctcagcctcctgagtagctgggactacaggtgcccgccaccactcccggctagtttttgtatttttagtagagacggggtttcactgtgttagccaggatggtctcgatctcctgacctcatgatccacctgccttggcctcccaaagtgctgggattacaggcgtgagccaccatgcccggccaagaaattcttttgaggcctgagttgaaggtgaatttctccagaggggatgtgtgtttgcttctctgagaactgctaccctgggtggtctttgcagctaattctcccaaaatgtgaatcagtctaaaacttctgtgaggcttgagtggtttatgagttctcagaggaattttttcctcctttatccagaaccaacattaatacaggcaggtttccttgccagatgtctttgcaaggcaagtcccctctccagtccccctttactaaggtgggtcatcttttagggtcctggttttacgcagaggtatctcttttgagattcagcctcctgccgtactcagaccctacatttgtttcctgcttcccttttgcggccaaagcccaggctctctgtcgttactcatcgatactgccctgggatagctgctggctctcgccctcctctccgctctccagtttcgtaccttcctttggtctttaggcagtactgcgtttagaaagggagcgtgtcctggtggctcaggtgcaggctgtgcagcccacctgcccacctgaaagcccagctcgcccgctgactagctgtttgaccttgaacaggtttcttcaccttcctgagcttctgttttcccgtctgtgaagtggagataatagtctcaacctcatagggttgtgaaaatgtcatcgcctaatacatataaagtgcttaatgcagggtctggctcacacagtaaacactcagtatatgttaactattgttatttttggcttctgaggacttccctttcttgccagctcagcagtgaattttaaaaaagaatgatttcaccagcatcttcggcattttgtactgagaggaattttcgtcataactagtctcccacattatcttgattttgatatttttatacctcaaaactgatctgaaaaagcagtttcctctacctctgggaactttttctaaaatgtgcatgccacatttactattcgcatctcccagctatatgttctcaagctgagggacctgtgtctgcttggctggtgggattttcagtctgctgctgtttttcttctgtaggatcctgtgctctgagtcagccagtacctttcactctcattgtctgaactttaacgccatgacttacggtgctacccaggctcgccgcctctccacggcctcctctgtcaccaaacctccacacttcatcctcaccactgactggatttggtactggagtgatgagtttggttcttggcaggaatatggaagacaggtaagtgtgatggaaagagggtgaatgttttgtcctgaggatctgtaagagaggagccaaataagagcccccatattgttgccaggggcatccttgagagagctgaggatccccaggtgccagtgtggctcacttgctttgggagaattatggcaaaactagataagttggaatttatttgtatgagctttcatctttgaagagcttccatctgttggctcatgagaactgaatgacaaatttgtagtgagatcaagtttcttcattggttttattaaatgggatagaaagatgtttctcttgttgaacaggtaacttaaccccacagctggtgcctatgtgtgcaagtgtgtttgtgtagctgtgatatagaggtaaaggcttttcaaactggttgtctgccatttctgcaactttacagaaggtaggcaaatataagaaaattgatttatatcatgtataggtttggaatccaagccaaataacaaaaaatagttgctgtcaattcttcgcaggtgtttgtggatgggtcagattaaagggagtcccctggtcacttatagaaatacaagtttaggccgggcgtggtggctcatgcctacaatcccagcactttgggaggccgaggtgggcagatcagttgaggtcaggagttcaagaccagcctggccaacatggtgaaaccccatctctactaaaaatacaaaaattggccaggtgtggtggcgtatgcctgtggtcccagctactcgggagactgaggtatgaatgagaatcacttgaacccgggaggcagaggttgcagtgagcagagatcacaccactgtactccagcctgggcgaaagagcgagattccgtctcaagtacaagtttagggaaggcaccattgataaagaactcaccctccaaaatgaaaatcgataggtattttgtactcttctgggtttcaagaggctatattgaagctttagtttcttattcttaactgcactcagaatgccctttaactctggtgatgctctaatgtaagctccatgagggcagggacttttgtcttttcttttgccccatcgtatcccgtgtgtggaatgatgcatagccagtcctcaggaaatagacattggctgatggaaggaggagggtgttactgacagtgtctgttggtcagctggagatggtcactctcagcgatggccttgctgccttgcactacttcctttcccctctcctcccctgctcccctcttgccagcaccagcctctccttgcttgctgctctgccctgcctgcctttcccacctgtctccctcccgtcgtgggcgacctgggactctctctgacctgccctgtgggactcatccagataagctctctgggtttggtcaggagcgtgaggggaagaggctggcgtgacatggaggagggggagaggatgactgcccaatcatgctccgggaatcccggctctcctggagatggagggacagatggcaggcgcaacacacttagcagatgtgaccatcacgttcattctgtttggggatctgtccggcttctcggaggagaccgctggttgctgaatgagatgacacagggctctgggcaacccatgcaaaagtagggttccccggtggtgtctcatcacagctctggttgttggggccggtctcctccagtcagccaacacctggagcgtgcccctttctttcctgtgctcctcttcctctgtggcagtgcagaaactcatggcgagcagtttgagaatgtctggggatgaaccgcgtgtggatgttattgatatgccacgtgctagtgggggcgtagaaacacatgtaggcttggtggcttcaggctggacagcctaggatgatctggtttgtcttgtcctccctttcctacacgtttctggtataaccccacatttaggtttcttttttagttttctgttaattgccacttcaaaacagttttctcttgattcccagaaaagctaagttttttctgtctgagctcaagaagtactccaacatttcatgtcaaaatcagacacctgctggtcctgccacaggacatgtgggaatctgtcattccttccacatctcacttggtgcctccaggtgctaaaccgagacctttctcagcttaacacataatatggctgccattgttggtttctccttccaaacctcccactgagggcaaaaaaactctttgctttttgctttctgctcatccacctgcatcttccctccctctgtgaccatccatctgcagggattttgactggaggcctgggtcggggcaggacgcctgcatctgactgctgcttctcctctctgtttccctgactcagagcttcatttcctcaggcccaaaggggagggattgttttcttttcctttcctcttgttgtcagaaagggatttttatgccacatcctcttcctcccggactctagtctaatggcttggttttgaaggaagacagacttcagagagagaaacttaggcgccgctatgagaccgtaaactaggaggctgctttacaaaccattatacctcttacacccgccccttatggtcctcatggggccaactcatgtcatccctcgggcttgggccttggctcaggcatctttttcttccaagaaacctttgctgggtctcacccttccttggtcattcttagttacccatctcagcgtctagagcacccgtgagacctgtgtgggaccttgtgcttgaggctttgaaatatctgggtacttttttttccccttctccattgctggactcagttgcgcagaggcatgggtgactcttgtcttgtctcacttttgttctgttagtaacacctaaagcttgtgacccaggagaactaggatggtagcagtagggggagcaggaaaattgacagggacagagggagttagttggttataggttgaataactttaattttagttgtcagtgtaatctcaaatttaataagaacggtgatgataatagtaacatttattgagtatgttttgttctgggcactgtactaagtgctccacatgccttatttaaatgatytctccagccctgtgaggacaatatagtcctgttgtataaagggatgaatatggcctaagtactattattcatattataagcttgagataacggaggctcagggaggttaagataacttgccaaagttatagagccagcaggtttgggagccagaattcaaactcactccagctgaagctacgagatttcctgtaggtaattgtggaaggatagggattgaaatggataatttaaaaaatagatgaatgctcctagggaccagaaaaagaaaaccgcaaggaagaggaccgagctctgattaaaggatggttgcaacgtgaatagacgggtaagaccagcctggcttgggctgcccagtcaagcagcactccagaagtcgctgttgctgttctgccggcatttgaatggctgccgtgtcctctgtcctaggtgacttgagtgccctcctctccgttgctcccatccctgtcttcctgctcagcaggacccatatttactgcattgtgtttgctagggcagcttcaggagacagtcatgttgcctccattctgtgcctctctctcctgccataccatgctccctggcctccatcttccccaccacaggactgtccaccaggagcacctctgaaatgtggcgtgggtgccaccagcgtttttcctcatcacgcagtttcttgccttcataaagtgtctggctttccatcgcagggcacggtgcaccctgtgaccactgtcagcagtagcgacgtggagaaggcctacctggcctactgtacaccggggtctgacggccaggcagccaccttgaagttccaggccggaaagcacaactacgagttagatttcaaaggtatcctgtgccctgccctcgcccagcagagcctgcctgtgttggctctgtccctacaccttaaccctggaggagccgtgtgcacatactgagrgcctgggtgggtacaggaaagaaaagcaaggtaccaggtccaaggtagacctggagacagatgacactggccctgtrcagtggaggaagaactgcatcaaggatgtgaggagaatggaccccaggaggggcaggagccccaagtgtggaggacaagcagggtcagcatgcatgtagcatggttgtcctgctgtatccgaggactaacctgagtccctgacaggtgtccgagcagctccgtcgtgcagtgtctgcctttcactccctgctgcagcagtgctgctgtcatcttttttttgagacggagtctcgctctgtcacccaggctggagtgcaatggcgtgatcttggctcactgcaacctccgcctcccgggttcaagtgattctcgtgcttcagcctcccaagtagctggaattacagtcatgagccgtcacacctggctaattttttgtatttttcatagagacggggtttcatcatgttggccagactggtcttgaattcctgtcctcaagcgttctacccaccttggcctcccagtttgctgggatttcaggcatgagccaccgcgcctggcctgctgctatcttttctgtaggcgactttggagttgatgggtttaacggatggtaggacacagagtaattgaaagtccctgagaagcagattttcgtgcactcatggtgtcctgaggctggggctgaaatgtttcatcctggttgccttacagagagaaataggccaccctttggccagttcctccaagtggctgatgtgtgagaatttttttttttttaagttttaattttgtgtagtttctcttaagccatttcctcatgagtgtatcggtccagctttattcagttccgttttgcctgtatttcacattttaaactctgagtccttctgaatgttcagcattttataagggagtaagtgggccttcctttaaacacagtttatggttttctttatttttgcagacgtttattctatgtggagtatagtgaagtgtctggtgaattatcctaaaaccactttggctgtctgtttctggccttggttttgcttgtggtttcgtggcacttgtggttttgcttagggtagatcactacccccttgacatgccctttacggtgaagtttttctcctctagagtgcgaactgcctctgctggagagcgccagccacgtgtggtctggtttgctttccacggcctgacacacaccagtgcatgagaggggaccagtgagagcatagacgttaatcaaatcaggactgccctgaaggtcaggactgtgtggcaagcatacatctgactgctgctgacagcaatctggaatatttcttttaaatatctggaaaatatcaaaacagatagaaatgtcagatactaccttgatcattcccaacctaggccacaccctggggacataacagaacctcataatagggatggggaagagcacacacgtgcagtttatgattcctgcagactgaccgaagcccatttgagtgggcacaattcttctccttctcctccttctcctccttctcctccttctcctccttctcctccttctcctccttctcctccttctcctccttctcctccttctcctcctcctcctcctcctcctcctcctcgtcctcctcctcctcctcgtcctcctcctcctcctcctcctccttgtcctcctccttgtcctcctcctcgtcctcctcctcttcctcttcctcctcctcttcctcttccccctcctcctcctcttcctcctcctycttttggtagataccagtatccataaaagaagcttgagatgaattggcttcttcccccacaacttcacttctaagtataaagcaagtctcaaagcaaactgccacacatatttattagctgtttattaggaagcaagtacatttaaaacacacaaaagagcccaaatgagttgttctgaaggtttagggatgattcagttctgcccttttagggactcttgtcataaatgattcactcaaggcaaatgccaggattccagaggcagaattctagcatcctgttaggtggtgtctgacggggcagaattccccaaagacaggctgtagcctagggtatcctctggaagggtaaattagggaaaagacctcactttactgtgtccatagaagggtagggaatgtgtctgacacacatttagccagtccacgtatcttagctcacttttaatttcaccagtgaaagccatttaagattcatcacagatggccagtaggccagtaacacccatttaaatatgccagtgagaatggtcttgatgggcggctgagtagtgggtaacagaaggggtcatggttgctgcatctggatcatgggctctgaatgagaatgtggatggacctccaggaatagtgaccatctcagctgcaacctaagagacacacacttggataaccatccagtttatgctcaactgcaataaggctaattctggacacctataatttttaatattaaaatgttttgtaaatgaaaacaaaattagttgggcatggtgtcacaaacctgtagtcccagctacttgggaggctgaggtgggaggattacttgagctggtgagttcaaggtccacttgagcaacaaagcaaaagaccccatctcttaaaaaaaatgtaagacttgagagggttttcctggcaggcaaggacagaacaaacactkctaggtatttgtcatttttcaacttgaggggccagttcccccaaccccaaatcctcaggatgagtatgggattcttgagggtggggaagcaagaaatttgtttattaaagatattattggtttagaaaggttgatgaatactgccatagtttaactaaaacaaagtcataaaacttacattaactctgaatcccactaactcaagacatggtagtttgatctcaggctgggctgaggcttttttatatccaagctgggaaaaattgccaagcaaaataatggtttaaacaagattggaaggaacaatttaaaagcactcatgtrtaattgatatgtcaattactaatcattcctctattcattaaacccagtctcctaaggatacctrttttctttatgaatatttgaaatgtgtaaaatggccctatttttaacagactgattctgggttttacacatttggataagctttcaaatctatctaatttgtgtttataaaacattgccatcctgtgtgtatgtatatgtatatgtatattttttcactggttatgttttttttcagccttcgttcagaaaaacctggtctatggcacaactaaaaaggtttgccgcagacccaaatacrtgtctccccaggatgtgacgaccatgcaaacctggtaggttgcagtggggggcttggtacttaggatgtaatcagctggggtgtgctctgcagtggtgacagaaaacctgcctcagacagcacccgggcaccgttggcttgtacaacgaagtgctcccacactctgttatcgtttgtcttctactagttggaccagagtgggaattaccctgtgggtagaagcttcgtgatgcataattagaaggctgcctgttgtgatctgcgatgattctctggagaagacagactctgaaggcgagtctagacttgaagccaacccatccgtttgtcttttctgtggaatcattgagtcatagacttgaattttttaaatgttgaaataatgaaataatgatggaattacaccaataaaaactcatgtattttagtatttgaatatcacggaataccaaaactctaaaaacagatattgcagtcactaatgggcgagcttcgtcagggtgagtttctttcagtcccaagatggctgccaggagccaccaggttagcctgtggcctgtgagcccctagaagggaggagagaaacctcctatagcagatgaggggaaattcttgtgctttgtactgatcagaccctatctcaacctctggtgttattttaggcttggggaggtgggatgggattggaactgagaggaaggggtcagtgttctccaaaccacacagccacatattgggggaaggtggcctgcatggtggagagggaccacagtgcccatacagtttgggcttgccagagccagtgctgggactttaggcagtgttactggtagctggctgcaccttctgttcgcctgagaggtctggcttgtgtctattttatggagaaccaacaatgtctcttttggttcttttgttttgtgaagcatgcaaaggtcgtttttaaatgagtttggtacaagatagaggagaaaggtattatcagtccacgaaactgccttgtgagtcagacctagcaaagtaatttcctgggaatgtgccttactttttcctttttaaattaaaatttatttttgcgctgggtgcagtgactcacacctgtaatcccaacagttcaagaggccgaggcgggtagattgcttgagcccaggagttcgagaccagcctgtgcgcctgtagtcccagctactcaggagactgaggtgggagagacacctgagcccagggaggtcaaggccgtagtgagccaagatcacaccactgcactccagcctgggtgacagagtgagacccgtctcaaaaataataattattattattattgtttttgactatgtgtaaaaccttcacgtgattaaaagtcaaacctatataaaatggtatcctctgtagactgtaacttcctccctgttatctctaccctgttcccactgtgggtaacattagtttccggtttctcttttttatgtttctctttgcaaaaataagcatttgcatacatacatataaaagtattttcttcttgcacaaaagggaacatgctatctatactgttctatacccttttttgttttcacttaaaaatagatcatgataatcactttgtttcaattcattaacttcctcaatccgtttcttctttcctggttctctgtaatatgtatgtaccatagtttacttaatatgtccccttttcatggatgtttgtgttgttttcagtcttttgctattaaaaagtataatgtcgtgatgaaccatttgatgtatgtgctgtttcaaattttggaggtatggccaggtgcggtggtgcacacctataatcccagcactttgggaggccaagatggaaggatcgcttgagcccaggagtttgagaccaacctgggcaacatagcgagaccctgtctctttttttttttaattaaaaaaaacaaattttggaggtcgactgttaggtcagagtcgtaggaagtaaaccaaattcctttccatgggcttgaatcattatgcacacccactaggacgcatgagatgccacagagtgagttgtcaggctcttgggcttttgcatttctcaggggtaaagatgggtcagtggacttcagtttgctctctcttaggagtgaggttgaatattatttctaacatgtaagtgccatttttgcttctttttctgtggactgttggtctttttatccatttttctatcaactttctggtatttttcttaaatatcaagagccttttatctattagggaggttggccctcgttttgttatataaatggcaaatattttctcttagtttgttgtttgccttttgactttgcctgtgaagtattttaccataaatatatatytcttattattttagttaaatgtatcagtgtcttactgattctggatttagagttttggttgattatgaccctcctatttctggaagtcattttttattcttttcctatacaaagcctaccctagacaaggtttggaaaagtctctctgctttctgagagtagatctctcttattctaatttagtttttagggggccacaagaagatgccaaatgtccaaactaaaagtgattcagactaagatatgggtgatttggggtctcctgtaagcggagtgtcacacactgttcacacagatgaagtgttcagttcttctctctgacccatgtgccagcagctggttgtcattaactccagtaagcaagtctgcctgggcctgcatggccaattgggaatctgagggtagatcactttcagaaacaacttttctgtttacacaattaatgaggtcataaaatgtaatgtccatattcagaagtcataatacaggagtgtcatgtaaaatttatttatgtatttatttatttatttatttatgagacagggtctcactctgtcacccaggatggaatgcagtgacctgatcacggcttattgcaccttccacctcccgggctcaagcaatcctcccacctcagcatcccaagtagttgggaccacaggcatgcgccaccatgcccagctaatttttttatttgttgtggagacagggtctcaccatgttgcccatcctctatgaaaatgtttcattcatgtgattgggtcttattttttcttttcttaccttcttttgtgtatatgtatattttaaaggctatggtagaaactacatgttcttcacttaagtacaagtaaatcaatatctttgccctcctatcttttcttccatttgccttcctctcaactttttttaaacctcaagaggcaccattattttatactctgaaagtttcattaaatttactcacatttttaccactttgtcctttcagattaccttagatcaggggtgtccaatcttttggctttcccaggccacattagaggaaaaagaattggtccacacataaaatacactaacactaacgatagctgaactaaaagaataaaaaccacaagaaaatctcataatgttttaagaaagtttacagatttgtgttgggtcacattcaaagctgtcctgggttacatgcagcctgcgggctgcagsttggacaaggctgccttcgatgaagatttgttggaaaactgtttttggtttgtctgaatatgtatgtacgtatgtatgtatgcatgtatgtatgtatgtattttgagatggagtcgcactgtcgcccaggccagagtgcagtggcatgatcttggctcactgcaacctccgcctcttgagttcaagcgattctcctgtctcagcctcctgagtagcttggactactggcgtgcgccaccatgcccggctaatttttgtatttttggtggagatggggtttcattatgttggtcaggctggtcttgaactcctgatctcaagtgatctgcccacctcggcctcccaaagtgctgggattacaggcgtgggccactgcgcctggccaacatgtatttattttgccatcaatcttgaaggaaattttcactgggtatagaattttgggttgtagggattttctcttggatcattgtgatgatcactccactgtattctggcttccactgttgcttttgagaaattgcctgttggtctaacaggtgcttctttgacagtaatcactcttttttcctttggctacttttaagagcttctgtttgtcttggaggtaggcatcctcactaaagtgtatctaagtatgtgcttttatttatcatggttgagattctttgggsttcttaagctgcggataggtgcatctcatcagttctctttgaaaatcgcctccactgtcttgtctctcctctcctagagcttcacttaggttctgatcatattcaagttctcactgttctccatgtctcaacttctttcctgcattttccatttccttgttgctgtgggccacattctggacaatttcatttcacatatgtttcagctcactgattcttcctccagctggtctaatctgctattaagcctgtccactacacttttattattaaagattgtacttaattctgtaagttctatttggttcttttttagatcttccaggtctttttatagtttcctgttccttgcatatgtttttaaagtttgtctttttttttcctttaaacataggaagaataattgttttgtaatctctctgataatttcagcatcttaagtctttgtgggtctgtttttggctgattcttgctggtaggaccttgcttagttattttcgaactgtgccattttcccaggaaagttatttgtgggagttctttgaggcttaggatgaaggtatatgtttcatgccagcagaaacagaaggtagatctatttagaaagaacastgtattctgaaacttaataggaatgatttgtaattatagtttcacagtccttgttcctgaacccttgatccatatgtcttttgaactgcttttatttaatttttagaaagataatgtgatgcttgtatcacgtgacactctgtattttagcacattaatatttctgcagtaaacaatatgcatagtcagtttaagaaggatagatacagatcacagtggcctcttactaacttcagtcaaatttctactgccaaatgacttttgatgtcacttttatgtttttcaaaaaatgttttatttcatattttctcctgcttttcctgagctgtataaaaagttttaaaatgtcaattatacctcatcgaggccttaaaaaaatgtctttagagctcttagaatttcagaattgtggataaaggtttatggctgtgtgtgtgctcctttaaccatgtactccatcccttttatcccttttgtgtggtagttgggacacaggcragaaatagatctctcaggactgtttggagtttggctacataggcaaagataaaagtgctctcatgttgtgaatatygtgctaacattcttccttgccttctacctgctcttgaaatatgatgtgctgagackcaagactggtgatattggctagcagagaccacctatggtatatttgctttgtgtaagaataaaatgtctacgtgtttttgtttacatttttgtagcaataccaagtttccaggcccgaagagcatcccagactattgggactcctctgccctgccagacccaggctttcaggtaggggacgcatgcgcctggggctggacaggaaggtgttctgtagaagtgggtgtgtgtgaacagactgtgccattcctcaacactgaagaagctgtaaggctggggctaattggggcaggagggcagtgacagatgtgggctttatttttgtttttgttttttgcagagggttttgttttttcaccacccaggagttggctgtggctctgaggggaggggttgtcttgtggagggaggaggatgagcgtgaaatttgctagaaagggcagaaatgagtttatgggctgggcttaaccaataaataccaattttattaagcgagaaaaggagaagcagcctggggaggacctgagtccgatggacrtttggaatggggttactgtcaggagggaaggcattcacgactagcagacaggagaatggacagtcaatttggcagcttgttgaggggctctgaccagtgggagctgtgctgagtgcaggagagtacgcagactaacatctgaggctgcccgtctgcacctgggctgatgtctgccagctggccggctgccgagcactgtctaactcagctttaaaacgtgacggtccctgtcctgggaggacttattgagcttgtataaggcacatgcagatgccaacagtgcaggcaagaagtgctaaggacctaaaggggttcaacatgtttgtctagacgactctgtggtccttggaccatgtagtccaacctgtgtctttgrcctgtgtgggacaagaaaaaaaaaaggcagggacatccaggggataccctcgatggtggcttaagcatcacgtgtctgtcctttagattggtttcacagtgatgaggagcaaagtgactacaatttgcaaacatagtaaatcctcaacatcatcagtaggttcttggaaactgacttaaagtggcacaacatactgtctaacgaaaccaatttcccatatgctaactgacataaacaagaggtttgttgttttacttaaaattgcagtttccaagaacctatcaatgacatttcatgaggaccgattgtctcctgtgcctggagaaaccacaggagaatgtkgtcactgctctctgggcttttgtgcttctgcggttctagtgtttacaagaagctttgggaagggactgatttatattctgcacgttgatggtaatgcattaaaaacatttgccccttgcagaagatcacccttagttcttcctcggaagagtatcagaaggtctggaacctctttaaccgcacgctgcctttytactttgttcagaagattgagcgagtacagaacctggccctctgggaagtctaccagtggtgcgttggggctcgctcttggtgggctggtgrctctgtcccttcacaccactggctggttgccacatgtggcccgggtttccaggaaaagcagagcggcagttagggctgccatgtgctgggagctgtgtgtctgctctccttcgtccgctcccccagggcagtgtggtagcacatcccattgtagagatgagggcaccgaggcttcctggagcataccacctggtcccgttcatgagtggtggcaaagctagcactctcacttgtccattctgccttcctggagaccagtgggatgggtcagtacagcccaccacaccattagccccaggaacataaggctgtggctagacagcaggggtctcaggttcatacatgaggactggcttgtccttgagcacccactcacctgtctatgtggggaggaatcctacaataggtcaccatggcaggctgggtcttgctgacctgtccccagatggggttggggtagtgtaatgtgtactctgtgcacagtgatgaagtctgggaatgggagaggggagaaggatgggcacccactgaccagcagcctgaaaattcctacagcatcccagggctcagctccaygcaggagcaaggtgggggtggggttgggggaaatggtacccattttccaagggctgctctgcttttggagtccagggaaccgctgctgtctggagctgtggagggagggttttcacccagctcccacgatcccccttcttttccacaccctggcttgtggctggagccttacaggcctagtcagggtagcctgtgacctgcgtctcttggtcccaggacacttttggaattttggaaaaatgtgttgttttgcatcargcyggctgtatttggtggccggcacactctgcccccagcacacattcttctgtgattctaggcaaaaaggacagatgcagaagcagaacggagggaaggccgtggacgagcggcagctgttccacggcaccagcgccatttttgtggacgccatctgccagcagaactttgactggcgggtctgtggtgttcatggcacttcctacggcaagggtaaggcatgactggcctccaccagcaaaacccatgttgctttgcccctgcataggaacagactgctagagggcatgaggggaccagcctgagctgatgagcaggttcagactccatgtgtggtggtacctgggcacagctaccagtcacatccttgctcttgctcctctgggcatggtcaggagcttggccccaggtgtgggcagggtggcctgcctaggctggggtgttgcttccctgtggagcagaggccctgggagatggtgacagagacgggagaggagaggggataccttcccagccctgatgaagtccctgactgtgcctttactattgatttccttagaatagaaaccagaaaccctcagagatactcatgtaaacatgtattctagctatcacgtgagttatctgagtgttttcttgtctgttatttttaaacttgccaaagaaaattttaaaatactatttctttggaaatcgaaattcaagaaaattggaataataataattaaaaaaaacctctttgggtaaattttacctgcgttcattggttttaacatgctgccacttctctctttctctctccctctctctttctgcaccattttcaggtaggtggcatatattgtctcctttcaccctttaacacatcccaagaacaggacattatcttctgtaaccacaatatgcttaccaagttgagaacattttctgcccagcagtccatgttccgggtccatcagttctttgttagtcagtttccgtctgaggcagcgatggcaaggggtcaagatggacagcagccagtggtagacttgtggatttaaatgtacaggtgacagcttctaactcagatttccatttgacaaggctcataattctatacattgggctgccagagtctacagactgcttccgtatatgggatctcattcattttccatgccaaccctgtaaggttgggctgaacagccccattttatgcctgaggaatctgaggtttgggggattaagtagtgacgtgtccacaggcctttaggtttcgtggggcagatccggaacttgaaaggaatttgctatctcagtttggtaactcctcagatgctgccactcagaagggtgttggtatcactgatgcatgtgacttcatgagggagagtggagacatggcacagagggagggagggagatgcggggtggaagagtagaggccctggcgttgcacatcaccaggacgctattcgcagtgtgstgacccttcctggctgcaggcccctccaccagctgagccctcgtgtgtcatttcagggagctactttgcccgagatgctgcatattcccaccactacagcaaatccgacacgcagacccacacgatgttcctggyccgggtgctggtgggcgagttcgtcaggggcaatgcctcctttgtccgtccvccggccaaggagggctggagcaacgccttctatgatagctgcgtgaacagtgtgtccgacccctccatctttgtgatctttgagaaacaccaggtctacccagagtatgtcatccagtacaccacctcctccaagccctcggtcacaccctccatcctgctggccttgggctccctgttcagcagccgacagtgagygcacaggagtgttccaggcctttcacctgctctgccttgaaatggctatttgggcctttccttttctttttaaacagaaacttytaatgaactgttctcttaacattgayctctcaatgaagttatgttcttaatctcttgctaataatgatttttacttttaagtcacttttgggttcactagtggaytaaccagaagtgattgtagttgagtccagttttgctttttaataatgygttgaagttttagtttttactctttgttgactttgctgcttattggcaccagggacagagtttctagatacaattttatggattggttttaatttttatgagtttgtctctgcagtgattcggtttctcagagtctcatggcatcatagtttttccagaatgacacagtagccaccggtggatgacagcccacgggcggcacagtcacttctgcctgttgctctgacaccaacccaggcagctctgctgtggcttctcctgggctctggcattagttggtctgtgtcacattgtcagaacaggtggctgctgtgtggtgccatcgagtccctgctggttccccttgtcctgggagggtcacccattgcccaaggaagtrcatccmcctggcaggtgacctggaggagtagcttccccgaggacccccaggcttggcctgtgattgcgcaaacccacatttcctaagcacactggamacccttcgagtgtgggttttaacatccctgtgagattgaatacttgtgycacacatgtcacaaaagagtatggaaataaaagaaaatttatccgaagtggatgaagactgaagctcatttttctgcgtctattgattgagcacctactgagtgccaggcgtttttctgagagtcagggattgcctttgttcatttggacttctgtaacaaaacaccattgactggacggctcatcaacagcagatgtttatttaccgggtttggagtctataaagtgcaacctcctgcttcctcatagattcagtcttctcactgtaaccctacgcggtggaagggcctcttttataaaggcactgaatctcattcatgagggctccgccctggtggtctaatcacctctactttaaatactatcacctcaggggtgaggatttcaacattggaattttgggggtcgtaacattcagaccgttatcagggctgtgacagagctgatgacacggcttggtgagctacgtatggatttattaagaagacagtgaagctgaaggttcagggcccctcacttgctggagcccctccccaggccctaggagggaccctagcaatatggtcacatggtcataggttttgataaaatttgcaaatgttacactttttttttctctttcctccaattcgtagataagtttcaggccccgtaagacccaggttcaccactgagcaatgtgctgtgcatgtggagagagtgttgtgtgtgtccctcacacgtggcagtttacaggagcctcccttctgggctttggctggttctggccctgttggcagaggggctggcggggccactggtgtcaccaggctgtcagccctccctactcggtcctcactacatgctttttgcccagcctccaccttcctgaggacgtgtgtctgctggcgacttgctgcttgggcttcagttggcttgcctgtatttctcaggtccaaggtgaatatgaacccatttttccatctttggagtgatctgaaaccttaacacaggcaagtgcagtcaagctggaggagagccaaggtaaatgaccagaggaacagcaagaacaacacagcttcacccagcagctgggtcagccacatggttgcccatggtatgattttcagaaccccctccaaatttcctcacagcctgactgatcctgccatttcactcattgctttttcattaagtcattggtcctgctatggtgtagttgggcaggggcaaagaggtgtcagagaaaaccattaaatcagatgcatgtctgttgctaaggtcttgcatgtaagtgaactgattctatgcttctgaatcatctgggagctggggagatttggggagcagaactggttcactgggggtgtagatggggagggcggccagagggatccggtgggagatgctcagttgctccggaaaagtccactgagctgtgaagactctggcagccatggctgggtgacctggaagaaagcaggttaggaagagcaactccttggaccagcaatgctagggagggtgggagccacatggccagattgcttgatgacggggagggagccgttcctgccggtgcagaaagggtgggcattgtgatgggaaggggtggaaatgactgtgactctcaagatgtttggtgccaagaggtggtagggtctgggacatgggtgtatgtgtgtgggattggccagaatctttgtgaggactcagttgggaatctagcaagagggttttttggaggaccaggcggtgcggttccctgccctgtgatacctggtgttggatgtgaacagtgggatttaagcagaggtggggttggtggcctcacacagtagaaggactggagtccagtgaccccagcacatgaggaagcctctaccactgtgtctgaaggtggtgaccaactgagctgggaaggcgagggaagctggatggagctgacaggccggggggcggggccggaggtcccaagggaggactcaggttgtggggctgtgctccaagcagggagctgagtgcgccattgggcctgtctgcaggctgaggttctatggtggcggcagccgtggggaggtcagggattgtgggacaggcagggaggccgacaggttcccaggggtggatggttttctccagtgagtctgagtcccaggctgggcattgcagaggggccaggtgatggagaagggcaggtggtggcaacaagggtgtggggagggccacaggacagccctacaccttgaggcagcagtcactcacaggcctggcccagtgctgggcagctggggtgtcctcttcctgcctggagggccagagaataagagaaggggccccccaagggggattttgagggatacagtgggtgctcctggctgaaggggatgggggaccaccaaacagtggaagcagcagtcccagcagtgaatatgtggaaactcattctgccaactctcccaaaatggcctgaagtttctaaaggtgggtcgtcagcatctgggtgtcacataaggggcttacagatttctacaagatcgttctctatacaacattcaacctcttaaagctgctcaggtgtcaactagaggacaagtggtcttttgatcgaggccagcctccttattttacagaagaggtctctgaggcacagggaggtgatacggctcttcaccagcagccatgaatgcgcagctgctggtggctgatcgtgagactgaccttgcaagtgcttggttgaatgtgaactgcttagcaacacaatacttatttttacaaaaaaaatcacctctatattttgattctttgatcaaaattaatatacagtgttttttgttttgtttttgttttttttgagatggagtctcactctgtcacccaggctggcgtgcagtggcgcgatcttggctcactgcaacctccacctcgctggttcaagcaattcccctgcctcagcctcccaagtacctgggattgcaggtgcccgccaccacagcctggctaatttttttgtatttttaatagatatggggtttcaccatgttggccagactggtcttgaactcctgacctcaggcaatccacctgcctcagcctcccaaagtgctgggattacaggtgtgagccaccgtgcccggccgatacagtgttctttaaaagaaaaagtatatcatttttcagactctcatttttctgtcgattgaaacttgactgtaaagttggtactaccctacctaggaaaatcaaagcataataaagctttggaaccactgctgaggttgaactttcgataaatgtcattctctacaactccacaatgcacgagaagctgaaagagccacgagctagtgccatcaggacaggcttacctgggggtcctcatgtgccctgcaccatggattcctttcagcacaagcctgggacttcctttaaaaccccacattctcagttgttttgtcaaaactacattttcacttatttatcagcaattcttcatttagagagagcactggttcaaaccccattggcaatgtcaaaaccaagtgcaacaaacgtttattaagcatttaggaaatgttatgtaaagaacctcttatccttgcatgccaggcactctttcaatcacttcagtgacatttttccaaaattctgaacatccacacttagggttttctttgaatttgggggtgccctccccccacccggcagccttctgtgtcagcgggatacgatcttgatatagacaccattttttggacctagggcagatttggattctagctgcagcggtacctaaaatagagaaaattaaaatatttgtcaaagagatagtagcatctcactgtacaaatgaagacttggaggttcaagaaggccaagtccgttgtccaaggtcacacaagaagaaagcagagagcaaagccccaaacctatctttcagtgactccagccgtccctgctgatcctccccatctcactctccagttctggccagtaactgagcaatgccctctggcccaggggctctggggaaagcagcttcatgctgttcctgctcatgtgtgctgtggtctggcctcactgacatccagaaagctttcctatgtccagcttaaaaggcagagccagtggtggactggggactttgaagaaaaaccaaagaattactcgaggagttgggtttcctctggagctgagtaaaatgatgagccagtggctaatgtgacagcaaagagtcaccagggtcttagtgcttggggctgtacgtgtctcctgtgggagccatagccctcaaaggcatctgaaaaagctgcaggccccagcacttgtctgagcagacaaggaagaacggggagcccttgactcctggctggttcttaagccggggagtgccaggcataagcagcgttttgggagactggtctggctgctgtactgtatgttgagatcgtggggaagtgagacaagccccgcacacgtggaagccccgatgcagtggggctgctcctccgtctgccccttgacctcacttggtttggctctgctctgccgatctgcccctccctgtctccagcccagagtatgtggatgcgttcactttcagtatctcagactctatgtcccccatccaagctcattattcctccaggaccagcagctggtcccaggttctctgtcagaggcactgcctgtctcaatctagaattgttgctatctgtcaactgtgtccttatgccttcctatgcctgcctgtccaggtctgcagctgaacagtgggttccgggtggcaggacaagcatgaggataggtgcaggggacagcagtggtcaggataggcagggaatagctaacgctgtgcagagacgtagccagatgtcaggaaggagggagagcttgggagtgggcaggatctgggtgaggacccccgtttctctcatctctggctgcttatccatttgctcattaatgtttgttgaatgaatgagtgagcacctgtcatgcgcctggcattaagctagatgctggaaagtccaacaatgaatatgacagactgggtccctgccatcacgaagcctgcagtcctgctgtgtggccttaggcaagttatttaacctctctgagctttgattcctcatctaaagaatgggaatagtcactcctactctgcagggttgctgtgagtgtgaaagcaggggatataagctccctgacctgttgaggaattggtctgctggttctggagtgtgtgatgtgggggggagatagggctggaaaagtgggtgaggccccatttcaggagagctcagctctctgggtgaggacagggtctgtgcaccagtctaggacctcaggaatgaaggcatatgttgttgggaagaggctgtgtcaccacctgtgagagggaccaggctgtggccatggggacacgtgagtgtctgcacaaggggggaaggcaaagctgggggtacccttcaaggagctgaaacccttcagcttcccctccaagcagacagcaccttgctctgtcaggaggagccagaggaagtgtccccaccttctgtaggacaagccatgcaccccccaccccgcaaaggcaggcacatgtcacaactgcaaatgccattgtctgtgtgccctttgtggaagtgggaagagctacagcaaggtgaggtccagccctggtgtgcagagaacaatactaataacaatggttaacacgtgctcgggttggcttgccagggcttacctgagcgctgtgtgaactcactggatcctcacaggatgttgagaggtagagggtgttattattatcacccccactttacgaatcaagaaactgaggccgagagaggttaaggagcttgcccaagctcacggaggcagagcctgatgttgcccccaggctggcctgctctcacgcagagaactggggtggccctcccacccctgcccctgcccctgcctctgagcaggggggcctcacctgggtctcagggcaggcttggaaccggaacttgtgcagcacgtggagcagtgtcaacttgacctcaagcagccctagacgcac

SEQ ID NO: 8859 - DNA, 227261 bp, Homo sapiens
  misc_feature (1)...(227261): n = A,T,C or G, or insertion/deletion polymorphism (see Tables 1-2)
ggaggggctaagaaagggcatgcgatttgcaatctaagaagccactggcaacctcagagcaaagagtcagtcctaactgccctctgccgtgacagtcaagcccctccaggggttgccagataggagcaagctctttcatgtcagtgggaggaaaccttacaattgaaacttcacactgtacagaaatgcacaggtccactgattcatggctgaggtaggcttaacaggacctgcaggcttttaaaagagctctcctcagtctacctttatttctgcctccaccccaagcttctttctgcaccatttctacctagtctgtccaagttcagcctggactgcaggtcaggaaaaccaagctattacctacctcccataatcacagaaatttctctgcagggttgggttgcttctctgaactgcttctcatgtgcaaatccatcctaatctgccattcccgcaacctccaacaaaatcgccctaccttctgtgcatctacattacagcttcttttcattcataggctgattgcattttttttttttttgccatatttcctttctgctcaatgctcttatggcatcgctttgcttttcctgcacccctgttcaggtgtctgatcatttttcttctaggagcaaaagcagaaaaatgaatgatgtttccctattcccctgattttgccagtgtaatttctccaagactgccatttccacaatcagattcccttcaccctgccaagcctcgctctcccctttgcccttaaagccacagctctattgttcctcatttgaatgaaatgtctactcttttaaattctctgtgagtgtaatgtcttgttactgaagctttcagttaaagagttttgttattaaatactactctgttacaaactgtatcattgaaaccgatcaaaggtttaaagcagaaagacaaggtaatttcttaagaataatccaaacaaaaataggtctctattatgacttgttaagaaacagaattaaaataaagggagaggaagaagaaataaagaatgtgtggaaaagatagaaagatacagagaaaaagaaaattagacacacagtcagaaagagaggaaaatagagatacagcaagagaccaaaagagaggtgtgatatcaaaagacagaacttgagatagtgacctacctccctcaggcacatcctccagagataaaccacaggcacaggctcacacatggaaaataaagagctgtcaggaaaataagagcaacacacaccaagtgagaataagatacaagccacacagacatcatgctaagaataccctgagagtaagagagacatacacacctaaatgcatacaccaaaaagagggttatctctatcctgtggccttgaagatattgtgatgttgtgcagtttcacaactataggcatacatgaaaaaaaaaagaccctttgttccatgtcctgtaagcaaaatgaacttgaaatgaggtcaaagctcccccatgttcactctaccaactcctgagaaagatatgacttgcaccattttgtagaaaggcaaattaaggagaggtaactggtataaatggttactaaatcctttccagttttcttgcctttattattgttcttcaatgcaccctgaagttaaatggtattttggcaacctagagttccatgtactgttaaaaaaaaaaaaaagtgatttttttaaatgattgattaaactccttagaacactgactgctaatgtgcttattaaataaataaaatacaatgcacactatctctagccaaatgggacagctcccagacccctctcattgtctcaggcccatgactggtaaggccctctctgcttggagcaatctctggtgctcttttctggtacctccttagccctccccatccttctactatctccacccataaaacaggacacatattcaggtagaatttaagaaacctgtatttccctccaaactagtttcaccaaagtcactaatgcaactcttgttgctaaatccaattgatgcctttctgcctttttttttttttttttttttttgagatggaatttagctcttgttgcctaggctagagtgcaatggcactagaactcggctcactgcaacctctgcctcctgggttcaagcgattatcctatctcagcctcccaagtagctgggattacaggtgcccaccgccacgtctggctaattttttttgtgtttttagtagagatggagtttcatcatgttggccaggctggtctcaaactcttgacctcaggtgatctgcctgcctcagcctcccaaagtgctgggattacaggcgtgagccacagcacccagctgcttttctgctttcatctgacgtgggcctctcaatagcatgcagcactgttgaccttgctgggatgttgaggaatcccccgtcctggctgtcctccaacttctctgccctcttgtccatggggagctctttttcctcttcccatgtctcaaatactggtactccccaggttctgtcacagatcctctctcctcccagctcccatgctctccttcagtgacatttcactgttaggtttataccttgctgccacttgactgcagtcaccggaaggaaaggagacaattagtatactcagtctgccaattcatgaaggaaaatctaagctcatttcaagaatatttttccgttatatcatacgaacttcgctagctcaattgaatgcatgttttgcatctcatggatacagcttcagtcatggtggtctgaagagaaggtggacctctgtctgtatggctccatcttgttccccttccatgggactctatttccttgcccaagattgttcccttcttatggggaggagactacctgtaaaatgttttcggttgacacaagtgatattcattttaagactgcctagaatcactcactgctagacagcagctgggatggacttagaggcagttactgaacactggtcagtgctgaattcaggggcagtcctataaagcagggccttgctccaagacgctgccaatccagttatgaacacagggtacctacacagaagacaagagtcagccatctagggtgcgggtatgctgtggacaacagagtgtgagcaacaggcaggaaatgttctgtgagcctaaggaaagatgagacaaaagtcagtggggctggtcagagggaggagttagaataataataacttttattgaacccctactatgtgtctgccctctatataaaactctctctctaatctaacccagcctcagaggctgtgatgaggactatatgaaatgccttttatcgagtttgtagtgttgtgctggacacaagggagcatgcaacaaattgcagctatcatccattcaacaaatatgtgtgcagtactcaccatgcgttaggcaatgcagttattggacatacaatccaaaacaagaaaaacatggtttctgtccttactgagcttacagtctagagacaccttgtccaaaatggtagccactaaccacccatggttattaaaattaaaaattcagttcctcagtcatactagccacatttcatgtgctccacagacataagtagctacactgccattatggcagcaagttctaatggccagcactagaaaggggcagagagacatgcatgtagggtatgtattaacagggagttacatacctgtgtggtgaaggctatgatagagatttacagatgcaaaaggagaacattactattgttctccttctcataatcaaaatacagacactgaggctcagagaggttaagcattttgaccaagatcacatagttaagtggaagagctaggatttgaacctaggtctgacttactcccacgctatctcgggctgttttgtggaggaggtgagccaggcacaggtagaatctgcttaaagagagaagatggagaaggtacccctctgggaaagtgggtgggaaagtgaccgcttgggcaaaggcacagtgacagagatgggtgaagctggcactgggctacaagtaaaccagtttggctagagaagcagtgacttgctgaactcatgtccttagaaagctaagtcaggactcgcctgccttgatgaaaagccaaggcactcagccccacctgcagaggttgagtccttagaggatgttagccaggagcgtggcatggccagaaccacgtattatgaagatggcaatatttaggatgacctgggccaagactaaagttaaagattgcagggaggatagaagggaaggagataaatgaccggtgtggagcaaaaaacactagagtgggagccacgagacctattcctaagcttcaatactgtgtgacattgggcaacagattttacttctctggactccatttcttcaactctaaaagggcagggctggcccagatgacctctgaggtccttttagcaacagtagtctaggattctgcaaacgtgaatggcattaggttaagagaagggataggaagtgtagcattgattatgggggcaaggaagaccgcagagtacaagatcacacagaggaaggtgtcgtgatgtaccactaaaaaagtgtgaaagagcttgccttttttgggaaggactgaaggatgggaacggaggatggagaccggaaaggataagaagtagtgagaaaatcacgaggttgtttttaagaaagttatacagtgttagagatcattattttacacagatagcttttcaacttttttaaacccacgattcacagacggaaataaaattgacatcatggtccagtacacttgtccagtacctataatcgaaacaaaaggtttatgaaacaatagttgcccttactaagggcaatggactctaatattttctattggattccatttcgttctttttgaaagctggttgccttccgctgcatttattttatgatctattactgtgtcacgacccacagttttaaaaacagtgcctaagaggagactcaacaagtcttcctaagttggaggggatggcagggcatcctatccaagcatccgggaggcagctggagaagcaaacctggagaggctcccggctggggagagtctggagagtgtttagcggaagccctgataggagagagcgctgagaaaagcgaggacccagagagttgtgagctcccattcaagtgatggagtggcggccctcgggacagtgtagacgcgaggaggagaagatcagggtggcgtggaagccagactccggcaggaacccagcgaccaccccgggggctgcatttccgcggcgtgcacggcagggcttcggtgcctctgacctcgtgtggctttccgaagctcctccactcacccgccctcctccggagcacggcgcgcgcccactccttcattcattcattccactcctacctccgcgagcgccaaccggctgtgagatgggcgagccactttgccagcgtggggctctctttcgggtcggttccctccccgccagcacacgcgcgcaccctcgcacctgggcacacacgcgcgcgcgtgcacacacacacacaaagttctgggggcccctctgcagaccggctcggctgcgctggactcggagccgtgcgcccgccgggtccaggccggccctctcacccactacccggggcccgccctgcgcccagtccccccgcgctgcgcggcagcccctcccagcgcggtcccctcgggccgccggcgcggctctgcccttcggttcggccttccccgcctcgcatccgtgccatcggcgctcgattgcgcgcggactccctgtggctctcccggccccgcgccccgcccccgcccccgcccgccgcccccctccgccagcaacttttgcggagcccccgcgcccagccatgctgagctgagccccgccggccctggccgcgcgctgcccccggctcccgcccctccgcggatccgctcgggggccgcggccgctcggcgcctcggcctcggccgctccgcccgcccggccgccccgagccccgagccccgagccccccgcgccgggcccgggcggcagcggcggcggcggcggcggcggcgcgcccggccccctcccccggcgccggccacgggaggcggtgatgcgggcgcgggcggcctcggctgcgccgagagcggagacacaggctcaagatggcagattccgactgaggctgggggggccgagctcgcgcgccgctttcccgtccccgttgccatgaaccgcggacaccccggccccgatggcccccgtgtacgaaggtaaggggcgcccggccccgccgaccccgcgcccgccgccctccgcggcccccgcagctttgttctgcccgcggccccgcgcccgcagcccccggcgcctgccccagcccccacccggggcccgagggggccgcgaccccctccctcgcccggaagatgaccgggacccggcgccggcagggtcttgcttccagggcggggagaggggccgggggcgcaggaggggagggggcgtgtgcgagggtgggcggctgcccggggagggcagggacgccggggaaggcggaccggtgactgtgctttttatttatttgcgataaatgaaggtgatgcggcttagcttccaccgcccccccacattacctttcggagcacctcctttccacttcgctctccgccccgcgccccttcccatttctttccgcgcccaccccacgctcctttattctccgcgagcctccgattttgggggggctgtggaatcggaatgcacggggctaggtggggagagaggagagagatgaaaagtccatgtcagagccaggcagaacaatgaaataggcgaaaatctcccctcattagcgtgtggaaggggacgtggactttgggttttccagccgggggagcggcggagacgtttttctggctcggtctgggtcgatctgtgttgtgcaccttcacctggcatcggggtatttttccccatttgactgcctttagcaagaaagaaaagaacgcaaggcagaaaagcagtaggtctgcctcgcacactgtctttcgtttctcttcagtccgttctgtcagcttccagccagaaagcaacccagaatcaactaagtttttacacttcgatgtgtttttgtgtgcttgtagtaggagaaattttaaacccaagtgtgtctgatttttcagtcgtttcatcgtgtaaatgtttgtctcatgaaatcattgaaatcgcagccttcacatacttttagcgtgggtcccccggctttctttcggttttgttcagatattctgtggatgaaatcgcaaatgagaggggacagggtttgtgtggcacagaggagggcacgaggggggaatgtaatcctcctgtaaatccggagaacagttgtggccagtgagacagggaaggcattaatagttttatctctgttataagaggctgattaaaaaaaaaaaaacttaaaagaaaatctgttattagtttcagggctccaaatgaattaggtttctggccggaataaagttaccagtcaggccctggataacgaggctgtaaataacctatagactgtaaatatttttttttcagactctcttagaaacaaaggggctgtttagaaggcaacagagagatgttattccaggggctttcctctttgattctgaagaacacaaggtccatttaaccattcgacaaaacaaaacgaaatttctgatcactccaccacgcagaatagaacatgccrgtggacatgtgaacatgcgggagaacccatgtcgggcgttcattgttcatctgcgtctacaggagggggctacagtcaatgctcccactgtctagagtgttaaaatgaaacaattttctctttattaagtacctccttgagactccctctgctggacactcccggtgagttgagagaaggaacttggcattgaattcagaactatagtaaacggctggtttccctgttactagggaccgggtatgtgagttggggtgtattttgtcaactttgtggaaagccatcttgggaactgcactgttctcctcctgctcctttcattttaaatccatatggaaggtaggccatgcccccgaggctgagacttggctctccccgttcctgctacattgttcttccagttccttacgccagataaagaactgcaggtgtgtagggtgttacggtttaagaataatcatggatctcaaaagtctcatgaactgtttttatttgccagccttccttccctgtctcaggtgacctccgcggtggcctctttcagccctcagtttccctccatcttgtccgtgtgccctcttcattgttcctgcgctgtgcacccttttattccggatgtttatctgtgcacctttataattatttttctaatcttcctccccatcccacctcaactggcccacatcagtctgccaaaagcccagatctgggtgtttttgaaagagattgttggacatgctctaaaacagacaggtgacttctagaatcaaggattaggttgctaggacccgcattcactcactgtgatgagtgtgccaagactctgatgacctcctttctcctgccgtggtgacatcctctgggttcaggaaacctgatttttcccctgtctcaatcagagcacatggactccctgtgtgcatgctaaacgagcagagcttttcctgtagatttctataagaagagggattcctygtgggttttgagctcctaaagagtgtgcatgattcttctcaggaaaagtataacgacacgagagggaattgtttcaatggggtgctgctgcaccaagttggaataccaggtgaaggcccagatacattaatggagcgttctgaaccgccagagatttagacagaaatgctgtttttgaaacaaggggtatttgataataccaattaatgggtggcaaagagaatcagtcttccagggcttgcttgaaggataggtttataaatagcatgttagtttttggtggtttggaactgaacttcttataaaaaggtttattttctttagaaggttaaacatttgccttgtgattgtatttcctccatcaacttgctttgcgaggctttttcaatatctagtgcaaaggccaaccaccaaggtctctattatgggttctgaatgagaggagcctaaattccaagttatttatgttttcctctccctgagatatgctgtgttgattactattggcttatgtaaaggaacacttcacagacttccaaaaactgtctgctgcaattcatcatcagatggacctgaagatgcctatctaccaagctgtctaccaagaaatgagattctgaatcatcttgggttagcagagtttgatgacacatgccctaaaatatctgttcctgtgtttaggttttatattttaaaaatgagtaagtataaatgttgcttttcttctcgccacatttgagtagtgagtaaggtgccttaattttatccttgatttcagacaatgtgctatgatacttgaatcagagaaacctgagtttgaatctrgtgatacgactttgggctttattggactgtgcaggaactccattagaaactagtgcacgtaaagtccctggctgtagtaggcatcttctcagagtgtgttaaatccctctatcttctgagatgcttacagacatgatgactccagggaaagaataacccacaaatagtttcgaaaaccaataatagcaacatttcaattattaatctyctgcgattccctttscagtttgggcaccagcaacaataaaccccctatagccatagaagaaagaaccttctttttacyccctctgtgacctttccagattctttatttgcattgrgcttctgctggtttcaggtagagaatttctcttctatagtggcactttctgtgctacttgaaaaatgtggaaataaactgctggggcagagtttcaggggctgcagctgtgcctcttggaaagtatccccaagtatgaaagataacctttgccgttaaccaagatccattcctaaacaaggcagcaggctgggcaagggagcacccagaggtggttcaccaagagcctcctccaaggggagkctcctcgcccaccacaagccagggtctgcctcaccatgcattaaacatcattttcctacaaaagacaatttggtgctttctgtaagttacaggggctcagattctttgtattttatgttttatatttcttcatctctctctctctcccttcctcccatagagaccagtcttggggaaccacctttgaggtttgtgtggagcaaagtagtgatgatcaagagggtgtgatatgtgagcatttcttattgttctctgaacgtgtaattcgcctgtgctttctggtagtcttattgatgacaattcaaggactttgggttggtgtcaaagacgggcttcagaataatggcagtagactttatataaccaccgatgggatgtgaacttgaaaggcccaaactcgcaagagttccatttcatatagctattctcttttgggggaaaaaagaaaagaaaaacctacagtataggcagatstttatttttcctataaaagaaacccagatgcttgagggtcacggtgatcactgtgacttaggccatattgactttgtgctgtgcaccgccctgcgcccttcacccacatgaactcaaatgttccacctcttgacagacgagggcccatctttaacgcattcattcagcaaacatttatgcaggacctgctgtgtgtcaggccctgtggcaggttctgggtttgtcgaaatgacaaaatcttaatccctgtccctgactttacagggtgggggaagtgaaagaagcatagactcactagaccatgggtctgattcaagatggaattttttcttctcctttttttttttagtggcagttcatacttctaacatgcctatgctttcttcagctagaatgggaagacttgggtaggcacagtggctcacacctgtaatcccagcactttggaaggctgaggcgggtggatcaggagttcgagaccaacctggctaacatggcgaaaccccatctctactaaaaatacaaaaaaaaaaaaaaatagctgggcgtggtggtggtgcctgtaatcccagctacttgggaggctgaggcaggagaattgcttgaacccaggaggcggaggttgcagtcagctgagattgtgccattgcactccagcctgggcaatggagcgagagtctttctcaataaataaataaagagtgggaagaccccattttcctatctctcttgaagtgttttctttacgtagactcaaaaaagtgtttctgagtgtagaaaatactcattacaagctttcttagaaatgtccataaatattactgtctgtaacttgcagaagatcctgtcttcttctatttgttacttaaattttatatccttgccaatgcaaatacgtttcttatttgcacaagttctcagagactttcgtttctgatatttggtgtgtcgtaggctttgttgcgagtggactcttgcatcatatgtggctgttggagaattgattcccagccttttcgcctggctgagaccttgtattccaggtagttgtgtggcacttggtggtggggatatagatcgggctgtcactccgaagcattcagtggctacttacccagagcagatcattcagggaattgtggaaaaagaaaagcctgacctagcttcaggggcatagagccccagagcagaagaccttgacacagatatagttcacccccgtcttcaggaaggtgaatgtctgtgacttgaaattgtcagttcattatttatttaattattttttccaggaaagggcagttggaactccctgagtgaccaattccagtattctattaacctgattgtcaagaaattcctgggcctggctgaaatctcgcctgctgtcattcaaacttgttttcttttactcaattcctttctctaaaacctttcatatacttaaagataataactgggtctctttagctttttcctcacagagccggttttgtgtcactgaaagcatctcctttctctcttctgaactctctctagtttctccctatttaaaaaaatggtggcagttaaaactgaatacagctctttaataatgttctcattagtaccgcatataagagaaaaacgacttcagggttcttgcatcatcgtgaacccctggagggcaggaaccatgtctgattcatctttgtcccctacaatagccgtgcagttccttaaacctagtaggcgcttcataaatatttctggaattgactgttccttttaatgcatctaagttataacttacgcagccctggattggtgactcatctgtagctcgcattcatttcggccgtctttatttttcttgtacttgtatctggcatccctcaccccaacaaagccaccttctgcttgactccactgatcactttgcatttcacccctcaacttccaactctttagaatcttgcttaattatctcccgtagatctgacaaacagaatgcagaggccataagtataaaaacttgaactacacttgaaagaagagcaagcacacagaagaatcttgatgattcagagcagtgtcaggtcatcctcatttagaagggaccgtttgtcaaattcgttatagattctgagtcagctaaagccatacctgttttactaggttctccaaggtgagtgagctaggtgtttatgagagtggttacaagtcagactttcagagggtagtcctccctctctttggtttaaagccaatggaaaaggcaaaagatgtaatgaacgacatcactgcaggttgtgttttttctgacagatatctttgcccttagaaagcaagctagtaaaatcattgccaaaaaagaaaaggcagaaaacctttgaaactccaaaatatctttgtggttttatagctacttatttctgaatacagcattgaacaaatttgtaatgtttttgacagtagtctgttttaacaattcttgcctaagtacttttgccttagtaggttctgatcaattaaatgccactgtgtttaagcagaattaagattgatcaattcttctgcatgtgttaatgctgtcgactctataaaaacctttgtcacaaaaagaatgcagcctaatatgtgagtggacaagggtatttttcctccaggtggttctgtccatccgcagtgagagatcaccatagaaccttccatgacattgactacgaaagcacttctggcttcacacagtcacagatttgcatcttgaagaacaaagggtttgtttgtgtatttttaccattttccttcacactaatatttccctgttgattcaacctatggaatcgttattcccaagtaaaatcattcgtccaagggcttatgataagaagccagctctatacaatatagaacttatagtttcatagcattaaggaagcaaattttaatggtgtttgtgcctggatttctgttaaaagtcacagggttataatgccgaggttgtgagtattaaattaaaaaattttaaaaagtcacagggcagggagatttggaaaactccagcttattgccgattgtggaaatgtgttcttttaaaatttgtttattttgtatctaatgaaagatttatagggctctgacaaaaaccagcatgtacgtttttgaaactgtacagaaagacagcaagttacaccttcctgaattctgtgtcacggcatctactcaccagaatctgagcggatagcagggacttctggaggatagtaagtgtcaggggaactcgtgacagggagaaggagcaccaagagagaatgcacacgtgctttyggccttttcccctgaaccactcacctctgcagctccagcacagtgtcattactattattcattaagtgtgacctgtaccatcaggaaaagattcatcagtttcattatgttctgttaactgagcctgggaggttctctaatgtattacagaaatgcttccactagtcagtggttaaagaaattctttcatttgcttgttacagtgatgtactccaaagaggatttaaggctgcttaaatggttaagtttctggtagagagggaaattaatttatgtagatcaattttgtggatagcttctttccaaggatgtcggataaatgaggtattcctatagaaagagacaacagcaataggcaaagctctggtgttggcttaacaaggtgaataagcagagtgcataatggaattcatttgcaaagtaatttttgcttggctggagtggtaagcacaaaatagactagcagatgagaatggtaagtgtttgggatcagttgttaaaaggtttaaaaggggttctaattcaagtgacattttgtggtgtggagaaggggaccgatattatcagaatgatacttgaacaaggtaatttttactggcctgggtataatagaaggaaccagacagccaggggtgggccatgctggtaggccttgtggtgcggtggaaggcactgcggccgtggagatggaggtgggccatgctgggaggccttgtggtgcggtggaaggcactgcggccgtggagwtggggcagggctgctgttggggtggtgcaggagaacacgcatcgagcacttgtcggcttgcctggtccagaggttcaataaatgttggtttctttttgctttcctccccacaccttatggcagtgatctaggatcaggaaaacttgctgggattggcaataccatgatgttctgtttttctaaagaatctctttttgtaggctcactcgcatttcacagaatctgactgggtcatagtataaccctggtggggtcttcatgcgttattattcagtctttgacacatgagaatctgaggccagagcaatgaagaggctgttccaatgttatgtgtgctgggggagcagagctagggctcttcctctcccttcccctgtagcagtgtgcacagaagccccagaacactccagaatgccgagtggagctttgctaggctgcactgccaggtggggctccaggtatagtggttcctaccaggctgtcagagccacttcctttttccccagaggcatacggaagctcctgagttctggttctcgtggtccccttgcagcccacagtgctrcactgagcccctcctgcagggagtgtttccctctgtcccaaggaaagcaaggccacagtgccctcagtggttccttgtgtttccctgagaaagttcacagcttgtcaccatgagctacttaataacaacaacaacaaaaatcacaggagagaagtcagtacgatcatgatgagtttcacagaacctcaaagcacttttaagtcattaagcagctttaaaaaaaaaactgatttcccaaggtacagtttaaagtcatttkatctctttgacatcaccaaaacttgagccctgcctcttgtctccaggcatgacagtctgacctcagatagggtcctgttgtagtctctgtctggggctactccccacctgcctgggaagcatttcagtccagatgagcagcatttgaaattagttgaacactcagactttcacggttataagacacaaactagggagtgagcttgccctgacatttgtgggtcttgggtcaagagtgtgaagcgaggcccccagtctgccatccacccaattctctctctctactcctggtctgtgtgtccaagctgcgaccactcccacctccgcttggaactggggtgcctcttgcccaccttccaggtctacatgtacacccacaggccctgggaaagggcctggaagcaggcatgaagccttttgggcagggaatctcatggccccagggacccagagcctggtcttgaagaagagggtgggtgctcagcctatgaatgggcacagcccatgttgggaggggtgagcttgggccttgacccaatgaggttcagggcttgagcccttgttgccctgtcctaaaggcagtactgataaggggacaccttgcttcaaaaactgaagcaacaaaggcaacttgaaatgtttcctgtttatatggctggtggttgcatttctgcatcctctgctctccttttcctcctcaaccttggtctcatacatatgattgcttcctaaagcaaagctgatgaaactgacccatttcctgttgcttgccaaagtagttcagtaaccagtatgttccttctgctggtgaaacctgacagagaacctggtaattctgacagctgttatgttttgtgggtttcagccactgacttccatggcctctcctaccatccttctttgatggcgtctctgctctctgcttccacctatttattttttcccacttgtctacccacagagccaggctcccttacctacctgtttattctttgactgtgtgttccttgagcgtgtatttgccttgttttacttgtaggtgtgaaggtctaagtggatgtacacacagaaccttctttggggtgtatttgtgtaagggactgtctggaagaagtggttcttcaacctttttgcccttcagttctctggagggcttgttacaacagattgctgggtttcacccccagagtctctaattcagtaggtctgtggtaggcttgagcatttgcatttccagttgaggaccattgttttggaagagtacattcagaacaaaaagtcagaaatatttagaatcagatggtggttgttttggtgaaagcttttcttggatgtgagagagtcagggacctggccttagcattcttcgcaattctactgccttttgtggctgtgacttccagaagccataggcacatgcagatccagcctccgacttcctctcctctcacctgccttcacatcttctcagggaaggtcacaaagtgcaggagccactttctcttgttcattcagagccagctggtctgtgtagttcatccagtttggtcttggggccccagaataaaatgggccaaatatcatcctcacaatagtaatacactattattaactaatatttaagagctctatgattttctccatttacagaagaggaaattgaggcttagagatatgaaataatgtatgcaaggactcataacaagtaattggtagagccagagtttgaacctcagtccacttgtcgccagcgcatgcccttatcttcactggcaggccaccctgcttcttgcaggtaagttagagtgatccatgccatgtgcaagactgactccggtaagaaggatctgggatcctccttggaaaagaggcaatcaagctggagaccgaaggtgctaacacagatttctgtgacactcttgttccatttgtcctgttcatcaaacagggtcaagtgaggtggtgaatgtacagcacttggacctgtggctggcatgtaggaatgtggtagagggcagccaagccatgagtcccctttgagagcaaaacatatcaaatattcaggaatactcttactgagacctctaaggaaaaacatgttatgggaagatgatcataacagctaataccgcacacttgctattgccagttctgcactaagattttacatgtgtgaattcattgaatccctgtagtaacactcaaaagaggttccacttccacagtgttacacagaggcacaggcaggtgaggcagctcctgagtgcagagatgggatcgactccaggcagtctgagtccagagctgactcctgaccaccagctgcacagtagagactcttcctcatccctcctagatgagagagggcaacttgtaaatacattggttcttctccaagtatcaatggtctttgttttcatcaaaatctggataagtattttaaaacttgagagaccaatttctgttgcttttcttgaaagataaggtggtaggacataggttaggcatggaccataagagtggtgaaggggttagctctatccagtgtcaaaccataatgcttcaaatctgggacaaaatttgacagacccatccatggggcagaaggggggaggcagatttcaggttccatagtctgtgagcatttaacagaagatggaggaggtgctgtgaggccatggggaaaggaaggctgattacctgaatgggaatgggactatatgagagcaatctgaaaaatctcagtgggtatcatcacctcacatcattacaccaatgtaaattctgcctgattaaaatgtgaggtttgacaaaaatatgttcaaaatacattcagtgttctggggactctcctaggtgccaagtgtacagcattgagcaaaacagataaaattcctgccctgaagcagcttgcgttttagcagataaagacaaayrttccacttttttacaaagctttttacaaaagcttgaaggaaatggaagtggatatttattaaacctctggaggagttgaaatttctaagattagaagctgtagatgaactcacagaggaaaatattattagtcttgtcagcataaacattccccaaatgttaaggttatttactatcatgagttattcctcagtgtaattctatgtaacattgaggtttgtctagatgttaggataggtcctccaaagtagatatactaggtcaagggatttgaacatctgttgggttctagatacatcaccaggttaatttccttgccaaagtttaattttttttttttttgagacagagtctcgctctgtcatctagactggagtgtagtggcatgatctcagctcactgcaacctctgcctcctgggttcaagagattctcctgcctcaacttcctgattagctgggattacaagcacccgccaccatgcccggctaatttttgtatttttagtagagacagcctttcaccatgttggccaggctggtctcaaattcctgacttcaggtgatccacctgcctcagcctcccaaagtgctgggattacaggcgtgagccaccacaccaagcctaaagtataatacttttatattaaacaaatcaaaccaccaagatgaaaaattgagttaacccacctgtttgtctgggtgctgctctcaggcctgggccctgctgtcattctacccctctcgccaggtgacatatcattcccaggttttcaatgctccctctatctgttagggactcctaaagttgtatctttacctagacttcttttttcagctccagagtcataaagccatcaagctactggacctctctctttggatatctcatccttaacacatycaaaggaaacatcttggtcaaccccctgaaatatactgctgttctggaattctttatttccataaatggcaccttctgtcacccagtagttcacatcagaaacccagagtcatccttgactttgttttacttaacatttaacccatcaccaaattgtattgatttttgcctcccaggtgtagccattctcatcattcgccatagctgtgttctctaaagtcgccaggaacactgaattagtgaatactgaatcattactcctaagggagatacagagttaggttcctgtgagcctctggtcatatttccattgactgatcaatacgtagtatcagtttcgttggtgtaataatgttgtatgttggtagatgttgtacgttggtatagcattacatatgttggtgtgatgatgttttatgtgtgtttctgtttaaacatatatcttagcatatagttttgattaacatcaaactcatgcccaacagcactataactcatgcctgaacgagcttwtctaacacatgcgtttctcataaggcacatcacagtcttcttgtgcttaggagcactaagcagcactttagcactgtgcttggggaccatttaaacagcaaaatcaccaacaaaacacaccaaaatgcaaaaaaaatgtggcactatatagacagttgaaagggtacttgtttatagtataagagctgaaacaggaaggcagagtgtcaccattgtggagctcagctgggaatgtgtgtgttgaccagcgcaacttttttgctgctctgcgcatgcgcaggcatgaccaaaagtgcyctgagtattgactttggggttacaaacaccttttagtgagtaggtgaatttgcaaatgtggaatccaggaataatgacgacagactgtttatcgtgaagccatccatttctgtctccactgccatcccttgtctgggggttggcaaactttttctgtaaaggtccacgtggtgcatatttgaggctttgcaggccatctggtctctgccgccgttactgaagttgtagagtgaaagctgcacagacaatacatacacgagtcacgtggtgggaggggcgtgkgggggggggggcgtgttccggcaaaatcttactcctaaaagcagacttgggtttgaatttggtgtccagtctgtagtttggatccctgtagctagcctaagccaccataatgtctcatctggactggcttcctgacttgtccctccatgcctgttcttgaccttccccagccagtttcccatagtgatattaagtgcacattagattctgtcactgccgtacttcagatgtccaactgctttccatcacacttggaagaaaatcctgaatcctgaacagcatggatcacagcacagtcccggcttgcttctctgatctccctggacaccagtcttcccctctgtttgccccatcctggcctctttcagttctgtgactgttcccagctgtttcctgcttcagcaccctttcccacacaacagtcttcccttcctggaatgttctcctgcctggcagcctggttaattcatgctcactctgtggtcacacctcaaatgtcacttcctccaggaggctttccctgatcctccagtgtaaatcatattcccctcttctcatctcagagcaccctcttcttttccttcatgacacttaacaattttcatgaacccacttatttgggcatatttgttttccacctgccttccccattaggctgcaagctccatgaagatagaaacccatctgtggttgtctctgtgttctctaccccgttaccatcacgcacattatagacacttctgaaaacttggcaaatcagtgaatgattgtacaacatgcttttgttcayacagatttttgtatgaaactgcaatcgaggaaattgccacccttttagagtgtatagtatatcttcaaaaattgacagtgatgattaaaagcaaaagacatcttgataggtgagtttgtaaatgggtgtgcacgtgtatccgtattgtcaaagggtgattctgagacagacactctgcgaacaggtatatctggtgtgaagttttctccctgggacttgagtgctgcattcaatcctgctggtmtcacttttcccctagagctttggaactttgctggtaacattttcacatgaggaagtggaggtaaagtttgcttgaggaggcatttcrgcacccctcttaaaaattgactttgctcttgtttcttctctcaaaccatcacctcatctctcttagactttgtcggtgctagttgttgttctttctacagtgttgccaccatctggggaagaaatctttgatttgtcagagaatcatctaagcaatgaagttccaacttgggggttgttcccaagtcattccaggaatcctccatgccactgatggacaggccacttagcatattttagaaaggtaacagatcatttctaagatgaccttctgtagattactagtgaaacctaaagccttatgtaactgcttttttatgtatttagtacagaaataacattttctaattaaaggaaattagaaaataaaggcaagcaaaacactccacatacacacagttagtctctctctctctctctctctgtctctgtccagaaatgaccactgttacatctcttaggtctttttgtatgcatagatgtgtgcacatttttttaaccaaaatgatgtattactgttttattatctgatttttttggatgacastctccaactttgtatttcaataaagttcatctcgtttaataccttgtttctattccgatttccataactggccctcaaatacccttcaaggctggtttgtcgaaatcaccatctaatcgagtatcgtgccctatgtctggttgtaacttccttttagtctcttaatccagcacagtctcttattgaagcagcagaccagttgctggtcttgcctccagaacctctgacctgctagagtgtgaggttgcttctttatggttaggcttatttctccatcctctgatttcctgtatggaaaagcttgcaggattcaagttgtttttgactagatctcaccagagctaattcagtgtgcttcactcactgttactaaaaaggcccactactggggatgctgagattgacccctggtctagggctgtgacagcctgaacccaccatcgtccagttacactttccccctagagaccagcaagtgacttgtgtggtataactttgcatacaaatcgtttacttaatggttttgtacccagtggtcattcttgcctgaaccataccttccttgggttttgggaaatgtttctgtaattctttcatttcttctataaagtagagctttcctgtactgcctggggccgtctggttaccctgacacatggttcccactggaaaggcaggatctgtgctaatgctttccctttccccattaactttcacagtaaggagtttaataaccacttcacgtagtaacacgtggtttttttctgtctttctaacattatacattcatggatttttattgatctggtgtgttctaatcattactcttttgttacaacttttaggcagtgagaccccttcagctaggtcctgtgaccttttgacagaacttctataatcttgaaaatctgtgttcattcatggcacaaatgccccaagctcatcttgtacttttcagtggtatgggacaatggtattagagagtacaatcagggtattgggggtggttattggtgcagaggtgacttgtttctagagaacttcagtggacaaagctggaaaatatatactgttaaaatttaagagttcaggtggacatgtccagtttagttttaaaatccttatgctttcactttccttagtaattattttaactccctttttctggtatggamaaatctttattttttctttaacctataaatgtaaagaatgtagtttcgaaataccaatatttatattattaccaatatggaactacagaggaaagtttaatacttctttgtaatttttgttttgttcttaaaatgcattccactaagggtatgtattaaaaatactgtgttctaaaattcctaaaaataaattcttcctcagagagcatgtcacccagtttgatgtatggttaggctcatatcattcagtttcttttcagtttaggacattttgaatggagcttttttaagatgggtaatgcattacgtggctgaagggtcaaaactatgtagatgtgggccgggtgcggtggctcacgcctgtaatcccagcactttgggaggccgaggtgggcggatgatgaggtcaggagattgagaccatcctggctaacatggtgaaacaccgtctctactaaaaaatacaaaaaaattagctgggcgtggtggcgggtgcctgtagtcccagctactcgggaggctgaggcaggagaatggcgtgaacctgggaggtggagcttgcagtgagtcaagatcacgccactgcactccagcctgggcgacagagcaagactctgtctcagaaaaaaaaaaaaacaactaggtagatgtttaatctagatgatgggtatgtgaaaaattgttaaatcattctctctacatttcttttgatattggaaagttaaaataattaaacaatatagagaagtatacacaatgaagtcttaacctgtgaactttgttttttttcttttttattatttctgttttgcagatgagccctatgcactttgttccctcgtagataaccatttttcttagtatctcgcttaacccttgcgtctttcatttttagaggttctagtgtgtgtatgggtgtgttcttattcccttacacaaaggataacataacacatacagtctgttgttctacgtcttaacttttttctcttaataatacattctggaactctgcatatttgtacatagagattatcttcagtcttttttataaccttagagtactccattttgttgatgtgtgatgatggcacaacaacataatcttggattgtgtctaatcctctgtcttttcaaatcacctgtaatagataaccttgtagacatgtcatttaatacttttgtaggtgcatctgtgaaatgaaatcctagaaatgggattatatagtcaagggacagatacatctgtcatttttaaaagttaytgacaaattcttcctgtagggtttataccgtattctactcatgcaagcagtatgtgaaagtgcctgtttccctagaacatcacccatggaatctgttgtcaaacttttggatttttgctggtaggtgagaaatggtattttgttatagctttaatttatatttctgttattataagtaaggttgatcatattttcatgtatttaaatgtcattttgtgtttatttttatgtggagtgtgttttgaatttcagacattttcccactatgttgttggtctttttcttctttattctgaaagctctttatgtatagtctttgctatgagttgcattttttttccagttgatcatgcatgttttggtttacttagtggtggtggtttgccctttggaagtctctttcattttatgtagtcaaatttattttttttatggcttctgtatttttagtcaaagttggagaggctttgcctgtctcatatttttcagttcctttgggtacttttgtaattttacttttttctgtttacatcttggtacgtttggtgtttcttctagagcagcagttcctagcctttttggccccagggactggttttgtggaagacaatttttccatggactgggggtgggggtggtttcaggatgaaaccattccacctcagatcatcaggcattagttagattctcataatgagcgcacaatctggatccctcgcatgcgcagttcacagtagggttcatgcttctgtgagaatctgatgccactgctgatctgacaggaggcggagctcagccggtaatgctcactcacctgccactcacctcctgctgtgtggcctggttcctaacaggccagaactggtactagtctgcggccgggccagggcggggtggggagtggttggggacccctgttttagagtatgttctgaggcttggatgcaactttatattttttcaatactcaattgtcccaacattatttgtttaaaagtttatatttttcccatagtatcataacccctactttatcatttactaagttcctataggtctgggagtctatttctggactctatgtttttccatgggttgatctgttgttaatgtttgaaatttatatcatcttttcatatctgaaaagactagttctccctcgttgctcttccccttcagccttgtcctggctattctccatgtttgttattccatatgaactttagacccaacattcttgattccagaaaaaaagcctgttggtatttccattgggatcacattaaatttataaatttcttaggaggaattaacatctttacaaggttgagtcttcccgtcaaagacaatgttttctatgtgttctttttttgtgtgtactttagtaatgtataaaagttttctgtatataggttgtatacatgtcttaagttaatccttgtaaataatatctttcattatctcctcttgtttgcatatgaggactatttatttccacatgtatttttgacagctttattgagatataattcatgtaatttacccattcaaagtgtatagttcagtggtttttaggatattcacaaattgtgcaaccatcactactatctaattttacaacatttttgtcaccccaaaaagaaactctgtacccattagcagtcattcccccttctcaacctcccccagcccctggaaaccactagtcaaatttctattcaagacgttttctataaatggaatcatgcaatacatggtcttttgcagctggcttctttcacttagcttgttatcaaggttcatccatgttgtcgcatgcctttttttaggatagccatccttgtgagtgtgaagggtaccactgtggctcagatttgctgatttctatatgtatttagttctcttttgtgagatttcatgagtgcaggaggctggctttcaattccagatccccagtgcctcccaaagtgtctagcaaatatttggtactcaataaatgcttattgaatgaatgcttggatttaatatacttctaggccacctctacattttaaagttaaaatgtagtttggcatatataaattaatttttatcttttcctaggtgaaacataattacagggtgagtttttcctccgggaaagcctggtaaaagcagttttgactgatatgtggtttgtgctggtcaatattcctttttcttacattaaaacgaatgattgagagttgctggtacatatgtctaagtgtctgtgtctcatcttttcaggaggatgatttttagctctagattctaattgttattgaaaactacttagtaatatgtataagatagaggtgagaaattaggtaaagttctgggcctgggaaaagggagttttgaatgagatggatcagttcatatgtattttacaagttctaggtttaccaagggctgtgttccagaacctcttttgtaagctagttgtgtggacacatcacagttaacaataaagtgctatcagctaagatttgggtctcaagcttgccttaaaggagatatgggagagtatagttgatgcatgcgtgagagcaggcggtgtgtatgggaactccctgtaccttccactcaattttgttgtgagactaaaactgctctacaaaaataaagtctgactggatgcggtggctcatgcttgtaatcccagcaccttgggaggctgaggcaggtggatcacctgaagtcaggagtttgagaccagcctgaccaatatggtgaaaccccatctctactaaaagtacaaaaattagccaggcatggtggcatgcgcctgtagtcccagctgcttggaaggctgagacaggagagttgcttgaacccgggaggcagaggttgcagtgagccaagattgcaccactgcactccagcctgggtgacagagcgagactccgtctcaaaaaaacaaacaaacaaacaaacaaaaactaaataaagtctagtaatttttaaaaagagtgagagagaacacagctgaaatacatatactttttaggaaaagggaaataattaaatatcagaaaaataatattgaagaagaaatatttctctttaatgtcagtgtttgaagaaaggtattttaattaaatcagatcgtgtgtgtttgcaggagacttttggacactatccaaggattttgagattgacaatattggatttttatattgccccaattttctttcaaaatatgtgactgttaagattattattacccttatattattagacgtgtttgggttggggataggaaaaagacagagggagattgattggttgactgattcattcgttcattggttaaatgggacagactgatttctctaactgtctgagcctgagagatggggaaggtagaacatggctcagaagaatatgcatttcctgtaagaaaacatttgtctgaaaggaattataataattgagaattaagctgtatgatacagaagcagtatctgaagggcagatggataatagaaggtagctgtggtgcaactcgaatcaatggctggaaagccacaggaggcagattcccaccaggccctaaggaaggacaccgtaccgaagccctccacatgtggacatccatggggcctgcgatttctctggtactggaggtattccagatgagtgccttgtgaagggactgccggagactggcatccaacagaacatggatgtgggaccagagcatctttaaggcttcttctcagagaggctggtagttctgagcgtgtttacagttccattgagggagaraaaaggaagaagcagggaaaaagagttaggtggggattttccccgtcagctcaggagaccttgtttctcttcagagagagtaggatggtagaaaacaaattgttttttgtttcatggtctgtttattagtagattattggttaagatgcttttagcttcaagggacagaaaccaacacaaagtgtataaacaaaagggaaaactgactgactggttaacaagaagttctgaggtcatcagctccagggttggttgtaaaaaactgatgttctttctgtatttctgccccatggtttgtggtatgtcggtctgatggctgccacagttctaggcatcacatccaactcaacagtgtccatgggaaaaagagcatctctttaaagcaagaaaaccttttccagaagcttcctgcagacctcccttcacacctcgttgaccaggctgatggtgtgtgccagtgcctaagtcaagtcattgacaacaggaagaagatgagccctggctgagttaaactgacsaggatgtgcwtcccccccatgcyggaagtgaggccgtcttccctgagagtcagtatccgaacagaaagatcacccaatgcatgttgtttttaaagtacttatggagatctctgtgccgtggtggtatcatccgtatgaaccatccaggctgtagtcagagaatcagagactcgctgtgtgatctccaagaagccgtatcacctgtgtcctccatagcaagagaacgtattggaagcccctcctagctttcgaattccatcatcgtctctccttctctccccttcagctcccctcccactgcccacggaggctgctgtgtgacagaggaagtttcttatcaagtcctcagtgatctatgtaaagaagagatggtgttttctcaggctcttagcactttgttctgttggtttcacaaactaattattgttcagaatttaatttttagaaaattttaatgacttttgtaagaggtttagttaacatactgcacacacacactctctgtctctctcacacacttagcttttctatgtgtatatacatgtacatgtatctatattctaacctggctttggtggaaccagctttcttgctctgtgcacagacatcttcctgctgctcgtttcagccctgatgtggtggaatgtgtctgaagcatgcgtttctaggtcttttccttatggcctccacaaagtggtctygatggccctcagttctgttcagcagtaatgcaaagtgaagatgtttctctgactcaaaagtgagatgacattaattgagcgcctaccatttgtgctccttctatcggagacttagatacgatatttatgcttaaaatggctctgaaattaaagggcaaggcctgaggtgcagtatctcctctttctagccctcccattcaggcctgtttagctactttctccccacttccaaagggtgtctcttggaaagaagcaggactgtcccctaaattggagcagatagcagcctggggcctcgagcccccgcttccctttgtgttgtgcactggctccagcgtggcgcccgtctttgaagtcaggtggaagccccacaggcagggctgctgccctcctgctctctggccattcagcacaacctttagtctaggaaaagtgccagtcttcatttccaagtatcatatctccctaaatggggcaatctgctttaaatgccttctccactggcgccttccccatctcacaattggcataattaaagggaaaggctcacctcctttgctgcctatgtgtactgggtcagggcgttggctgggggccgctggtgtgtatgcacgcctgccctcgcagagacgctcccttggccctccagcccttgagtgatcattttcagaagtgttcagagccactctgcaagcatacactttacctttgcattttccctactgtgctcaactcaataacaggcaagctggttactatgatccatgaagctttttgtatcttgctggaaaaaaatgcactctgagctgaaagataatctccctcgatggttccaagtcagaatttgctttatgactcatgacatttggtgtctttctccatgaagatttcccccttctcctcgtccactcccagcttcagatgtgtgcgatggtgtggttcatccttagagagtcactgctggtcccaaggaatggtgtgacatgtaggaaggctcccgtggttgctggtcccctctgatctccagttcagctgccacgccagcaccctcgattaagctcctttggaacctgggtttttattacctgccactcagcttaaagcagaggcctctcagagggcatgcctggtaatgcagctgccctctgttctgcggaggcagcctcagtctccatcacctccctctcagaagtcagtctctcagcagcactggggggcccactgtgtgcaaagccctgtgcccactggttcagccaagaatggaatagaaaacaaccatgcccatctgactactgtaaagagggacaggagaaccttgggacagaggcatacctgtgcttgcccaagcctacctagaccaccctcttgtgggatgtgcactgggaattgatttcccagtggtggggacaaacttgtgctcatttctgcctcgtttgtcacctagattctctttacgatgacatctaatgtgcagaagtccagcccgtagcagcagcatttgactaatgtgggaagttcaggaattttgagcctggaaagtcctgggaaggaaaatccctcatgcttcagcagggctgtgtggccggttctccatgtgcttcagcagagttttctttctctttttcttttttttttttttttcagctgtgaaaaaagcagtgccagctgtttggtaaaatatgggtcagtgagaaataggatttgctttatagaagttaactttggagaatcgtgtcctcaaaaagaaaagaagtctaaagataggaggactgagrgaatcctgggtgtggtgatcctaaccccataagttagcttggggtgctttcaggaagattttggtttccagcagttcagaagggaggtgggcatgatttggtgcagaagggggagaggtgagggagaaaatcacatgcagacacgttgagtagtgataaaccacgagacagactctgcacggccggacagagggcatcttattagagtggaaaagaatagtattttattttgctgtgaacaagatagtttggggagtggagaagagctcccagggtgggcgatgacaggtgtctgggggacactggagccagtggatgcagcaaacagcttggacttcagtcccttttctagcaaaggagctgcccctgtggggtggggggctgaggaggttggagaccatttgaaatagcttctgagcatgtgtgtgcacacaggcacatgcatggctggtgtctcttagagaaaaggtatttagagaaaagcaaggttgtgagtggcctgagagcagttacaattgattttgaatatggaagcaattctacctaatccagagaatatacaaagtatactttggaaaggggcagtaaacttttctggttggcctgccttcctccctccttttcttcttccctttctctcttcttcccttcctcccatccttccttccttctgtgatctttgtgggagagcaagagctatttgtatgtagtgattataaatttggtacttacatagaatttctcaacatgtttctcagagattaacatgatccctgggagaatctggaaggtctatctttggggtgtcttctgaagaagattgtgattcttatggcatctgccttctcaagcccttagtcattaattatttactctcatatctctcaatgcatgcagtttagtgcctagcactaagtgatggtttgtgtgcatggttggcccagcagaaatatgtttgtccatccatccatccatccatccatccatccatccatccatctatccatccaaccatccawccatccatccctccctccctccctccctccctccctccaaatcattcatcaaataagggaaccttccccaaaggtcccagctgttctctctccccttcttataggctataactgggtaacatgcctagcccagatcattcactcccaggcacagcaaacaattagcttagactagccaggattggttcttgagtcacacaaaggggaggtggaaggtggttggaggtggtggtggggagagtgacatctaaactaaatcctgtctctccagaagagaaagagggaatggctattaggaaggcaacttacagtgtctgcttcaacatgttcatttttttttaaatgtttcactctgattgtwgtgttttttaactatactattctctaaatttggctgtgtttactatggtaattattttaattaagttctatttgattatttgtaattcaccttgttttacaacttttgattgattttatagtataaatacgtatactgcaataaaccatatgatacataaaagaatttaggacaggatcaggataaatacaaataaatatagaagttcaaagttaggaagaaaargaattacagatatgcagacaataagtcccttacattgctacttagctgagcttcataacatcaaagagaaaaggcaaatgtggtcgctgcggtcattcttgctgtcagagaaggaaggtgcaccaggtcctcaagaggagcaaagatttttttagttcttttcaactaaattttgcatgtggacttttatctaggaagcactgagaggtatcatgaacagggtgtttggcatccccacaacagatgaaaaactgggttcttacagctcttctcacagcagtcctcattggaagctcaaggcctaacatgaaaatgcaactcagcaaatgttattccctggaaggccaaaataacaggtctgagtacttcttcttatccttctactggtttgatgsaacacaaagacccaaaacactcagcagaactgccagtctacgtgcctatcagacaaccttcaagactattacttttttttaactggcgtgttcacgcatgtgtgtgcctatgtgtgtaaatatatctgtatatttatgaatagatgtatacatccaaaatactatatatataggaagagatcatttgagggtagattccattgcccaccatgctgtattctagctcatcaattgaggctttaggaatcgacctggtaaggttgacatctgtggaaattaaggcctctatttaaaatgctcacagaggagagttctatttttgtaaataggataattgggtggaaaactgtgctaatgtctgtctttatttaaccactccaagggacaaagcctaactgctaaaaccatgaggccataaccaagacaccaccatttacccagggacaccgtcatctttatactgcaattttaaaagagtatggaggtcagaagccagacagttggtttctgtattaatgtctccaggggatgaacagagggtgagaaggagcagatagacagaggcaggtctggacgggaggttggagagcggtcagcgatgttctcccagctgtcaggaatgttatgtgggaagaggttagggaagagagttaggggaaatatcaaatgagggaatgactgtgtcctggcagaggtgttatttcctctaaaccacttttgatgatcttctgtccttgtgaagatgttgggagtggacagtgccaggacagtatgaactgttgtgcggcgtggcggataccagaggagggtgcagggaacaagcatttatagagcctgccactatttcacctgctgacctcctttgagaggcagtattaggaaatggttagagtgcagctgtgtaatcagaggctctaagcccgagtcttctcccagcaaacgaggataatagcggcgtcttacctcagacctgttgggagctgccgtgaacacgtcatccacgcccagtaaatgctagttaacacagtgatggccatccagagagctttcttagcctgatgtgaagtagatctcaggctctgcattttccagcagggtaaactgaggcatagagagacaaattcacttgtgcaagatcttttatctattaagtgtcaaagctaggattcaagccaggttttctagcactaaagcttattggttttttctgttccatgctgcctgaattcataggtaattcacctgtgtcttataacccagacacgtgatgtgggccatgaaccacagcacctttctgggtccactgtgctggtggatagctttctgttcatgacaatcacgtctgatgagcttggcagtgatttgtatgatgacagtgaccgtccagcagtatgytaaggagtctgggtcaggagggactttcttcatttgtttttgccacatcacccagagaacatccctgtaaaagaaggcggtttgatgaacttggaggaactccccagcactctacttgtgaccatgacaattgtgacagtttttccttcacactgtattcaaggtcaggtttttgttcttggaccttgttaaatcgaggatagtgggcttgaatgacttggtgtatcatggaaatagcctcatgtggtgttagcttctgcctggggtcaccagctgctcccacaaagctgagtagccagtaatttcttacaaatcttttcatattaatagaaaaatggaaggcagatggtgggccaggaggagtgctttttctttgaggctttgagggcctgtcaggggatgaattttgtgtccccctccccactcacatgttgaagtcctaacccccagtacttcagcatgtgaccttatttggaaatagggtcattgcagatgtggctagttaagatgaggtcccactaaagtagggtgggcccctartctagtatgactagtgtcctcataggaaggggaaattcagacacagacacgcccacagggaccatggctcatgagcacgaaagcagagactgggttaataggcatagaagccaaggaacagcaaagattgccagcgcccaccggaaactaggagagaggcatggaacacaccgtccctcacagcctcggagggagccggccctgtcgacaccgtgatcttgaacttctggcctccagaactgtgagataataaattgtgttgattatgccccccagcttgtggtgctgtgttatactaggccaaataaagtaacgtagggcccatggaaaaacagtgacttacaaattccagaagaaaagctagagcccctcctatgctttggttaaagtttccatcggagcgtgggagtctggatgtagggctgagggttccaaaagtgtcatagaaagcagagaagcggctcagatgggcagaccagcttccgaagaacacgggtgttctgtgaaggtcattgcgtggaggtgaccttttccctcactgagttttttagagaaagcaattttgtcctttcaggttggaaaaatattttcttcaagaccacaaagtgacagttaaaaaaaaaaattggccacctgcaagtttaaatgtcaccatctagaacagctctgcctgatagagctttccgtactgatgtctctctcggtccaccctctctcccacagtagctacttgccacgtgaccagtaagcacttgaaatgtggccagtggggccgaggaactcaatgttttattttaattaatttaaatttaaatagccacttgtgcccgctagctaattctatgtgttggtcagtatggctccagatcaccagaatagtggtgggatgggacccaagggaaaaaccgggggtgcctggatatccagtggaggccacaggagggctggggctgatgggtcaccctggcttggctagtgcccttgtgtgtggtcttgtcctcagccacaggggcctaggtgggagtaaaagtgaagtaacacaggcagaattttctggatgctttactaaagagatgcktaatgtgaggctttgtctgccgttccttctctgatcccaaagtatcttcgactggtttagtgctcgatagagatggggtagattaagatacttgaagaaaagccaggaagctgggtctctggatatgggcagaccgagatgtttctttgcaggtttcaagtgccggcccttgatgtacccagaggggccgctagtcccaacgctaggaaggtgggaacgtccagatgcagaccaccttctccgaagctaggagggtttcccctgagtctgtcatactagacttattgattgcagatgcctgtcaaaagctactgaggctcagccacctctgcgttcttcacagttgccaccctgcctccagcccctgaattgatggctgctgcagggagtgtgaccagaggatgccgtttggagagtagtcacatgggacatctcagaatctgagatggaaccccaactgggcagtatttggtgcagtttcacaccgaaaaggggtccctgtgactgatttggccagccctggacaaatgagtgttgtcattgtatcaccagcggctttggctcartgcgtggtataatttaaaaattgcctctttttctagctctacttagttatcattctgatttcagaaagaaacaaatggttcaccaagtcttataatatctctaaccccgagacaagcgaggggtgtgaggcagagacacrctatgtcaggctacagcctgcctctcccctggcccacgtcaccttggccgactggactctgaacagtgaagggatagcctagaaggaaggagctgagccacctgactgagtggtgaggttggtggatgtgcagatggaattcctggcattgaattggagggcaggagttttagtttgagtagaggttaggaagataaaagaggtgcgagaaacctgttgtcaacctccagcagatttggtagcttgtgccacatgtgcagcatcatgcttggggactcaggggacatcaataagtagtcagtagctgatgcttatattggtagtgcctacagtgtgccaagcccagttctgagcttaatactttacatacattagccacttcagcacagtcgctgtcttttccaagcactcttaaactcattgcaggcaagattaaaccaagcaacaaaagacatcaagcgatgcagggtaatacgtgatgagcactgttaggcccaaagagaaaaccctgaggtccccagtgacaagggatgcatcatttgatctggggtttgaaggatggtcttgatttggaaaggtggctagggagcaagctcgaggttgccccacacaggggtgcacaaggcccggctgggggacagtgggtgtctcacttgggctgactggaacaagttccaggtcacaggtttttttatttgaatgtaattatttgactgtagtagccatcagcagatggagagttcagagggactgcactgaaataatgaataatttgcagatgcagttggtagccctggtgtcttggtgtgcctttctgttccagcaggatgcgtgcaaagagtggctcacagccccatctgctctgctcctcctggctcgagctttgctttaataacctctctgtcacctatttacacgaggtcatccagctcctctttttctccttttctgtgttgaaataatcgtggctgctacttgctgtgaaagacttaactagtagtgggtaggattgacctctcaattcagtaaacatttactgagtccccaggacaatgcttgcagtgagcatgcagaggaggaggtgattccagccggcaagtggaggcagagctcgagccagcaggcctggccactgcctggaagttggggggtgaggggggtgtggaaggtgagccagggtgcttagcctcagccactggggaatgcgaatgatagtcctgggggaaagagaaaacaagaggaggaacagatttgtgggatggagaacagtggggtaatgagctccatttgggacattttaagtttgagacaggacattccctggagacattaagcaggcaataaaaagacccccaacttagagtcctcgaggccctgcggttgcagtgtgaaataatccggcttcagcttccttccctttccttctcaagtggttccccatggagtcactttagactcggggggaggatagttgcttcctcagtctccctagcctttatcctcacacttgaatgctaaatccagaactcctcattcctgctaagtagttcaaaagctccaagggatccttggaacagtcgcaccctggtgggacttttcagagcactcctagggttagaagagaaatttcagggtaaccgcagaataatgtgagctataactggcccgagtgatcttctagctgggacctggatgtgaggctggcatgtttgaaggttggtgaatgcctgttgacctgcatgccccaaccgggtgaactccttctaccttttgattcctaactaattgcagtgaacaatacgccagcttgtcttctgtaaaatgagagggtgactgtgcccaccagccttgctgctttggttggacaggtcagtacagtgccttgaaactctacttattcatctgtgaaatgaagggatttggcgagatgccgcttaacgtgacttccagcactagcattttatgtaggtcagtgatcctttgtccagggagtgatcttttttccagaggaaccgttctgcagttgctggttagcttatcatcttggcagggagcagcgtggtgaagcgagcagaacgtggcctccggagtcagcaaacctagttaaaatccacttgccgtaagtccgtcacgtggcttcgcagcgggcctcttggcaattagctgcttttcaccagtcctcaagtttcctcatctgtaaaatgggatgatgatatgtatttcaggtccggtgggtgagaatatgtatcaggcatctacttttgtgactatttttaaaatggctttattgagatataactcacataccggaaagttcacttttttgaagtgtacagctcatcagcttttagcctgttcactaagttgtacatcaggcaccactgtccaattccagaacattccatcatcccaaaaggaaatcccattcctgttaactcactccctattcgcttctccttctagcccctggcaaccactaatctattttctgtctctatgggtttgcctgtcctggacatttcattgaaatggaatcagacaatgtgtgatcttttgtgtctggcttcttttgcttagcatgatgtttttgaggttcatccatgttgtagcaggtatcggttcttcattgctttgtattgccaaatagtgtttcacggtaggaatataccacattttgcttatctgttaatcacttgatggacatgcaggtggtttccactttttggctgttatgaataatcctcctgtgaacattagtggacatggttttgtgtagacatatgttttcagttttcttggtatcccattgtgtttttgatttgcatttccctaataattaataatgatcatcctgtgcatattgaccatttgtatgtcttctctggctaaatgtatattcagttcttcattcatttaaaaaattaggttgtgtttttattattgagttgtaagagttctttatatactctggatgttgtacctggcttttaaataggcatacaatcaatgttagttcctcattccaggtctctcgcagaaccctgtagtcttttaggtgacctctggaactaactgcccagacacttaatcctcagcatcctgagtcttaaaccatccccttatgtcttgttcagagctcttcttagcacaaagccctgagccattttgatcctggagccccagtctggaacttggaacagcagggggataggtggggtctagagatgggctctggctgaatccacagggcagtggctactaccaagtctcatttttttctagatggaggacttagggggtaactgcactgatttttggctgcatggagtcctctgtcctgtgctatggacacctgcatgttggggctggggcccacaaagagatatgtctaaggacactggcttctttccactgccactgccaagatgagcagcggattttccaagagtgatctggcagttgtaagttgtatataaaaatgtcccaaggaaaatcatgtgtctgttttaaagagaagggagttttctaggaaacctttgacctggacattcttctctattctgagaactgtaccctgtgcccccaagatgtgatctgtactttgttgcccctctgcttttgtgcccatcatcttcttcctctatttctcctccctgatgtgtgcagccctccctttcagccagtagggaaagggaaacctgcagggtccggcagggtcccctgttcctccccaacaaagcctcttaggttttctttggctggggtctcttcctgcacacctggggaagaggtgcctgcaaagcagtgaaggccttgggagtcccacctagactgtcctccagagagccatctccactagtttgtgaaactgccatgccacgtttctgtcctaaagacttggcctttccttagacatggatttgatgggtcctggacagacgttattgattgttcctcataagtcagtcaagacagtttatagtctctgttaatgcccgggaaatttgttttggaagacaaagccagcccaatggcatttggatgatgctgacttattttaaaggggagaagatacccctagatgtgcaagtcttttataggaacagctgtctatgatgagtcttcatgctccttttgcttctctgaacattctggcatgcccctacctagctgctattttcttgatttcatagaaaagcacattctaccctcagaaaatctgctgtccatttggaatgataagataaatcagaaaattacccattgttagagctaaaagattccttggggattatccaatccattatttttcaatctcctatcctgacaaaaaagagtaagtgttttgtatggagaaaaaaaaaagaagtttccctttggtaaataaatttgggcttcagagcatattgtatatccctcttggagatccacggtgtgcactgcgatattaaagcctctgagaagtcctgcaaaaaagaaaaccgctttatttgatttaacccagcatttcttaaactgttttgacctcatttttttcttcttttttcataataaatattagcacctcacaggacactcagcccagtttggtaagcatggcctccttcatggaagaagaaatctgtgttcagaaatattaagtgacttgctcaaaatcaacacaaagccagacttgaagccaaattttctaactcccactccattgttctttctacaatttataaccatgtcgtggctgagtaagggtttatgacttttaaagatgttgtcatttacattcctaatggaaaatgtaaaggcattagggtcatactgacatgtgtttgaattcaggtcctctgattttacgagctcatgaccttgggggagcgaatcctgccagtctctctggatctctttcttctgtaaggtgaggatgataataatgacctcccagggttgccgtgaggcttagatgagagagtgtatgtaaagatcaagttcacgttcttatctttgttttctctgacatttttcatcataccaggttctgtgccacttatctatgatttcaaaagacgaaccatattacaaacaacaaaacgtgaatggtggtgatcatactgagtatttattgaatagtgactgagaaaatgaatgcacaggagacaggaggagttacctgtgaaaattcagagctatactgaactgatcaacgttcacggaattggagaaataacaaaggtgggacaggctagagtgtggagattaatgggggctgagggaacaggctgtgcactggtaggacatattcaggatctcaagctacctgcctgccacttctgcatccccaccgcgtcaaactgtggttgagctttctttattaaatatgtagcagtttgcttttgaaatacaatatcttcaaaaacaaaaataatgccaggcctgccaacaaagtttgtcccgagggggcaaaggtgaaggacaagtgaaatgttgcaagaggacaggacgatacgaaggatggggtccagagtgaaagaagaggcctatgaggctcagcacagtgactctaagatgaaaccgagtgtctccccagggcgcacacatggatgaaaagtgaagggaatgaaagagagagccagccattccaggacttctgctcttctctgcagaaatcctcctttcctcaccaactcttcaccaacccccaagcttgcttaactagctttggaatttgtactttgtatttttgagatagagtctcacccaggctggagtgcagtggcgcgatctcagctcactgcagcctctgcctccagggttcaagcagttctcctgcctcagcctcctgagtagctgggacgacaggcacctgccaccatgtccggctaattttcgtatttttagtagaggtggggtttcaccatgttggccaggctggtcttgaactcctgacctcaagtgatccgcccatctcagcctctcaaagtgctgggattataggcatgagccaccgcgcctggccggaatttgtacttttgcctggtaatttagtccagtgcccaaacatgaagtgtgagtgtttgtttactgccagcttggaggggacacatgcctgatactgactcaccagttgcattggtggtggacttggctccttccctgggcttcagcccatgtgtgcaccagtctgatcccttgctctgaaatatattaggactaacaggtgtgcaggcctcgaaggacccgtctcttttgatatcttccttgtctagttgctctctgatttctcatggtcctcactccctccgggtcttctccctgccagtttctgagcaggcactttccggagcacagtgtgtggatgacagcaaataagtcctccgaggctttgaccaggagcacagacagctttgccctggtgagggacggtagagagagcaccagtttgcgtcctgctgcagctgcactttgcacagagcgcctcttcatctggcaagcaagcatgcattgtgccaaccctcgtctgccatgccaggtgctggctctttctccggggcgataccaggctaagcatgctgctggcactgagcgagtcacagcttctctaatttatttacctcaaatcaaacaaaccctgactcctgctttgaatttaggctggtattttaccgaaggacagaagggcagcatctctgcagaagggccttctgtgcgctttgcctgggacctctgggggactttgcatgactcctggggacttcaggaggccactttggaaaacaagtgtcaggtcctcaaaaggttaaacatagagtcgccacctgacctggcagttccactcccaggtatgtacccgagaggaataaaaacacgtgtccacatggttgcatcgcagcgaaaaggagaagcagcccaaatgtccataagctgacaagtggatacacaaagtgtgcagtaatagtccactgaatattatttggcaataaaagggaatggaatgttgatacatgctaccacatgagtaaaccttgaaaattttatgttaagcaaaagaagccagatggacatatacatattgtgtgataccatttatatgaaatgtctagaacaggcaagtccgcagagatagaaagtagagattcatggtttccaggggctgtgggaagggggaatggggagtgactgctaatgggtatggggtttctgataatcagagtgatgataatattttgaaattagatagcagtgatggtcacacaattgtgttcaaaaccactgaactataccttttttttttttttggagagggtctcactctgtcacccaggctggagtgcagcagtacaatcttggctcaccgcaacctccgcctccagggttcaagcaattctcctgcctcagcctcccgagtagctgggattacaggcatgtgccaccacaccctgctattttttgtatttttagtagagatgaggttttgtcatgttggccaggctggtcttgaactcctggcctcatgtgatctgcccacctcagcctcccaaaatgcgggattacaggcatgagccactgcacctggcctgaactgtacatttttaaaatgtgaactttatggtatgtgagttgttatgtccataaagctgttactttaaaaattgccctgctggggatggtggcatatacctgtggtcccagcaaatagagaggctaaggcaaggaggatcatttgatcccaggagtttgagcctggacaacatagtgaaaccctgtttcaaaaacaaaacttgcccgaaacttacctttgtagccaagtccttcatggacaggctagaggtcagatggaaagaagtcagaaaatttatcttgggcgagggcatttattctgccactgtgggagaagcactgtgccatgggtgtggaggagcagtgttcagagaggagtgtcctgtggcctccacaatattcattcaaaatttgccaatgtcttggacatcctgggttccattccctgcccggaaatgagttcctctttttgcctggtagatttcagtgattaataaataaatgttcatccttatacatttaaaaacattttatttggaaatagtttccaagttactaaaaaattgcaaaaataaaaatagtacaaagactacccctatacccagattcccctcccctataccccatatccagattttcctgttatcacttcaccccatttgttttgtcatgcccttgaatgtgctgtctctcactgttgctcttttggttgttgtgtgtgtgcctgtggtgtgtttgtatatacagacacacgaatgatcgttatatgactcgagggtaagttacaaatatcatggtgctttattccggcaccatccagaatggtagctactagccacaagtagctatttaaattaaaactaaacaaaactttacattcagttcctcagtcacaccagccacattttcaagggctgcatagacacatgtgtggctgcatcagacaatagagactacagaacctcttcagcagcacacagagctcctctggacagctccgcgttacccccgatgcttcagcgtgtgtttcccaagaatagggcgctctcatacatggtacagagatcaactgaagagaatgtaacactgatacaatatttttatctgagccactgtttacattccagttttgtcagttgacccggtggagttctcattccttttagaatggaggtcttgggtcttgtttgtgagcccagatctgctggtctgtactcagggaacatgtataaaacaggactgctaagtcttgaattgagcctgtgcctttcctatgccctttctttccataaactcgaatcctttctctaactcatgtgcagatggatcgggtctgggccctggagcccaggttgaatttccttagctcagaattgttttaatgcttttgtcactggttgaataactcaaggtgcagcttcctcctgtgctgacatttggtctgtgagcaggtgtggctctgctcttaaatcagcagaaaagatttcctgtgagtaaaaggaaattggccttcccagcaaccgcactgtttttcttttttctaatcactttccccaaattttagcttgcaactaagaaaaggctcattttgttctttgtttcttattttatggcttagtcgtgaccctgtagctctgaatcacttcatgcggcccaggaccaatggggcactggggagcttccggccccaaactcctggtgtagcagaggccggatgtgcagggcccttggcagctcattttcctgcagtccaggagaaaggtgggcttctagcgattttcagccatggtttgggtgaaaagctggggtaatgagcaaattgcagtgatttttattctttcactaactggtgttagagcttatcctccaggggatttctggtgacttaatgggatttcatggcatgagtaggtatggaaaacagattcctgggtcactgacttcacttccatagacattccccatcccttaataattcttaggattttgtgggtgtaaaagctgggaaacaagaaatcaacgggcttattattcttgtatcctttcctatatttcaagttgccccttagaatgtatcctcatacgtcctcccacctttttgtttggattcagcaagtcttagaagagaagaatctttagcaaggtaagacctcggtaggaatactatatgagccatgtagtttgagccaggatggaaaagggaaatgaattcatgcagagagagtggaaatggagctgatagcttcattttctgcttaactaaaacggaatgaaaagggcttggctggcaaggtcaggaccacaaggcgagctgctgagagccgtatggtgcaagatggcaacagagtttctaccccttgaccaccttttgagaactgacagggaagactcttagcgctgggcctgtgtggcttgtttggaggagtaaattgagtatacttgatgctagtgaaagaaccagagagcttccctgcatccagccgttggaaggaaaacatacattcggacattctctgttaatatcttatgcgtaacatgaggcaccctagttgggtaaatggctttgattggcctttgtggttccgcaagggttgctgtgttttgtaggattgtagttcctgttgtactccatagctccagcgtaggcattaagtttttatgttattcgatagcatcctcccagcttcaacaaagggtattggcccaggacagtaactcctaggagtgcctgagagctgattttgtttcaggtcagctctggccttggagatgccctccctgggaatcagggcagagcagagggcatctgtgccaggagggtgtgctctccgcgtcctgctgtgggagttccctcagggaagcaccttggccaccctgacactggtgtgtgcgagccccttctggaaacagagttgcagtgccctggtgaatgcttcttcagggcattggcccctctgtctaccaggtcatgccttcctctgccacttgaagtcagcaaggacgccaaaggggaccagccttcccttcattctcctgtcacctgatcctgtggcttccacattatcgtggttcctttcctacctgtcagtgccagggtctttgggtcatccctctagtttgttgtctgcaccttccctgcaggttcctatcgcctctcagatgcgccttcatggtgggtgccaagcccctggccacatgctttcatttcccactcagaagtggtaccattcctccctcccctctcagccacctcctgtgactcctcaacagaacaaaatcgaaactaggcaccaaagacctgccacgctgactccagcctttccagacccttttgtcactcactgcaatgcagagccctcaaccacaggcatggttttattcttcctgatgttcccttagatgggtttggtcctgttttatcttattttcatattgtgctttgtattgtatctgcacactatcccaggtcctgtaggcagtggatggcttatgaatcttaaataaaaatgggtctcatctgtccctggaacccagtgctcactggcctctgtgtttcagctcacccctggcttcgccttggggtgcactctcgtgtgtaaaggggtcgctgactctgagagcactccatccactctctgaagcctgcaccgttcaatgggcaacagttgcgacttccttctgtggtcagttatctcttctccccttggcccatctcgtcctgttgacctgaaaaacaggtagccctttctttcacaatgccagtggtcacctgccactcttggggtggtgcttggacatcgtaggtgctcagcagatattcctggatgctgctcactctgtcctctacagtcctcagcctagcagatttggaaatttgactccataaatttaaggattattgggttctaaaagactggttcatactaactaattctataaaaggctgatggatcaatctgaatcatttaaagagagataatcctagcatccagagaagctaggcctacatatcaaggtattttctccttggtcagaaggtcctctctggaatcccagtaagagatgagaaagttgcttatttagcacagaatttaagcaaaaggcttaagtcgtcatgtacttctaaatgtatttataaatcatgaaaacattctctgctcatgggatacttctcttaaagaacctgcatgggatatctagaatcaaatattcccttcccmcctcgacagtgaaaaacctatgacttacttctagacttcactaagattagtgtcaattatctttgtaacatcatctctctttatttaggtatgacatatcatagttataccaagttggtagatattctcattaattacattttacgtcattttggagtcacaaatcatacggcttgtcaaatcctggttttgtaatttttgagggttccttcatttaggatctgcagatctctatttataaattagtacagcataacactcctatgagggaaatgataaatgtgtgtgccttgattctagaaatcacaatctaaaacaccatacaagttaggagtccacagtagtgtgtatttggccattaatgaatcagtggtcccctgggtgtgtgagccatgctatttttaaaaccattgctgacttcagtgataaagagagtacagaatgtgccttcccaggcttgtgagcttaccatgaataatacccatggttatcatgatgtcagaacttaaatattctttaccaagagcacaaccgtggcgtcatggagcatgggaatgcatttagggggcagggtgtggaaagtccatttttcccagagaaaacatcagcccagggtaaaagctgattctcccatgggggcacttaggcctgtatgcagcagtgccagactcctgtagggcatcttccaattttagtcaccagagagtgatttgcgtcaaagtttgcaaaccaaaccagagcatttgtcactgaagatcccgtgccttccacttgttcagaaaagttattaggtgggggattagtacgtgcacacttgaaatcactaacactggtggtgatgagagtagtttcatcatttgacacattgatctcctgaagcattctcctggggaatggaagtgatgctaaaacatggaagaaagggactgaactatttcggaattttaacgttgtctttaaaaacgtgtgctctggttttgctaggtgagcatgctgtgcctcacaatagaattacactaaaccacgttaattgtgactcattagggatggcagcattaacgaatattccagcactggttaggatggcctaagttgtacagcagtaacaaacaacagaggtttgcttcacacttgcgccacatcttgggtcagctggggtctctgctctttgttaccctctttcactgaccaggcaaaggagctgctcctccccagaccatggttggttaccgtaatataagggaaagaggagtcacacactggccggaaaggcttttgcctgagaatgctacttcttgcgtacttcttattgtccaaggtggatcatttggccaagactaattctaagttacatggcttagcttacctgaattacagcacagcttttcaaagtaatgggtgcaagacaacgtattaggatacagaagaaaatttgaatatgtatattttatctcactttatcctttaaatttttctatatttgtgtttttggttaacaatactgtattggaaagtaaaacatagattatttttaattataaaaatcacatatatcaggagtgttctcttttcccctgattaagtgcttaatcaaaaaagttgagatcattgtttatacagtagatacaaatctgcaataagcatattgtacatagaaactgggtctcagttatgaccaaggatagtgcttttggttaaaatgttacatggaaaagagatgcagaagctttgaaagtaaattctattctgtgttagctaggcctctgggagctagctgaccaccctcccctcagttttcactaaacgcttgtttaggactgtattagtccattcttgcattgctataaagaaatacctgagtctgggtaatttataaagaaaagaggtttaattggcttctggttctgcaggctgtacaagaagcatgatgctagcatctgctcagtttctggggaggcctcaggaaacttacagtcatggtggaaggtgaaggaggagccagcctttcacatggccagagcaggagcaagagagagtgaggggggaggtgccacacacttttaagccaccagatctcacaagaaaactcactcccgttgcaaggacagtaccaagatgaatggtgctaaaccattcttgagaaaccacccgcatgatccagtcacctcccaccaggccccacctccaacactggggattacaatttaagatttgggtggggacactgatccaaaccatatcagggactcactattttatacacacacacacacacacacacacatatatatataatatgttatatatattatatgttatataatgtcatatataatatatgttatatatagttatatatatatatgttcatttactcctcacaaggaccctatgaaatatgattactgtctccactttagagatgaggggattgaggcagaaaggggttaagtaacttgctgagatcacagagctagaaagggcagcactggcatctgacctagttgttgagaatgcagaaacaatctgaaaattagctcttggaatacagacccctatgaagatagggatggcctacatcaccaaatgccatcctgtctgttttaaagcaagacataggagagctatcagacatcttagatgtacgtggggaaggcgccccgctacaagaaccagtattatctgagtgggcacctcctcccagcactgggtgtaagtggctccgtgccatggagttgttgggtaataacgccaggactggcttgatgacagtgactcacagtagaaaaatgtccttgcaacagaccaaagaacccactttaatttgcacagcttagaatgggccactggttgccctgccaagggatccctgtaccagctgattttcatatccacaaacacacacacaaaagcacctatttaaatattgcaaataataccacattgcatttttattatgctttatagtttacaaagcacattacaatgctactttattattcttagtgtgctccaatataatttcacttgccttctcttttctcacctttttctcatctttagtttctttttccttttcctctcagcatccgtgccaactttccccacactccagctttcttcctttcgtttcttcctgctcttccctctccctgcgagttgtggaggtggtacctttcccgaagtgatccctaattgagtttagtcaggtgtcagttaaaggcaactgaggggaatgaaacaattctccaaggaacaaaacagttgtaacatggagctcctgttgtaaatagcagttgctatttaaatcaagtaagaaggatggattattgtgctttaagaaggggatgaaatgaatcctgtatttaaagagagcctgggggaaagggttatctgcatctcacatccccggcatcactgtgtctgcaaaacatctttcacaaagttttctttgcagttagagaacagcctgtgaragaaatgctcaaagaaatacataaacatgagtacaaggggtgtgcaaacaggtgttgcactgagcgcagaacccatttggcggccctttgtcctggttcctttgtataactcagcaagaagttgaggtttagaaaaggcaggtttgaggaagtgccgtctgtggcctcttaactgtggacgtcactgatgagaacagatcgaactttagatgccttccttagaaattttgttgttttgaagtcaaacctcaatcacaatgaacaaatatatttgcataaggagaggaggtgtatagtgccctggcaggaattaagactaaaacgtgggagtaaagctgtagatgcttctgttgctttttaaccaagaggccacagacacaggccgggaggctgagagggcaacctgccatttggccagcgtcactttgcgattgttataaatactttatcatagcttgagtacagacatgccttttcaatgaaatacatcctgacttattttgcagagggtactagtttcatagggtgactgtaacaaattaacacaaactattaataggtggcctaaaacaacagaaatgtcttctctcacagttttggaggagttggcagggccacrttccctcgaagactccaggtaaatccccttcttgccttctctcggcttctgatggctcccaacaatgctgggcatcccttgggttacagctgcattgctccagtctctgcctctgtcgatgtgtggcccgcactctgtgtgtatgtctgtgtctcctcttacaaggacaccagtcatatgggattacggctcaccttaatgaatttattgtaacttgattacctctgaaaagaccccatttccaaaaaagatcacattcacaggtactgggggttaggacttaacatatcttttgggaggacacatagtaatagaatctacacagtttttagtttaaatgaaaattagggccaggtgcgatggctcatgcctataatcctagcactttgggaagccaaggcaggtggatcaccagaggtcaggagtttgagaccagcctggccaacatggtgaaaccccatctctactaaaaatacaaaaattagccgggcatgttggctcatgcctgtaatccccactactcgggaggctgaggcaggagaattgcttgaacctgggaggtggaggttgcagtgagccgagatctcaccactgcactccagcctgggcgacagagtgagactttgtctccaaaaaaaaaaaaagagagaaaaaattgcagtgacatggtaacaagaacaccaaaatgggaaagaatagagtagatttccagttctgattctgtgtgccacaaacatttctgaagtagaacctgaggtagctcaaaaaggcacctcagctgtggactgggccggaaatgggtgtttggctagtaaaacgcatcattttactttaccaacatagtaccagacatttaaggctaacaaattcactcttgctcagaagagaaaaagcctaccagatttttagtcttgatttagactttaccaaacatttctaaaggataggaaaagtccatctgaggcttaccttccgttgccaggcacacacctggcctcctcagtatctgctgcaggtctggtttacttgtctcttgaggtggtcagtgaggattttgaaccagtagtgaatggagggacattggtatgtcatgttaggaagtggctgaaaaattcagggaaggtgctttctttcgtaaaggtttgtgattcaaacacctgaaaactggtactgctgaaactttaaccgtccttatttagaacatttcagggacaaggtaagcagccttctagatctttgaaaaaatgtggatttaaatggaattcctctgggttgaaaccagaagtacagctgattttgttttcatagtttgtgggtgtttgcctttttcatcccaccacgtttatttaaaaggttgtcttcttgagatcctccattggaaagaaaatgcagtgttgaaaaacagaacaatgtggatggcaggtgagagagggcacacgaggaagaaccaagccggggctcctcctcgatgctgaggggcatgaagaggggtggcctgaacttggccgcccactgccagccaytcttgaggtggcttttggggcctacttaggttctgcctcagacacacacagaatcaaaactggaaacctagtttttgtgttattaataagccactcccaattctctctctctctctctctctctctctctctctctctctctctctctctctctctctctcagagacagggtctactctgtcacccaggctggaatgcagtgttgcaatcacagcttgctgcaacctctacctcccagcttcaagtgatcctcccacctcagcctcccgaatagctgggactatgggtgtgcaccaccacacctggctaattttttttgttttttgtagagacaggatttcaccatgttgcccaggttggtcttgaacttctgggctcaagcagtccacccatcgcggcctcccaaagcattggaattacaggtgtgagccactgaacctggctccaattctcttttataccaaagtgactacagttgctcctcagtagattgagagatacattcctatatggcctttttcagaagcgttgtaacatcaactcatgcagagcttaatttaaagtagatagtatgcttttacttgtttccagctatgatattagactaattgaaatgaacttataggtcctttaaggtaagatatagagaaagcacaaagtgaaatgtcttatctccaagaagggaaaaccgaagagacttcttttggaatatggtaattatttaacctgagaaaattatactttagtaaaatgcttttggtttccttaaaactattgttatgggttgaattgtgtttcccccctgccaaattcatatcttaaattcctaaccttccatatctcagaatgtgactttatttggaggtagggactttatagaaggaatcaggttaaagtgaggtcatcagggtgggccctaacccaatacaactgatgtccttattaaaagggaaatttggacacagatacacacagagggaagatgatgtgaagagacacacagagaagacagtcatcagtgagccaaggagggaggcctagaacagacccttcccttccagccctcagaaggaaccagccctgctgacaccttggtcttggactccagcttcttgaactgtgagacagcgtctgctgtttaggctgcccagtcagtggtgctttggtaccccaaccctggcagattcatatgctatgtttagaaagtggtgttttgtgtttttctaaataaggttcttaacccagccaggcacagtggctcacacctgtaatcccagcaccttgagagtgtgaggcaggaggatcgcttgagcccaggagttcgagaccagcctggacaacatagggagaccccgtctctataaaaaaataaaaataaattaggcaggcatgatggcgcacacctgtaatcccagctacttgggagactgaggtgggaggatctcttgagcccagaaagttgagcctacaatgagctatgattgcaccactctactccagcctgggtgacagtgagaccctgtctcatggaatttactaaccaaaacaattagccaatgccactcttgtttcaaaaaggattctttgaattgttttattttcttttcattgatcccatcagtttcctggagaaagaagctgaaaaagcgtttgtgtcttatcagtgtttgcttcagcactggattggattgggaattttcagattgcttatgagctcttgacaccatgtcctgtagataaacaattatgggttgtctgtactcacccactgcagggcaaggctggctcacccacagtggttgatggcttcattcaaagcagtatagcagagttaccaaaaggagttatttggggccaagttagcagcttgcagaaagagaattaagtctgaacatgtaactctgacaaataatgagtcaataagtagatagatgtgtggagaatttgcaaatgttaggaaaaggatgttttctcaatcaaagaaacacagcctatggtagcatttgcagattcaaggcagatgacataaaagattttgaacgttcttaagagaaccacatttcttggaagagcaggaggcgtgacatggtgcatttggttctcttcccaggagagcacccttctttccctgctcctgaccctgtgggaaaagagggctattggctcattcccagccaggctctgccactctttctctgttttcattctcctggatcaatcccttaattgtgtttatcatcatttcatccttgatgtttccctgtgactcatattgtcctcctcatactatttgacaatgtctctgcccccgaggattacttgatttgccatctgctctactttctacagcatttctcctgggaaacagctttacccacggggactccatttccaccgaggtgttgatgacagccttcaggtccacatctccacccatgaccttgcgcccattccctaacctggcttttttcttgttgcatatagaacatttcctctttgttgttactaatgcctaaaacaaaatctgccccaaaccaagcccttctagctggcctgtgctcttaccgtcagcagcaccattctcttagtccctttggggcatgaacctttgatttagatctttttcccatttgctatttctcattctggccttctggtcttttggctgtgtccctctgtctttggccttacccatgaactagttcagggtcaccttgctctcttccccttccagttaatcccatgcaggcccagcccatcctattgatttccattcccttttcaaagtgggtgatcgtcattcacaattcaacctagcaagtaggaactgggtgctggttaggaaagaccattagctcctgacacttcagtaaattaagcaatttcttgcctcagagtttcagtatgaatagctgaacactggacatttcaacgtagatatcccgttagtgctcataattcaacatgttgaaaacagattctattctcccctcccccaacacttcaactccacttcccatcttccttctcactcgtggagccccactccttctggcaccccaaatgtgttctagtcccctctttcctttgctctcacatctcatctgtcagcatgtctcaccttttctcctctgcagagttttatatttctgctgcttcctgttttctcaggcagttccttagtccgggtcccccttacccctctggaccagctttcccattggctgagcacttgcccaagctcccttagcccggctcttcttactcaaggccacttctctgcactgaccccctatgcatcagataagcagtggttacctctttaaataggtaaatgtattttattttaatcatttcttatggttatatttctcagatgtcataaccagaagacacagaaatgagagatgactcagggtcattgttgttgacatccactattttatcaggtgacgtatagtcaggtgcgtcctgtagtttcagtctgtcttccttcacttatcagccctcatttttcctttggctggtgtgggactcatctcgttgtttggtgattgtagtctgagaacctaaagaatgaagaagtttggctggtggcatggatttgggagtcaggcagacctcagttcaaatcccagccctgctagcagaggcgaagtgactttggacaaattatagctccatttactcatctctaaaacagggaaacactgtagttttgttgtatcgagcaaacacctggagtctgacatatagagagcaaaggcaatcaggacagtcacctaccacttgttgatgtgttagatggcagccagtgagagagaaggcgaaaggagaaattagatgagcagctctcatggttgggcttccccccagctctctgagtatttagaaattacttctagaagatagaagttatcagaagatgacaattctggataactaggtagttgtatacacagtgcatactggtggttatttattgctttagcatttgttattgtattgccactatgcaaacgcacctcagttgtctccaagcaaagcctgagctttctagtacagagaccgcagtgctggccgctcccgccatgagtctcactctcctgatggactgaagtacactctgtttgcaggatttggagcactagccttctgccccatctttctaattgcagcttgagtcttagttctgctgtgaaactttgcctgaccacaatgcatagtgactcctgcctctaaacttctagtgtttactttggcaagttgtttatgttgccttagaattaccagctgtcctttttaatttgcattgtacttggcaatccccatgagattctaagctcctttaggtcggtgacgatgtcttagatgtctttgtgtttcctgttgtgctcaaccctaatctttttttatgtagaggacccttaatacagacttgatgattgattttatttcatgttttttgtttttttcaaatgcccagtgctgcaatcagtagtattgttattgtcattattgacaaaagaattctgtatggctgcatagtattccatggtgtatatgtgccacattttcttaatccagtctatcattgttggacatttgggttggttccaagtctttgctattgtgaatagtgctgcaagatgaaattggaaatcatcattctcagtagactatcgcaaggacaaaaaaccaaacaccgcatgttctcactcatagatgggaattgaacagtgagaacacatggacacaggaaggggaacatcacactctggggactgttgtggggtggggggagggggtagggatagcattaggagatatacctaatgctaaatgacgagttaatgggtgcagcacaccagcatggcacatgtatacatatgtaactaacctgcacattgtgcacatgtaccctaaaacttaaagtataataataataaaaaaaaagaattctgtagagcttgtggttgatcctaagctgtgctctggtggaatatactatatatttaacattgcacaactagtgggtaaacagacattgattgaaaatggtataaaagccccagggacattcagtatacactgttttggaaatgtatcatttagaatgggctaacctgaaattatctgtgtactccttgtgaaatataaacttaataagcaggattattaaaactttatgaatattatttagtatgtcaatgaaggaaactttccaagtactttttgaccccctgaggtattagatcaccatgtcatccagggttctcaggggttatacagattaaccctttctaggtgtttaaaaatgtccatttagatgcatatttccaacattcatatatttttgacatattctataattttgttannnnnnnnnnnnnnnnnnnnatctattaagtactcattattcagccagagcttgtgtccagaagattttaggaagtaaggaagttagtacctcttaaaatcaggtgttcatgattccattctcttgaataatataactggattctgagcggtaatctgttttacatctgccaaacccaaattaaatattacataccgataaaattggtgccactattttagagatcacctccctgggaatcagggcttgagctttgctagaattcagtgaaattgaattcaatttatttttttttattgtagttgaaccctcactcatccttgtagtctgatcttccagtagataatttatttaggggtggtgaaatggaaaggaaatgttactcagatatgaagcaacttttcagttcatctaattgtgaaatataaagttatgaagaaactaagtaaatagtggggggaaaatatgctaaatgagccagtcccttaacaaatgtcattttttaaaaaactgtgtgagttggctgggtgcagtggctcacgcctgtaatcccagcactttgggaagccgaggcaggtggatcacctgaggtcaagagttcgagaccagcctggccaacatgctgaaaccccatctctactaaaaatacaaatattagctgggcgtggtggcgcacgtctataatcccagctacttgggaggctgaggcaggagattcgcttgaactcgagaggcagaggttgtggtgagccaagattgcagcattgcactccagcctgggtgacaagagtgaaactctgtctcaaaaaaaaaaaaaaaagaagaaagaaaaaaaccgtaactgtgtgagttaagacttcaagaaatcatgaagatttttagatattcttattattacattatttgtagccccagaccaatgaatttctcattaaaccattaagacaaagagaaaccaaaaggtgcatagaattacataggtttgaagccgggcatggtgttatgctcctatagtcctagctacttgggaagctgaggcaggagaatcatgtgagcccaggagttcgaggctgcaatgagctatgattgcaccactgcactccaacctgggcaacagagagtgagatcctgtcccaaaaaaaaaaaagaatttagatctaggtttgaacttctggggtcagggtctgatttttttcacttatcacagaagcttaaacccatcacatgacttcccagttttcaaagtaggacctttgtgagaatgaaagtagggagggtgctctgaataattgaannnnnnnnnnnnnnnnnnnnnntccataaaacatctgtcctggagcctgctgtgtacttagtactcaagattttaaaacctggagactcataagtgttttaagaatcctgaggaatagcagatgaagtcaagtctagcattttatagacataaatggcatctataattaaggctagaaggcagatgttttaaaaatagtattttgaaatgcagacttgcatacatgctttttataaatgcaaaatgagaatttcaataaagtaactaaaagaagggtcagaaccctcattgcctttagcatatcaaagtgcaccctaagtctgggtaacctggatttgtttcggcatgagagactttgtcagctttatggtaataaggaataatgtcttacaaatagtggactttaattcttctaactatagcatatattttaatgtcagttttataggtgctatttttcatttgtcatatgcaatgaagagtttattatatatagttgtgtaatagaagttgttttaaattttaataaatttgttcttcagtgctttttacttatcacttctgtagcaaccacatgaactcgtgtctgtgtaattaacaagcatgtaagaaccccatgcatatctgagattcagtgtttatgacttcagcctgtttatgagacagagtggtatggtaataggcatgctacttgttaaaagctttagttctaggttatggtgactccctgtcctttagtgaatgaaaatgtggccattttgacaggttttatcttgggaggccactaaggcttttgtggaaaagtctgggtcaggtcattcctgtaggagcaggtgtggttatggcagatttatcctaccgtgacctcctgggttcctcttactgctccccatgggctcgaaacttgccctcccaagtccagtagtccccctggtctstcacctagaaggagtaaaatccgccttctctttcaagagccaactaggaagtgcagagataacttaaaaagcasttgagattttgccattggatcaaactgacaatgtgcattaagcctctgtttttcctgaaaaggatattgacaaatgaggcgggaagtagccttgactagtccagaggtcaatacagaaagaaatgagaggagacatttagcttttactttcaagtggaaaaaaacattgagtccccctctgcacccccactttattgtccctcactttaggatctgaataaatagagaagtaatacgttgtgggctcaactctctgaaagctaaactaatagggaaggtttgttccagagaaatactctcaaggagaaatgtttggaaataagtgtgttgccataagattattttaagattaagctacaaaaccaccagcagtgtcttattccttatgaaggtatttcagggatttaaaaaagtattactgttaaagactttaactatatcttgttggagcattttgctgcctgaagcaaagtggcctctgctacagaacaaaggtaacacgtctgcactgagcgttgggtccagtcattggaatagcggctgttgacttcataaaggggcagcaggggccacaccaggccaggccggagtctgaggcagccggctgtggtgcagggtgtttccagccatgtaggcctcctgtctgatcctgggcatctgtcatcagaggcagccagtgatgatttccacaattttatgacccttggctgtcatcccaataacaaataagtcataagccaccctcttcccctctgtaaaattccacttctrcaccgtggacggcctttccaccaagatctttttgaaacagtgaaaacagagactagcacctcaccttctttatgtatgaacagcgtatttctgctgtcgctctctctgaccgcccccttccgggtacttaaagactgaaaaataagcagcaggcttgacacgaaaggatgaaggaaatggctgttttgctttgactcttcagtggctaagttactgaaagccaagtaattggtcatttctatattgtatacaacatctagaacaatatggatattcacttgatactgataaatagggaatagccatattctgtgttgttctagaataagggggatgttgacttagaataagggggatgttgacttgaacaaaaagaacagtgggaagaaacgggtgaagtacggattctgaataagcaagccagaatagtcttgtcaggcacgaggattcctacagacgtgcagtcacagtgcgtagrtggaggtcggagctcaggattgaagcaagaagggaacaccctccagcagatccatgggcccagggtggaggtggggctccaatcaggtgctggatgttagcagaactgcccctaggaagtcagagctgaagtcagatggtacatatggtaagtgctgtaggaacagtgagttgggaatgatcactgggttagagtggtctggaaagagaaggaatctaagctggctggtctttggataagttgagaaaagcagcaaaggcatgccaggtaaaggaatagtgtaagagtgtgaagrtaggaagtataagagacattctagaaacagcgaatagaccarcttcattcaagttaaggacccaggaaggttagtagagctggagctaacaaggtagttggaatcaacatgtaaatgtatcgagttctcagctttatctccttgacagtaaggagccagtggaagtttggagaggggagtggcatgctcagagatgttttaggaagattaatctggtagccaaatataggcaaattaaagggagacagagtgctcaggtagatgagatgtctagatttgctttagtccttctagaaagtgataaatacattcactgtggaagtggcagcaacagcagaaataaagaattggatgcaagagatgttttgaaggaaggagaaattaataaggcttagcaccttcttgtctatgaatgtaaagaagaaccatcatagttcatagttttggagccaagtgactagaacagtcatggagatgttaggatagagggtgagatggctagatttttaggaaaaaataaggggttcagctttggaagcgcatctttgacattgtagcaggaggctgcaatatatcactgtaacctctgagggagagcccagcctgtgataaacatgtgggggtcacctacacagaggtgacggcttaaactgcttgaatggatgatagctgccagagagaacagagtcaaaacggtggaaatgccaacatttgaaaggaggaagagggctgggtgcggtggctcacacctgtaataccagcactttgggaggctgaggggagtggatcacttgagatcaggagtttgaggccagcctggccaacatgaaaccccgtctctactaaaaatatgaaaattagctgggcgtggtggcgcacacctgtagtcccagctactcaggaggcggaggttgcagtgagccgagatagcaccactgcactccagtctgggcgacagagcaagactctgtctcaaaaaataataataataaaataaaggaggaagaggaaccacccgagcacacagtgtgcaatcagacacgggatggggagattacagattcactgaagtccagagaagagcatcaagaaggaagtcgtggtcagcagtatcagatgttgcagaggttaagaagaacgggctgaaacaaggccattggattaggcaattaggaagtcatttaccttcaagaacaggagcctatagtgcattaacgagttgggggagatggattaagatgtgggcattgaagaaaagggagcataaaccattgatcacaggtgagaggagggaaagaattaagaggggggaatgcggctgttactccttttgccttccatgttgggagtttgtgtgtgcacgcacatgaaggcagaagaaaaagatgaggtgaccgattcatttggacagccatattaagttcctactaaawacttggatccaattaagtacagggagaaatggaaagctacaagagaaagaacagtggtggaagcaggttcaagagaaaatgggacaaatatggatcatgagaatcgggaacttttttagtattggaaaagagcaacacctctttctctcagactggagagaaggaatgaaggatggaggatgatgtagattcaggaatgttctgaaatgaagaaggaaataaaggaggaaagtaaggctgacctcaggcttctggacaaagtggaagttgggtcatctactgagagagaaggtggactagggtgatggttgatggagtggaaaggattaccactctaggtaatgccaggggctcagagagacaggaacactaggttagccaacccccaacagggcttgcagaagctgcacttccttgtgcttctgtgagaaatgtttgttgatagtggcttagaagatgggcaatgtttgttactcttttaacctttaaggagttatccttcatcaccttattatttttgcttaatatattttctatgaatttttgtttcagtatcaccgtaatttgtacaagtgttccagaataacggtctcataggtttctaagtttatctaaattgtggatgagatgttggtatgaaataatagtacttctggccagacacggtggctcacgtctgtaatcccagcactttgggaggctgaggcgggtggatcacctgaggtcaggagtttgagaccaggctggccaacatggtgaaaccccatccctactaaaaattcaaaaattagtcgggcgtggtggcaggaacctataatcccagcctttggaggctgaggcaggagaatggcttgaaacctgggaggcagaggtggcagtgagccgagatcatgccattgcactccagcctgggtgacaagagcgagactcggtctcaaaacaaaaacaaacaaacaaacaaaaaaaaacaaaaagaaatagtactttctagagaaatgtattgatatatgaatttagcaggaagcgtgagtgaatggagccatgaattgtgctacccagtccccaccagtaaggctgataaaatgttttatgctgttgaaatgaaaaacgtcagaccaactgctgatccactaaaccctacagaatcgatgacaaagatgccagctggtaattagggttcatccaggatccagaagatcctgagtggcctggtgatggggcctgtgtgggaagatgttttctcaaaccagtaaacttgacagggtctgtggacaaggctgagctgatgatgtgggcaacgaagtacgtgacagcagagcctcctgagtttcagtagaaagcaacccagggagaactgaggaagaatccatttctgtcacaagtaatgtttacaaaaaaaaatgrtgacctatgtcctgatattggaattctgtttctgagtctcagctgtgttgctggcacctaatggtggcaagtggcaccctggaaccacttggttccacaaactcagtgaccagaatgtgcttctgggtggaagagattcactttttcaaccttgttttcaagtgggaggaatatattctgtatggcccaagccacagatgagaactgaaggggatctgttgagtttacttgtaccaaggtgactccgatacttacttttcgttttcctttccttgtaggtatggcctcacatgtgcaagttttctcccctcacacccttcaatcaagtgccttctgtagtgtgaagaaactgaaaatagagccgagttccaactgggacatgactgggtacggctcccacagcaaagtgtatagccagagcaagaacatccccctgtcgcagccagccaccacaaccgtcagcacctccttgccggtcccaaacccaagcctaccttacgagcagaccatcgtcttcccaggaagcaccgggcacatcgtggtcacctcagcaagcagcacttctgtcaccgggcaagtcctcggcggaccacacaacctaatgcgtcgaagcactgtgagcctccttgatacctaccaaaaatgtggactcaagcgtaagagcgaggagatcgagaacacaagcagcgtgcagatcatcgaggagcatccacccatgattcagaataatgcaagcggggccactgtcgccactgccaccacgtctactgccacctccaaaaacagcggctccaacagcgagggcgactatcagctggtgcagcatgaggtgctgtgctccatgaccaacacctacgaggtcttagagttcttgggccgagggacgtttgggcaagtggtcaagtgctggaaacggggcaccaatgagatcgtagccatcaagatcctgaagaaccacccatcctatgcccgacaaggtcagattgaagtgagcatcctggcccggttgagcacggagagtgccgatgactataacttcgtccgggcctacgaatgcttccagcacaagaaccacacgtgcttggtcttcgagatgttggagcagaacctctatgactttctgaagcaaaacaagtttagccccttgccyctcaaatacattcgcccagttctccagcaggtagccacagccctgatgaaactcaaaagcctaggtcttatccacgctgacctcaaaccagaaaacatcatgctggtggatccatctagacaaccatacagagtcaaggtcatcgactttggttcagccagccacgtstccaaggctgtgtgctccacctacttgcagtccagatattacaggtaagaccgtccacaaggagacaggagctgctgaatgcccagtggcactcacagagaatgtgccaccttagtcactgtggggagataaaattatatgtctacagttcctgccttcaagtgatcttaatgtacttacgaaattaggacatgtgcacattgcgatgtcaattagaagtcacattagaacggagccaggtaagatccgtggcacaggtgttcagcgttggaagggctccctgggacctggggtgcagagcagaagagttccgtcctccyggatgggtaggatccagacaggtggtggagagagagggatgtgccatccacagtccgcagtcacactagtgggaatttacaggagacaagaaggacacccgcctggccagaacagtttgtgagtggtgggagatgtgagtgaaagcctggttggaaccaggtcactgggggtcttaaatatcagatcaaggaattgcaactgtatcctcaaacccagagcaagccctggaaaccttgaacaacataaggtaacgggttgaaagggatgttccgagaaggttccttgtctatccacgtgcagaagggctggaggaagggagagactagtctggggccagctgggtggctcctgtggtaaggtgacttcaggctttgggtcaggatgagggaggaatgatagtgtccgtggcagggaagtgtgttcagtcatggactcacacatgcagtcattcaacaagctttgatttcacttctaatatgtgccagccgcagtgctaggtatagggatatagacagggcccttgccatcctggggtatctggaagcttttcagggacccctgtatgcagtcaggattggaaccgctgccgacatggagctgagatcggagtgctggctttggagtcaggaaaggccagagtgaacctggtccctcctctcctaatggcctgatttctccatgccttcatttcctaacccatgaagtgggagaaatcctctcaccagcctcgtgggcagctgggaggtaacatggctgtaacatggcttaggtgtgtcactccgtggctggccatggcgggtgcacagcggggaggcggcagggatggaaagcaagaccctgctctgtggaaccagcctgggggtgtgtttggggtggtgccgaacagtgcagtggagatagaggtcacaagaaacaaaactgaaactcccatgagaagatgggacggatgcacatttaagagcgtgccacgtaggcaggaagaccggggtccccggaggccatcctgcttgcaagcaagcacgctcgcttgcccgtgtgctttctccatgcgcctttcaaggccacagagagaaggctggaacatgccccagggccttgtcgacacagctgacctgtcacccattcctggggctgacctgggccagcttccccttcttgctccctgtccgggcccccatcctggctgcaggcagagctgttgcaagtctcctcccagcccctccctcagcctgctgggcaccaggccctccttccctgggagagcaacagcccctccgttcggatccccagatgccctcccaccttccaccccgtctcctttcatcctaatcctgactcacacaggaggtttcgaggcctcttcacccatgctgtttctgtctcttccctcttccctttaggaggcatttcctgagttagaacagctctctgcgagcctcttctctgccctgccctgaggattcctttcccgctcatttcctatgcgcagaaaggtctccacaggcctgtgctttcaccaccaggccccgtgcggacagacgggtctactgctgcccctccacttgctctccactccctcgtcctgaccaggccatccactctgtgccccgctggccccagagccaatggcagggagaagtaagcccagggcaggagcctccaaggaagacaagaagcctctccttgtctccagaggagaaggatgggcaatggttgagtgaatctggagggttgggtgcccggtaccgacagcacatattctctgtagagagtgcctgggcctctgaaagccagctctggtggccgtcccgggtaccagccccattgggggctagctggtgctgtgctggctctgggaggctgctgtgccacttcgtatttaggttggtaaattcagcatgccaaaggctggctctttctagttcttggcctgaattcagggtgaacagcccctgacttggctgctagggcttttatgtagttcatctgaattgctgcatcatgaacacgtaccagtgttattaacattcactgaaagctagcatggcgacttgtaaaaagacttcgacaaactctgtttaaaaggcagcacatccttagagcgaaacttggtgaatcgagtaagctgaattggggattcttaagacccccttgtcatcttgccttctggtgcccatgtgacgcttcctggagccctccctgcccatccccttggactctgcgagtttttctttgctttcctgcctggtgctggtgcccctagtgctgaggagacaggtcgcaaaatcggggatcctagctcaggaagcctgcggcagcagtaaaagtttgcctgtgagggttggggagggctgactccttcacctggactcacagcgatcctctcctgcccccctctgtgggtgagatcaggccttttggacgcctctggtgggtgtggtaggctggtttgctggcggttcctgggccctcaggagccctcttttccccacttcgtgacaggcacagtcacatctggcccctgtgtccccacatccctctgaaggaccctccgtttagttgtgatagtaccctcttttcacccctgaaatcaccattgcctaaaattctgagcaagaaggcctctttctcctttctgtggtcaccttcaggccctcatgtcagcctccctgtgcccagccctggttccaaaaatacggtcagcaggaaagacagcggctcttctgcctgaaatgaggcttcatttctaagttggtgcaatgttctgtttctccctcaggccttgtctgagccctgcagtggtttgccaccatatagatcgatccgatttttcgaggacagtctctagtgctctgtctcttttcgtcccagctgtgtgggacagccagctctaggccatgtttatcaagttgattttcctggtggctttgcctcttataggaaagaaagggggcaagaaaagctctttaattgtccatcgttaaggcccatgtcccagaaagaagacgctttcagatgctttcagctgcatctgcatcgtgagggaatggctgtgtgtttgagccgcctgggctggaggagtcattgcatgctgtgcatccagcctcccagcaggttggcctttgtcctgcaggtggtgggtggggactttctcccctcggccccctgtatctgagctgggcacattatcgtcccaggacatctgactttcaaaaggtagagtacttatgtgtccctctgtcattttgcatgggactgggctaagtgtctcatcccaccattgtccccacctagtgacacagaaacggtgtgagacaaggatatgttatcctcgccttggggacttggaaaaggaggtggtgtccccggagccaactgttttccccagctctcaggcatgtgcctggccacagtggctgttggtattctgtgaggcaagcccactggtgtgtttttcaggaaacaaaggctgctttttaagtttttttctcgagtctgaagcaggggtattcccttccaattcgaaggtcagttatgtcattaactgtcagctgcccaggttctcaggctttactgtgcacaggaatctcctggagaggttgctgggaacagagtctccctgggagtaccctgggagaaagtccacacccaccaccaacagagacttgcctcagagaactggaggtgagccaggcagggggtcttaggaccagtctttgagaaacactattctgaaggacagagggattttcttaatggtgtcacctttcaggtgttgacacccaaaagaacagagttgcaggtaatccttgcttgtattacttcaccttgggcgcccctgcccttttgttatttaattctacattgatgccagttcattttgtttgtttttagtttttttgttttttttttgagcaagcaataaattggtactggggtatttccattatcagcagaaccagtaaactacaaataagaccaaatgttaaactccactctcagaaaaaaacacaaacaaaaagacatgccattcaggcaaagggtaatcagtgattaaaatatatagattttttttggtttctactctggattattcaaaatattcttgtctagagttttttgaaacacgtaggactgttaccaggacccaaaaattgaacataaaaaattaggacatgaaaaatagcaaataatccactttttcagaataatctaaccttttttttttgagacggagtcttgctctgtctcccagactggagtgcagtggtgcgatctcgactcactgcaaactccgcctcccaggttcaccccattcttctgcttcagcctcctgagtagctgggactacaggcgcccatgaccacgcctggctaatttttttgtatttttagtagagatggggtttcactgtattagccaggatgatctcaatctcctgaccttgtgatccgcctgccttggcctcccaaagtgctgggattacaggcgtgagccaccacgcccagccttttttttttgtctgattctttggggtgcaaagactgtcttcaagttgatttcatggtggttttaggtgggggtgtgtattattccattcttgcattgccataaagagctacctatgactgggtaatttattaaaaaaaaaaaggtttaattgactcacagttctgcggggtgtataggaagcatggctgggaggcctcaggaaacttacaatcatggaggaaggtgaaggggaagcaggcacatcttatatggctggagaaggagaaagagagaggtggggtaggtgctacatgcttttaaacaaccaaatctcgtgagaactcacaatcacaagaacagcaagggggaagtgtgcccccatgactcagtcatctttcaccaggcccctcctccaacgttggagatcacaattcaacatgagatttgggtagggacacagatccaaaccatatcagggtggagattaattttcagttcaattcatcaaacattcattactgagtgtcccgtagtagatatgtgctccagagtgcagagggtaaggcatgatccctaatcttgcagagttcacagtctctttgaggagatggaaaacacaaaccaactgccaagactgtcattctgatgcttcaatattttaaatgtttggtcattcaacagagatttattgtgaacctaccttctgccagactctagggaaacaatgatgagcaaagccagttcaagaaattaaaagtcagtgaaagattttgccagatgggttaacagggaagttaacatgagatagggatggggaagtctaggggtcatggagactggaataaataagggaagatgggagaaatgatggtgactccttagacagtgacacctggcgggagtcgaaggcctgtactggaaaataataatccggtgagtgaagcctgacaatagagagttttgaatacaggcttgaggggcttgggttgagccaaagtgccagagctgggagccattgtaaattctggaacaaaggagaagtttaatgaaaattaatgatggtataaatcaattggaatggcaaagaaaaaaaaaagttgtggggatgttttgagagccagaggctaggagacaactgttgttactcaggaatgaagggatgaggccctagattataatggggggttctaccccccgatagtatgaatgtggacattgttagtgcatttaacttttccgatgctttgattgcagaattgacttagagggaatagctttttgtttattttgctttcttttgtttaatgaccttgctgtctctaaggctcagttctgaagctccagtctttcagagcctagtttcaaatcccaccactgctataaagaaataggctctgaaaggagaaaccagagaccttagcaccagtcctagccctgccccaagctgtgttccattgagtcacggtcagtagaatgtcagctgtgactgtccacactcctccatctggatcccattatgacctgggcctgtgtttatgaggcggttggccagaattggtggttcagtctgtggccagggagcagttttctctcctgtgggttgaccttggcctcattagctgaaactgggaaccctccatgatcccctgatcaacagagaacagagcatattctaaaatgccatgctctgggctggaaatatcaatcatttcaaaaaggggcatagctttataaagccataaatataagtcatttcaaaaattgcatagcttgtgcagattacagcatatagaaagtgagtgactagaagttaggtttgattgaaaagagggtctctgaaagcaagtgcatcgcaggcatgaacttttaaaattaatttgtcttttactaatagaaacaacaggagaaggttctagtttgcacttgaagatatgaagtgaactgttcaacccaccgacaacttcatttgcccagggagactgttataaatacgtacatgtatgcgtttcgggttgcagcttctcttttgaagagaagtaatcaataagttatgtaggctgttaggttatcttcaagtttcccttattcatctctgggaccttcagctgtatggtaaaatactttgcaattaaaatttctcttaataagtattattatttaattataagtatgaaataactgaactggaatgctctgtgtatactgccctggtactgcagtcccctcttcacacacacacaggtgcacacacacacatgcacacacacagactcaggcgacacagtttaagcccatgtgtgacatgcaggcacaggtgtgcttatgagaaccatggtgaccaagaagctgacactcagccctccatacagagctactgataatgcacacacgcccaccatgtggtgaaagacacaaggcacacgcagcaagcatgcttggacatgcaagggcacacgcacacacttaaagacatgaaaataccccagtgtccccagagacagagggcccaggtgcagacgcagtgttcacgccctggaaacttggcccagttttctgccttgccacagagctgccaaatacatgtctctaacctgagaacagtagggccagaactactcttgggctcaaggtagagaccagtcattttccaagtgggatctaaggaccctcctgccccatcatcacccagggtacttgccgaaacaaacctaatgagcaggccctctgggggtggggggccaggtgacatgcatttggacaagctctgcagctaattcttaaaaacacacacacagtttattgaggtatgatttacttacagaaagctgtacatacttaatatccatgacttgatgggttcggggctgagtatatacccatgaaaccaccacagcctatgccataggcatatccatcacctccgaaagtttcctcctgccctctttatttattttattattatcctttgagaattgttgcttagatggcatgggctccagagtgtcagcccaccagggtgtagtgtagaccctgtggaggtgagagggtgcggccggcatgacagcctggcattgagctgtccgtctgtctcccaagtggttgagagcccttctgcagggcccgtttgtcagattccttgtggtcagaccctttatgccccaggggtggcaacagaagagatccagaataattggggggtaccataggaggggtcatgtgggttggtgaactggcaagcagtgggtggttaggaggggaacgcctggactgggtgggaatagaaaggtgaacagcagaggagacatgaacgtgccttccttcctgcatgacttacgatggatagcgcactcactgccaaggagctgctgaactctccctgtagccacagctgggtttggagctgtaactctcatgtatgcatccaacaggtaattttttgaattccgaagatgtgccatacactgtgttgtgctgaggtttcaggacgtgagtaggagtgccctcggctctgcagtatctgtccccagtctgcgatggaagaggctgtccccgagtagacagccagcccccactgtcctggcccaccctggtctcccagcttgaacatctctcattaaactgaaaaggcagagtttgtcaccttgaatcattttgccagttcccctggcttttagggccactagcatgttctgagtcctcgatgccgccctgtgagagcaggtcgctgcgtcgcagcagtgcagacagggccacccttctctcgctcaccaatctcccctgcggggtcttacggagggtgattgaagccagcaaacccacggccagtgccggatggagcctcagggctttgcgggtattgggcttgtggcccttgttccgggacagattgagatggtgctgttacagaagcaactgtctcgaatttccccaagagcaagggcttgggtgcagatygcctgtttrggagatgatcacaggcctaagggaatcgggagagtgatgctgagaggagtaagccccatgattctgggctgctgtacactcagggctccgtcccacctctgaggagcctgcccgaggcctccaggagtgtgcctgggaagggccaaaggcggggctctggtcgcaggggttgagggctccccagggtgttaactcccctgtggctttgcttgggcagagcttgtgccaggactgagtgggcttgagcagggtcagaggtggctctgaagcagaaaagcaaagcgatgcaaggtgcacctgactgaggccacagtgtggccgaatcagagaaagtgtgacccacagtgtgctgggacgtcactctttgtccttcccaccaatcacatgtgtggcatttgtaaatggaaagagaataaaaggaaaatgcctttatagacaaatctgagaatgcaagctaagaattcacagttgagctctaaacgtttgcgaggagttggggatctctacctcccgtgtgagcaggcgggagccaggctgggctctgagatagaattccagagcaggggaggggctgaaagctgaaatacaagctccagaaacagtagaagcaggttgagctcagttactctgtcccatgttttctcccttaatgcttattaaatgttgcagacaccatttcctaaggctcatcagtggaatgagtgaatgaccgaatgcctgcatgcattaatgaatgatatgagcggcatcccatgccttgtagctcagctcatctcgtcacccaccggaaaccctcgcatgcccagtttcttgtcatctttcatgcaggaactttcactgctgcctaagtcctgggccacagcatctagcatctctgaaccctgaatcacaggggccgcccgcttccgcctcttggggaacgtacacatctcaccaaaaacacttattcccatctcgtctttccacctgtgtgaagtttatatttaaggcctgcagacagctgattcagcttcgaacagatcagttccctgaaatcagccaacatctgtcttgtcccattataccttcgcagaaaatgagaagcgacttccccagcataaagaaggggccaaatgcagcaagacctggctgagtcaccttgaggatagaaagacagcatcatccccggggcctcgtaacctccaacctgcttttctgtttttgaggctctgtggacatgctgctcacgttccttgtaactttgtcttcgtacgtaagagctgcatgaacaaagccttcctggagagagtaaggccaatcgtcagctgctcaacccgtgcctggcacatagtgagcactcaggaaatgttagctgctcttttttttttttttttttactaatcttttcatccttgttattatttgtattatcattactatcatctggcagacagagctggatttgaattccagatctgctactttacagctgtgtgactccaggcaggttcccaaacctttctgaggcttattgttcttttttcttaaaagagaaaacttcctcacacctgtaatcccagcactttgggaggccgaggcgggcggatcacgaggtcaggagatccagaccatcctggctaacatggtgaaacaccgtctctactaaaaataccaaaaaatcagctgggcgtgttggtgggtgcctgtagtcccagctactcaggaggctgaggcaggagaatggcatgaacccaggaggcggagcttgcagtgagccgagattgcgccactgcactccagcctgggcgacatagcgagactccgtctcaaaaaaaaaaaagggggaaactactagcagttggtagtagttttcccttttaagagaagatgaggttggtagggactgaatgagatagccgcatgcgtgtaactcgccctctgccatgcctggcacacagcagctctgtcacgaataagcaccatgctttccccagcctccccacccagatccatgcttctgtgacagcatgcattttccttggcctggtgtcatcattcatgatttgtaagctgggcatccccagtattcccaatcatttctttttcatcttacaggcgcctggaggcccagcatcgtatatcagactcactaggtcccaaaggaacaagggcctggatgttgggagtgtggttagttggtttcctctggcaccaggaagggacagggcccagcatttggggagagaggagacacctcttcctgagtccagagggaggaggcaggatcnnnnnnnnnnnnnnnnnnnnnnnnnnnnnnnnnnnnnnnnnnnnnnnnnnnnnnnnnnnnnnnnnnnnnnnnnnnnnnnnnnnnnnnnnnnnnnnnnnnnnnnnnnnnnnnnnnnnnnnnnnnnnnnnnnnnnnnnnnnnnnnnnnnnnnnnnnnnnnnnnnnnnnnnnnnnnnnnnnnnnnnnnnnnnnnnnnnnnnnnnnnnnnnnnnnnnnnnnnnnnnnnnnnnnnnnnnnnnnnnnnnnnnnnnnnnnnnnnnnnnnnnnnnnnnnnnnnnnnnnnnnnnnnnnnnnnnnnnnnnnnnnnnnnnnnnnnnnnnnnnnnnnnnnnnnnnnnnnnnnnnnnnnnnnnnnnnnnnnnnnnnnnnnnnnnnnnnnnnnnnnnnnnnnnnnnnnnnnnnnnnnnnnnnnnnnnnnnnnnnnnnnnnnnnnnnnnnnnnnnnnnnnnnnnnnnnnnnnnnnnnnnnnnnnnnnnnnnnnnnnnnnnnnnnnnnnnnnnnnnnnnnnnnnnnnnnnnnnnnnnnnnnnnnnnnnnnnnnnnnnnnnnnnnnnnnnnnnnnnnnnnnnnnnnnnnnnnnnnnnnnnnnnnnnnnnnnnnnnnnnnnnnnnnnnnnnnnnnnnnnnnnnnnnnnnnnnnnnnnnnnnnnnnnnnnnnnnnnnnnnnnnnnnnnnnnnnnnnnnnnnnnnnnnnnnnnnnnnnnnnnnnnnnnnnnnnnnnnnnnnnnnnnnnnnnnnnnnnnnnnnnnnnnnnnnnnnnnnnnnnnnnnnnnnnnnnnnnnnnnnnnnnnnnnnnnnnnnnnnnnnnnnnnnnnnnnnnnnnnnnnnnnnnnnnnnnnnnnnnnnnnnnnnnnnnnnnnnnnnnnnnnnnnnngacaaactgttggtgccacttctttgtcatcctctgacctcctgaaggatttctcgtcctcctctttttgtaaattagaacttacattggcaaataaaatgcactaagtacgaacccccagaatataaatagatctggcaccaagagagccagatgatgtccgcacttgtgaaagtcaaacattcaccctgagcagcagcgggaggttttaggatgatgtggctgttctgtattctcagtgtggtggtggtcacacaaatctatacatgggctaaaattcatagaactttccgtttttaaaatattttcaaaatgattttaaatctatttacccctaatgacctctagggaaattgttgataatattaaacccataagccgtaccatgcctaatttttcttcctgtttttgttttgttgtgctgtgtttgggtaaaaaagatatgtttgttcatcctgtcacaggatggccaggagggtaaccagtcatttctggaaacggccggacaggggaacctacgaaaacaactctggggcgtaaacagctgctgatggaggaagcattgatagcatgcagtttctttagtttatgtgctgttttgtgtatgtggctcatcaacttgtcctccaaaagttaaggactgaccactagaaacagagaagtgacaaactattatggctgaaatagcaggactttgcaagtccagagagaagatgaaggctgagtggggttgttgatccagcctccgtgtgcccaggggtcctctgtgtgcccaggagtcctccccttgcttctgacatgattatttacgcccatggcctgcatgcccatgcatgagacatcatggttttccctgtaatcgttatctcaaaaccagctttcccctgtggcaaccctccctcctgagggcattttcaagcttactacagagaagcagctggctttgcaggaaaggtctccccccagcccccagggagagaacttcctttgtcctggatgtaatggggtacgtatcctcattctaagtgctgggcctcggcgagggtccctgtgcctggagtggtcccagcagctcgacccgggatatgcacccccgtgactgggctgtggcccaaggccacatgctgggctcagagccaggatgcttccctgtctccacaggggcatttgcttatttttttggaggaaataagagggtcgacagcctgtaaatgtccttccacagtgtcctctgcagctcagagcagccagtgtaagatgtgggttttcagggccactcctggcagcaagaggccccaatatttgcagaactgagcttacgatcaggctgcccagcctctcccgccgctgtctcgtgccccggcctgcgctgctggagtctggagcagcactgggagggactgcccttccttgctctcaaaagacacctcctaaagcgtgttcttctttctctgctcctcgtgtgctccctgcttggctcccacgtccagatccctaacctgggattagaagctctgggattcgaagtcctactgggtagccccagcctgcccctctgccactctctcccgatgtggcctctgcagcagcctgacctgctcaccgtccgttccagtctgcacggtgcctttggcataaggtgccttccctgccttcccccgcctccaggcctccaaacccagttctgccccattccccttgtgaaactcaagtgctacctttgccataaccaaaagagatttatccctcctctaaataatttgcgtttagtataatccatcttcttattcatttatccatttgatccccaaagaaatgatatatttcttaggccctgggtctggctcttaaacccggggagagaaccaaggctgattgtatccactggttgtacggtgaacacgaatggcctgccacccttggcttagactagggtaatgagacagagagacgtaggtctcagcgtcccgccagctatgtgagttgggctaagtctcaccacctctccgacatgactttgccacagctcactggatgagagccgacgttctaggtgagggctttgggaacaggaaaggtcttggtaagttttaagcctcatgtctagcctcacagcctcttcacgtcctgcagttagccgagactataaatacattactatttctcaccgtggcctctctgtccctggcttttccctgttcttctcctcccgctatctgtttgtgtttctaaggttctcagactaatccaggtggacacgttggaagtagatagggaatctccagacaccacccgacttagacactgggcacaaagaggagaaattccagcctctgggagtgatgccggttcactgctttaccttcctccatcggggctgcccttgcannnnnnnnnnnnnnnnnnnnnnnnnnnnnnnnnnnnnnnnnnnnnnnnnnnnnnnnnnnnnnnnnnnnnnnnnnnnnnnnnnnnnnnnnnnnnnnnnnnnnnnnnnnnnnnnnnnnnnnnnnnnnnnnnnnnnnnnnnnnnnnnnnnnnnnnnnnnnnnnnnnnnnnnnnnnnnnnnnnnnnnnnnnnnnnnnnnnnnnnnnnnnnnnnnnnnnnnnnnnnnnnnnnnnnnnnnnnnnnnnnnnnnnnnnnnnnnnnnnnnnnnnnnnnnnnnnnnnnnnnnnnnnnnnnnnnnnnnnnnnnnnnnnnnnnnnnnnnnnnnnnnnnnnnnnnnnnnnnnnnnnnnnnnnnnnnnnnnnnnnnnnnntcttctgggcacaccccgtttgagtgagatcataggaacaggaaggcctcagaaaaatgagccgcagtgctgcctgcgagactcagtcccacatggaccaagaggggaattctgctgagaaagcctcacgagagaaatgaactgaggagaggaaatatcatttatagattgaccagagtgggagggttaactgtaaacgtgcagatttcagaaaatacagcgtggatgtacacaaaggaaatacccatttaagaagttgggtgcatggctctctatttgaactaaacataagagtttgtattgaagcaggtcgttgctgatgatggtgactcacgttttctgagtatttgcaggaaagggctttttgtgaccgtcatcatagctctgaggtagctcttgcagccttattgtccccatcacgtagggcactgtgtggtcagtgcgtggcctcaggtcacccacatgttggtgaccactacaacggtacagcctctgtgtcccactctgtccagatgattccttgcagaaagcaggcgtgttgagggtccccaggctgtggtgtgcacagcaggaaacccccagctcctctagaaaggcctggcctcaggcacccttgaaaacacgtctgatttcagcagtctcacgtcagccctcccctccccccacctcgcacaggcaagtgtcctgccctctagagagcgccactgaggatttgttttcctgtcccattgggaacctcatgcttggttagcacagacgtcgtatatctgcatcactgctccattctgtccgaggcaatgatgatgctgacaccactgcacagagcagcactgcccctgctccagaattaatgattcagtgccccagacaaaggtggcatagtgtgcagccacaggaagcatgcatgttttccagggtgtgcctcccgggagggcacatctgtgcattcactccgcacacccctggcgtgcgcagattgtgacccagtgctgtgagggattcagacctggggcagcctggaattgaccctgagaatgtcaatgggagggatgcaggtgacagccatgccagctggacagcagtcatctcctaagatcaccaaaggtgaagggtgaggggttctgccatgggaaaggccaccttgtgcctggtgcagagggacctatgccagctccaccctccccagctgcaggcccagccttgcctcctgatagcagggtgtacctgaggggcttacactctcctgctccttagtgagacttctcctggacaaaacgtaacttcttgctgggttggaggctgtggatggcaggtacatgtggcctaagcatggtcctcttccccaggtgataaagaggaggcggggagggagcctatacatattcacattatcctcctttccatctagcaagcgagactcaccacacttaaatactttccatttcgcctgcacagcgtgaggattgctgagtttgttttgccatagaaattgaatgtttctaatgaaacatgacaacatcgcctttcctagcaagtaggaagggagatctttttcaggagatgtactccctgcggccctggggaaatgagatactgccccaggctggtgggagagatggcgggtgccactctccagtatctctgtctcacggttcttgctgcccaagctactgtgcgtcggcagccggctgggccgccctcagtcaagcaggttgttcggatcgtggcagctgtggtgctgtgtgctctgcgtgggtcgtcgtttttattatttattatacccgtccttcaaggtcctactcaggtttcatttctctattcatctttctttgggcactctgctcttctctgctgtaacttcttgctgcatgtaaaatctgtggtataatatatgcctccttgcatttgatggaacttttgaggtttggaacttttgttctatagctgtgtcctgggtgttagtcctggtcaaggagctagactggaacctttctgggtgtctgtgctggtgattaacatattccctgtacttgatggtggcggggtgggtggtaaggattagagatttcacagggcctgttgaaggaaagctgttatataaatcgcccaatcctttcatgagctacaaaggtcagtgttaatgaaaatcatttcaggatttttgtttcataaattatgtttaaaataactttttcaggaacgctcttacatcgctggtacgaatgtaaaatggcacagccactgtagaaaacagtttggcagttcgtcaaaaacgtaagcatagaattgccatatgattgctgcaattccattcctaggtatacacccaaaagaagtgcaaacaaggactcgaacaaatacttgtacatgcatgttcatagcaacactgtttacaacagccaaatggtggaagcagcccaaatgtccatcagtggatgaacgtatatgcaaatggtggtatagacatacaatggaatattatttcgccacgaaaaggaaaaatgtactgataaatgctacaacatgaacatacacccaaaacatcatgctaagtgaaagaaggcatacacgtatcgtatgatactctttatatgaaatacccagcatagaaaaatccattaagatggctaggtgcagtagctcatgcctgtaactccagcgctttgggaggccaagatggacagatcacttgaggccaggagttcaagaccagcctggccaacataacgaaaccttgtctctacttaaaaatacaaaaaactagccaggcgtggtggcgtgcacctgtaatcctcaggaggctgaggcatgagaatcacttgagcctaggaggcggaggctgcagtgagccaagatcgtgccaatgcactccagtctgggcgacagagcgagactccgtctcaaaaaaaaaaaaaaaaataaaaaattccattaagacagaatgcatattggtggctgggaggaggggataataggataaattcttaatagataagggattttacttccaaatgatgaaaatattttggaactagatagacgtgatggtttgtacaacgttatgagtgatgaatgtactaaatgccactgagttgttcactttaaaaagactaattttacgcatgtgattcacctcaataaattattttttaaacagaaaagggaaaaaaattaattttctgtttaattattttttaaacagaaaaaaaaaaacctttaggctaagtaggaatgggatgagatttttaccaggaactgagattcaggccctttttggtttatttgtaygtgggacctagcattgttagagatgccaggtagaatgagagtatctttgagagctgtgtttgtgtcgtcgccataggagctgattttataaatcctgacaaaagcagatttgcgaagatgatttatacttttccggctgtaggctgaaacagtaaggtaaatattttgttttctccttcactcggagagaaaaggagcagctttactgcagctctctctgaggcccctgggcacctgtgtgtaagcagagctcggcgttgccctgatggaagtggtggtgttatctgaagaacaggtgtagtgtgcacagcgaggcaggaggtaaagccaggccagctgcctctgggtgctctctctgtcttacaagaaggactgatccctggcagggggtcggggaggaggcgaaagggggagtattttgtctatgatatttcaataattctaaagtctgtggtatagttggctttagagatggtaagcctaaataaaattccatttctgcaactgactaccctcgtgtgtccttggcaagttacttaactttctgcatcccggcttcctgacccctaaactggggatcataatgctgtcttatagaagttttaaggattagatgaaatccacacatgcagtgcctggcctgtggggatgcacagaaacattcatctctctgaggaagcaatgctctgaaacgtgtcacctctgagtgttgacgccaggaagatgtgagtgttcctttcagcctgtgtgactcttccccctttactcttttcaccccgccccctttacttttatgtccatttctttgtgctgccatttagaggaagtgaaaagtatctgggtttggttttgttttatcatcaactatcttccctaatcagaaaagactgcatttttctttttctaccttttttttttttgaggcagggtctcattcagtcaccctggctaaagtatagtggtgcactcgcagctcactgcaacctcaaactcctgaccttaagccatccccctccctcagcctccccagtagctggggctacaggtgtgtgtcactgtgcctttctagtttttaaaattttttgtagggattggtggcggggggtctcactatgatgcccagacttgtctcaaactcctggcctcaagtgatcctcctgtctccacctcccaaagcgctgggattatagatgtgagccaccctgcccagccaagactgctttttttctcttcccattcctggtttgccacatggataattatatttcattgtcacaggcctttatataagaaagaaatctgcatcttaccactgtgtatttacgtagttgcatcccccaccctactatcaacaaaatcactgaccttcaacaaacatcacgttatcaatggctttctgggtacattctctttgccttggtttccttctgttcatctgcagcacactttttctccctctggccagttctccgaagtcttaaacattgattagaatgtctgttcttcctcaaatcctgatttgttaatacttttgttccccccttaattcaggaaacatttattggacacctattaggagcaagacagtgtgctatgatgaatcagaactaggcccttcccccaaggagagtccagtgcagaaaattagacagaaatcactctgatcacagttaagctgtgggacaggatttcactgaactgtggttttgtagccatttcatccctgagtcatgcttcttccatagttttcggtaatttgtccaaaacatctttggcagattatattttggaactattgtaaatcctcctttcctaaattttcatcttgagtgtgtgttctttctactcttggaagtttatatgggttttaatgaactgtttgtcctgtaaaccattctgtagagcagttctgatttgttctgattctttgctttcccctggcctcttgaataactttttaatgtcctcaagcttaaatatatctacttctattctcaagtacagaggtttccttcccatgtagcattgatgtcaggcaatcaggttggcgttctcagccccatttcccatttcatggtggccccaagagatggagtggcgagcccccaaggctgtctaactagcgggtggtgaaaggcagccccgggccacacagtagtcgtgcagttccggtgaggcctaaccctccgttctgagccgcccactgtgatggtcactttgatgacgaggaccacggctccctgggaatcggccygcaagcagcctgctcctctaatgatggaacacttatggctgctggcagtgggagacagtatgaatattaataaactatatttcacttttaktactttttcatggagatggtgtttgtgagtgaagtccgtgcactgagctacagacaggcgttttgttttcttgacaaaatggcgaacctcgcagccagaggcaagagcacgtttaggagcagctagctaggaaaaatgccagtaaacattagcaggccatataatagggggcgagcctgtggatttctgtgttttaacagttttctgaggcagataaatatcacaggttcagcagttttgcaggatattccttgtttgactgttccttttctgttgtaatgtctgcatgcaactgttaggccattgccttgccccataaatggttgccagtcacctgtcctggggttaacaggcagagccttgtcctcctgcccattcactctgcaccttccagccctcatcctccaccttctctgttcaactgacatctttccactaaaccaaagcagacactacctcccccatttatcatagctgagtgccccatctctgtttttatgtgaccatggaccatgcgcacaggaatgatcaggccaccagggaatggtgggcttgtctcaatcagtgaaccttggcaggtggcgagaacgctttgagacccaggcagaccacaacagactccccacgtggttccagagaccagaggtggatctgggctggggcaggaatgacccctcagcatgacagtgccccgtgcctttggtcctgccttgggaggagacacctgtcggagctctgagccgtgtgttgctgggatacgtcatgatcatcgatctgaggtatctttgtgttggtaatgggtatctatcactgggctaggtgacagaaccttgctctgttgatacatatctggtgtcttgtggagcgtgtaaggacacacgtgtctctggcagagtggagcatggcagactgtgagagttacaggaggatggattaaagttcatccgtttatttcatgagtcagaaagagcagatgaatttttgctaattcgaagtgcatctattacagccaggtcaaaagagaaatctgagaaaccttctgtactgagtaatgcagacccttcagacttaacctttcttgatgatttattgaataggaaaaaaagtatatttctgcttttgcagttccaagtttcttctcggtttagaatcartcacttcaaggaaagactgcactctttatgcatgtggaagtggcttgtttttagagttggattatcactcctttcatgtgttcagtttgcagcaagcatttattgagtgcctgctgcctgcgggatactgcattttagtatctgataagtgcacatgtttttagaaatgtttacctgagtcacacattattggagaataaagatatcatgtgtgtatacatttcccaagtgactaaaacttacccatttcaacaccatacttaaaatgtttttttttttttctggacaaaaatttaacaggaagacatcatagcatcccataccttctgatatagagtagaggacgaaggggaatgaatggcactggcattttaataagcatctgctaaaggccagaggcctacatttaatctttgggacaactccccatttagtggatgagaaaattgagtctgaggaaaccaactgccaagtggcacaaggctagaagtagtgctgctgggatttgaaccaggtgtgtctgacccccagacacacgtttcttctaccaagtgctgctctctctccaactgaaccccttcctaatccctcagggttattataaatgtgatgaaatgtgttcaaacacagacatgcacttaggtgctctacttagagtttaattctctttgctccagttaaaaggctccttgtatctgtgttcattgagttaaaattctaactctagctgccatttattaagtgcctgttatatgcaaggaattttacatgcattttctctgttcttcacaaggcattttttccattctgtagatgaggaaacaagctcaaggaggttaagtaacttgccccaaatcctataatcactaagtgatagagcctttggagtctttctgcctccaaaagctttgcatcttctcacagtggttggtctctgttcctcttggggttaggaactgttgtcattatgccagccccttcctgcagtggctctctcctgttctaatgtcgtgttcccatctcttcatgacagcagaatcaagtcaccaaacctgttggaggtaatggaaaaaatattggcataggaaccaaacgacctggcttctagccccaagctgggcatgtggccttaagcaagcccttggctcctgaaatttagagccgtacttcttccctgcctaggatgggcatttatcacgaatgtgtgagaatctgcatatgctccacccacataatgggtactgacgaaattatgtttgggacgtaagcacataactgtttttttttctgatgcatatagatgctattgtgattaataaattggaaaatgtgacttgcctactgtgactttttggtattttgtattttctcaattgggagatagtaacaatgcaattactatcatgtgggatctaaccattcccccaccccaaattctacagatgacaatagaaacctacttcatgtcagggagccacggtcacccctctctgtacacaggaaaagaacctgtcctgctcccttagtaggattgctgtgaaagtctaggatgtgggaacatagtgcagggtatacagagctagctctatacctttgaccttggcattaagcaggctctcggggagggcctgacaccctctctgtagccagtgtgcatgagcttaatgcacagattttacatctatttttggtgctcaaaggcctttttgagttcacttccaggttctgggttatgttctaggtagttgttggtgccaaatgaaaatgagcttcaaatgttattaaatgtatgtatttctttaaaaaagaaaatactgtttcagatacttcagaattagaaactgcaccaggttggtcatttctttgagcactggcctatttaaaatttttagaaaaccaaaaagctgtccctctactgtctactgatatgcctgtaatgttatatcaaaaacctgttaccttaagttttattttttaatatatgaatgcgtagaaatcatctttttataaatatcctggttttggtggatttaataccttccctgaaaggagaaataagtataccacgtatatttctattccccaaaaactctggatttttttcataggccacggtttttaatgtattatttatttttgaggtattaatacaattttgtacttgacagagcaccatgatgtatacagtttcatttaatcatcagagcagctccgtttcatccccacttgcacaggtggaaactgagaatctgccctgtccctggacgcagagccaggaaggagtcaagccagctggtccccagccagctctctccacaccaggctcacctccttatcccagctggttttgctgctgtggggcagctcactgtgccagacttttcccacatggtttatgagggctcatgaggtgaagggtcaggctttcattttggtccagtgtttcacatagaaattgtgctccatgcagcagtgccaggtcagagtgtaagtgattccaagccacatattactcttgggtaggcagggagcagggttgcaaaagagcaagacttaatgacattggctatctgctattattgtcttattacatgaaaagagggcctaagtttgttgtcactctctccgcagatatgaacactgaactttcttagtcataatggggacgggctcgtcagagtgctaaattaccagcaactgcagtgttatttgatgttcggttttatcagcaagggtgccagatgtttgcacaatcgaaactatggaactatagagacatataaaccagctctgcagctagccacatatagagccaataccacactgtgatagtaagggtaggggggcgttttccttttgtccaaagaaaagaggtttcccacagaatctcaacactgtgtccctgaaagtgatcttggcaattatctaatctcacctccttcattacagattcctgttttttatgtcaaatacattggaggcttaaggctctcggccagatgctaaaggtgagcatttgcaggcttcccaggccgagattgtccaggatcaaacacccggttcgtaggatgtctgagtccctttagtgttgctatcaaggaatacctgagactgggtaatttataaagaaaagaagtttatttcgctcatgattctgatgtctgcaaaagttcaagattggtcatctgcatctggtaagggccacaggctgcccccactcatggctgaaggtgaaggggagctggcgtgtgcggattacatggcactggaggaagcaaggcgggggcaggggagtgccaggctctttaaatttgtatttattttattttatttttaaaatttatttctattttttgtagagacagtgtctcactatgttgcccaggctggtctcgaactcctgggcacaaacgatcctcccaccttggccccccaccccaaagtgctggggctggctcttttttacaactagctctcgtgggaacaaatagagcaagaactcatttattactgcgaggacaacactaagccgttcatgagggatctgtccccatgacccaaatacctcccattagttcccacctccaacactggagatcacatttcaacataagattggagggggacaaacatcaaaactgtagcatagggaagccagcatctgtccacagcctgctgtatgtccctactcttcttggccctctgccctcccctgactctgtgtgcactgctcataccactaaatagggaccgatgctctagcaaatggcccttgtgttgatgcattcaccacccctttacactgacgtagttgggcaagcaagtgttcaggaatgggtctgagggctttctgggtgcagctcatttcccaagcgctttcccctggcatccctttaaacctgctgtgtcagctgtccctccccgcactcccccacccccgcccccaccgcttctcatggacctgcatagattgggccccaccttgaggctcccccagccccctgtgcacaccgaggtgcccggcaccctgcgtgagctctcactgtggatggtgagcaaggacatccacccagcgtctttccccctcacaggctgcctgaggcctttgtccctgtcctgtcagggaagctctgccgctctcctgttgattgactcaccacctgactccttcccagtcctctttttctcattttggagttagaagtctccagaccccagttagtcctggctcctcttcaagcaaagcgcaagccatagcttgggatttctgagccacacgattacatgtagggccagatatgacccttggaccaatgggaagctgtgtgtggcagagatgggcaggtttgtaataggaaagttccaggctgggctcatcaggtgagaaacatttctgcacacctcccccatagcagacccagtattcttcaccatcaacagacataaggtaactgagacaggaagatgttacctgtgaggaacttgcaatttagctaatacatataaatgatgttgtgtgaaagtaattctgggctgtttcacaagaaatatttattttcattccaaattggatagcaagccaattctttcttataagacagcatataacatacataacttcaaaatgacacacttggactgcctaaatcttaatcctgagaacttcaaggttccatttggtatgtgggcttcattgtgatgattgaattaggcagccctgttaacgccaacaaaatgtgaccgcttttctctgattgcatttcctgacttctaagttttcccgatagcagttttccctaccagcagttcatttccccagctcttggggagcactctgtggggtccgtggctgcatttacaccccagccaaacgtggcactcatcgggcgtctccaggctgcacgaagattcaactttagctttggctcttggtccaccacttggcagttgggaaagttttcattttgagagtttctcttcatttgccttgttaatattcaggtttgacttgtagtggtaccataaggtataaactcttagtaagactggaaataaaattgtggtattttactgtacataagcccctgaatgtacccagaagtcttatacaagttgttggtcactttgacttttttttcatcatgttctatactggtggcattaaattcacatgcaggcagaatccgtcttataatgaacattagtatttttaagttttgctgtctggattttggtgaggtgggaggtgggaagagggaaagtgattttacatgggaactcatctctggtgttaaaaatagtcaattgaggcatatgattgataacaaatattatcctgtgccacattattcaggggaggacttgatgctaagattgtaggctgcagatgaaaataagtagcctaccagccctcttaaacatctccctttaactgggatcatacccccaaccatagcccttggaagagaaccggcagcagccatcagctcctgccttttggcccttgacattggcccagactctagagttgagggagtgagaagcccgttcttccagaccttcctgtgtcttccagtctctagctgtcttcaactgcttctgatattcagaggtcaagttatcatttacttgacaatcactcccagttagggggagcggtaaggagaggagtttgaaaaggaaaaagtggaaaagtggaggagactgccagaccaagagaatgagaggagggagtgcctcttgatctcgatgaatgagtcatcagctccagattcacgtggtcgcgaaagaggaggagctcacacaggcctggtctggccaggcttcagagggcaagaagagggatggggtgtgtgtgtgcccagtggattgtccctgcaggcccaatgggctgcgtgtgtgtgtgtgttggcccagtggattgtccctgcaggcccaatgggctgcctgtgtgagttggggtgacaagaatccatgctgcttgagaacaagggtgagcttatccctggatgtgctcaagcacagctttgcagatcttggctaaggaagatcctagaatctggttcttcccaaggatctttgccttctctctgggaaatttcatctcctctcatctctggatccttctcccaatcacccatacatccaccagcccccaaactgccccagaatattattaagcacaaatctaagctgtttcagccagaattgtgtttagcctgggacaggaagagctggttcctctgccctgtactgcctgaggtgtgcaagtttaggaatccaggagactagtattttctcccaggttcttggcataccaatcctagtgaggggtgcctgctgagggactttagacatgggataggatgagatgggatgggatagactgagacaagaattgggggcagcttatcacccataccctgtgttaaaattaaaaccaaaattcttaagcaacattaaatatcctgtatttactatgttagtctgttttcttcaccaatgtattctatatcccaaccacctaataatgcctggcatattataaatacctcagagatattgcaggcttggtttcagaccacctcaataaagtgaatattgcaatacagtgaatcacatgcattattgtggttcttagtgcatataaaaaactgtagtgtagtctttgtgtgcaatcatttgtacttacctcatttgtatgctatatcatgtctaaaaaattgcacatacttaattttaaaatactagagytaattttaaaatgctagagctaggcttgcacctttaatcccagctacttgggaggctgaagcagaagaattgcttgtagtgatgagttgagaccagtctggccaacatagcaagacatcatttttaaataaataaatgaatgaatgaatgaataaaatacttcrttgctaaaaatgctagtgatcttctgggccttcagtgagtcataatctttttgctggttggagggtcttacctcgatgtcaatcgttgctgactgatcaggatggtggatgctaaaggttggggtggctgtggcaattttgtcaaaatgacagcagtgaagtttgctgcatcacttgactcttcccttcacgaaagagttctctgtagcatgtgatgctgtttgataacatttgagccacagtagaactttcaaatttggagtcagtcctttcagaccctgccactgctttatgaacgaggcttatggaatattgtattagtctgttctcacgctgctatgaagaaatacccgagactgggtaatttaaaaaggaaagaggtttaattgactcacagtttcacagggctggggagcccttagaaaacttacaatcatggcagaaggtgaagcaaacacatccttcttcacatggcagcagcaaggagaagtacagagcaaagtgggaggaaagccccttataaaaccatcagatctcatgagaactcactgtcatgagaacagcatgaatgcaactgcccccatgattcaattacctcccaccaggtccctctcacaacacttggggatgatgggaactacaattcaagatgagatttgggtggggacacagccaaaccatatcaaatattctaaatcctttgttatcatttcaacaatattcacagcatcttcaccagaaatagattccatctcaagaaactactttttttgctcgttcataagaagcaactcctcatccatttaagtttgatcatgrgagtgcagcaattcagtcacatcttcagctccacttctctttctggttctcttcctatttctacctcatttacagtgacttacaccactgaagtcttgaacccttcaaagtcatccatgtaggttggaatcaacctcttccaaactcctattaatgttgacatgttgacgtctttccatgaatcatgactgttcttaatggcatttagaatggggaatgctttccagaagactttcaatttactttggccagatccatcagaggactcactgtctatggcagctataggcttacaagatgtgtttcttaaataataagacatgaaagacaaaattaccccttgatctatgggctgcagaatggatgttgtgttagcaggcatgaaatcacattaatcttgtacatctccatcagagatcctgggtgactaggtacattgtcaatgagcagtcatatcttgaaagaaatstttttgttctgagaagtaggtytcaacaatgggcttaaaatattcagtaaaccaggctttaaacagatgtcctgtcatctaggctttgcagttccatttataaagcacaggcaaagtagatttagcacaattcttaaggaccttaggattttcagaatggtaaatgagcactggcttcgacttaaagtcaccagctgcatcagcccttaacaagagagcaagcctgtcctttgaatctttgaagccaggcattgacttctcccctctagctacgaaagtcctagatggcatcttcttccaatagacggctgtttcatctacattgaaaacctgttggccaggtgtggtggctcatacctgtaatcccagcactttgggaagctgaggaaggaggattgcttgagcccaggagtttgagaccagcctgggcaacatggcgaaaccttgtctgtacaaaaaattagctggctgtggtgttgcatgcctgtaatcccagctacttgagaggctgaggtgggaggatcacctgagcccaggaggttgaggctgttgtgagctgagatcgtgccactgccctccagcctgagcgacagagtgagaccctgtctcaaacaaaaaagaaaatctgttgtttcatgtagccaccttcatcaatgatcttagccagatcttctggataacttgctgcagcttctgtatgggcacttgctgcttccctttgcatttttatgttatggagatggcttatttccttaaaccttatgaaccaacctctgatagctgcaaactttttttctacaatttcctcacctctcttagcttccacagaattgaagagttagggatttgttctggattaggctttggctgaagggagtgttgtggctggttggatcttctatccagaccactaaaaaaccttctccatatcagcagtaaggccattttactttcttatcattcctgtgttcactggagtagcacttttaatttctttcaagaatgttttctttgcattcacaacttggctgtttggcacaagagacctagcattcagcctgtctcagctttttttatgttattaagacagtctctctctgttgtccaggctggagtgcattggtgcaatcataggctactgcaacctcaaactcctggattcaagtggttctcctgcatccagagtacctaggactataggtacacatcactatgtccagctaattttttaaaatattttgtttgtagagatagggtctcactgtgtcatccaggctggtctcaaactcctggcctcaagcagtcctcccgccttagcctcccaaagtgctgggattacaggcatgagccaccacaaccagccctgtgtcagcttttgacataccttcctcactaagctcaatcattactagcttttgatttaaaatgagagacatgcaactctttctttcgcttgaacacttagaagtcattgtaggattattaattggcctaatttccatattattgtgtctcagagaagagagaggcccgagaagaaggagagagatgggggaacagctcatagatggaatacacaccacatgtttgattaagtttgccatcttatatgggtgcaattcatggcacacaagtaccattacaatagtaacatcaaagatcattaatcacaggtcaccataacagatatcacaatgatgaaaaagtttgaaatattgtgagaattaccaaaatgtggcacagagacatgaagtgagcacatgcttttggaaaaatggtactgatagaccggctcgatgcacggttgccacaaaccttcaatttgtgtaaaaaaaaaaaawccatggtatctgcaaagctcagtcaagctaggggcaatataatgaggtatgtctctctatatatatgcccctccccaaattccaagcccattcagtatttaaaactattttctaaagtatttgtagcccttcaaaaccacaggagagtgagtaagacctaactgttggtgtaatacagaataatgaatctatctattttactctggaaaggacatagccaaccctcatgaagctgtatgacatgccattgcctgccaatggtatgaatgccattgccagggtatgacagtggcagccaacctccaggaaggcccctaatgaccctcacctcctggtattcaccaggattggtctgtgtgacccagagaatctggcagaaatgacggtgtttcacttccaagattagattctgagaggttctgcagcttctgtcttggtatgcgtgtgtctctctctctggtatttctcgctttggctcccgtgttgtgagcagtcctgtggaggcccccgtagggaggagctgaggctcacagaccgcagctgccttggggagcttggaaacatcttgatcgcagcctcatgagggaccctgcaccagacccggctaggccgctgctgaagcactggcctagagcaaccatgaagtaatggttattttaaggcactaagttttgcggtaccttgttacacattaacaggcagctaatgcagtctctgttcgcatttttatcctcgtgtgtggcacgcgtgttatatagttaagcatgaagcaggtcacgtccaggctccgaggtgagagccaggcccttccaggtaatgctaaatattgtacaaacagcaaggttttgttcatcaacccaggagtgaccttactgagtggcgtgttggtggtaaaaatgccttatatttaagagagaacacacattctcctttctctcccaccagaaagtctggttcttgctgctctgtcatttcccagaaaggaccagcctctcttgctccaccccacttcctgtctgtggccctgtgatgccagggggccctccactgtcctacagaggaggggacaaggggcaagaggggccagaagcatctctggaatgcacacagctcatgagcagctaggcttgctccagcagtcacatgtcctgactggagtcttccagcgccttctgtcccctctgttagaagaaaggggaacgcgggtccttaacacagtgcttttgggagattgccattgactcagagtctgagatttaccattaggcgcatttgaaacaataaacatgcatggagcacttactgtgtggcaggacatggtgcagggtgctgtggggaggagatgagtaaaacagtgttcctgctcttgaggagcagtcaagcacagtcattacggccccacccaccacagggacccagaggagggcacaggcacgcagcgggagggatgagggaaagcttcccgtaagaggtggtgtccacactgcacctgaagaaggtggaactgacatctctgtcctaggtgcctcaacagagcccttcattccaacccctcattgcacatgtatagttacaggtctggctacccctgctcatggatgagtttcttgaggctagagatgggttttacccagtgttcctggtgccaagcccaggtcttgactcactatgggctctcagtggatgtttgatgagtgagtgagtgagggcatgtggtggatgatgaggctggagaggtaacaggactgaatcataaggaccttgcctgtcgtgaatattgaacagcttggcaatagagggggttttccttctgaggagtggaagcaacgtggtctatggtatgtgccaagtgagggcagaagctggggcagtagccacattggcatctcaccatgagtcctctacatggcccagggtctgtaccagcatgacataagccgtgcacgagtaacaggagtgtcagccagatccgagggctccactgtgatgcctgccctggaaaagatagagcccactcaggccaggccatggtggtttgagcacctccagcaccaggggagatgctgtcctagaaccagggcccccagtcagtggacaaagaaatgtaggaagattccagctcagagaacatcagaccttctgctccctggagcagtggtggctgcatggacccagggcttggtgcatggaaagtccaggctccgcacgctgtgactctccttaaagtgagaatatttttcccaggagtgcaagggcctttcatgtgaggagttttaaatgtgctctctggtggtagccacagcatccttaattttcttgtacagcaaaagtcaatttggaattgcaggaaaggaggctttgttctcaggtgatgttgagcagcctcttttgtggtcacctcttgacacccacactgagcgggaggaggcgaggggagtgcagcactggcgctgattatagaaaacagcaggggttccggaagaagcctttggctttggaattgggtttgtgcttccatttaaatgtggaggtgccaggtgttctgataatttcactgcaaaattttgaaatccgctaataaagaccatttagaaggacctgagaagtgggctgtgtcctccctcctctcccacccacctctctcctgccaccagctctgacctgggatggacggcagcatgcttctgttatcaaaacaggccaaaaagaatgaaaagctaaaagcagggaaaacttcacaagtttagataaagttttcaagtgattaagtgctgtggcagtgaaaacattgacccaattgcaacttgtaggctccatcagagagctgtggttgacgggctctcctgtacatttatatcaggagagatgtgttaccggctccctcagagtgtaaagtgtacccaaaatagagcttgaagagtggctttatcatggagtgactcagcgccagctaagaggaaagatgaatatagcgtgacgatgttctccacaggaaacccatggcacgaaaaccaggggcggggagggtgcttgtagcacagtggccctgtggctgcctcactgggcccatggctgagtaatgggctgactgatggcagccctgtggaagctggcctcagacaacacaggaagcccgctcagattgtctctcagagcctgttcccaaatgggaagccaccagcaaaaaaatcccagtgggctgtgctcttcatgtcctggttgggaaattcaggaagcacacgtgaacacacacatgccacagacatgaaaaaggttctgtcttctgaaggctgttggccgatcttaacatgaattttaaaaaatgatttgctacatttgaggcatttcttcaagccagttttggacacaatccctggttactttgttcctggggacattcagtacccatgtctgccaagccctgtagttttgaaaacatccctggccctcacaaaagccctcataaaacagcatcccctcaaaacccaaggcacctggtaaggaaagaattaaagccagtgacgtgaatttaatgttcgatcccaaaaccagagttgacttggcttgtctgggttgttcacccaggggagggctctcctccacaaggcccaagccctactggggctgcttgggcaccagccacgctgtggggagggtgttaatcgtgactgaatcgtgattccatgtgggaaacagtcctgcagtcgggggacaggaggagccaggctggaatccaacacaaacagtccaggggcagagggaacattcccrggtacctgtgtccctgagtgacttgaaaatgctgaacttatgctgaattctgtttaatgattatttgcgggaggggaacaggcattcttaagagatcggtttaccttaggaaatcctgtactccccctgctttccggccttccggcctccttgtatcctgcacacgctattcctttgcatacatttgcagcgaactttgctccccagggtatctggcttttgggataaagactaatgtccatgtcaaaatgattcttgataaaagcatcctagatgttaaatatttattttaagctaaatgttctacttctgagaggttaaaaaacaaatgccttttcatgcagagccttttgccagtcaatgtttgagtttctttaggcttttttatttggctctgcagcagctagctaaccaactgcattcctgagatgagctgacaaggaggcagaaatgaagaaataaacaaaaagccatgttaatttcaagcttcagtaggaatacaaagagaaatattaacatttgctgaatgacaaataatgaaatggctggaaaattttaatgcttctagcatgcttttataagctctcctggaattttccccccatcaggtattgcacatttataaccagcagtgcaccatgtaaaggcagttcgataggttgtttaatttaaagattggtatttctgagcatatagtgttcctaatgcaattcctaaccccatttacacttctctgtctacccgaagtacccacatcttcttagcataatctttataattgtttgttgctatggttttaatgggtccccttcaaaattcaggtgttgccaatgtgagagtattaaaagatagggcctttaagaggtgattaggccgtgaaggcttctccctggtgaatgggtttaaggccctttagaaaagaggcttcatcattccctttgaaaactggcacaagacaaggatgccctctctcaccacgcctattcaacatagtattggaagttctggccagggcaatccggcaagagaaagaaataaaacgtattcaagtaggaagagaggaaatcaaatcgtctctctttgcagatgacatgattgtgtgtttaaaaaaccccatcgtctcagcccaaaatctccttaagctgataagcaacttcagcaaagtctcaggatacaaaatcaatgtgcagaaatcacaagcattcttatacaccaataatagacaaacagagagccaaatcatgagtgaactcccagtcacaattgctataaagagaataaaatacctaggaatccaacttacaagggatgtgaaggacctcttcaaggagaactacaaaccactgctcaatgaaatagaagaggatacaaacaaatggaagaacattccatgctcatggataggaagaataaatattgtaaaaatggccatactgcccaaagtaatttatagattcagtgctatccccatcaagctaccactgactttcttcacagaattaaatttcatatggaaccaaaaaagagcctgtatagccaagacaatcctaagcaaaaagaacaaagctagcggcatcatgctacctgacttcaaactatactacaaggctacagtaaccaaaacagcatggtactggtaccaaaacagttatatagaccaatggaacaaaacagaggcctcagaaataatgccacacatctgcaaccatctgatctccgacagacctgtcaaaaactagcagtggggaaggattccctatttaataaatgatgttgggaaaactggctagccatatgcagaaaactgaaactggaccccttccttataccttatacaaaaatataaaaaccctagaagaaaacctaggcaataccattcaggacataggcatggcaaagacttcatgactaaaacaccaaaagcaatggcaacaaaagccaaaattgacaaatggratctaattaaactaaagagcttctgcacagcaaaagaaactatcatcacagtgagcaggcaacctacagaatgggagaaaaattttgcaatctatccatctgacaaagggctaatatccagaatctacaaagaacttaaacaaatttacaagaaaaaaacaaacaaccccatcaaaaagtggccgaaggatatgaacagacacttctcgaaagaagacatctatgcagccaacaaacatatgaaaaaaagctcatcatcactggtcatcagagaaatgcaaatcaaaaccacaatgagataccatctcacaccagttagaatggcgatcattaaaaagtcaggaaacaacagatgctggagaggatgtggagaaataggaacactttcacactgttgttgggagtgtaaattagttcaaccattgtggaagacagtgtggtgattcctcaaggatctagaaccaggaataccatttgacccagcaattccattactgtggcgggctaggggagggatagcattaggggaaatacctaatgtagataactggttgatgggtgcagcaaaccatcatagcacatgtatacctatgtaccaaacctgcacgttctgcacatgtatcccagaacttaaagtataatttaaaaaaaataatagaaaagtggcttcatgtagctgttagcttagcttgctctcttgaccttctgccttccrctgtgtgagggctcagcaagaaggccctccccagacaccaaatgccggcaccttgatcttgaacttcccagccaccagaactgtgagaaataaactttataaattacccaatgttgggtgttgttttatagtagcacaaacgaactaagacattttctcactaaatgaagtcactttacccagctagaaggatggtcacaggatcattattgttgtttaaaaaatgtgtatatatgtgtgtgtgtgtgtctccatatatatatataatatatataatatcagcccctctctctctacatacacacacacacacatacacacacatcccacattagaaatactatggtttggccgggcgtggtggctcacgcctgtaatcccagcactttggaaggccgaggtgggtggatcacctgaggtcaggagttcgagaccagcctggccaacatggtgaaaccccatctccactaaaaatgcaaaattagccaggtgtggtggtgcatgcctgtaatcccagctactcgggaggctgaagcagtagaatcacttgaacccaggaggcggaggttgcagtgagccgagatcatgccattgcactccagcctgggcaacaagagcaaaactatctcaaaaaaaaaaaaagaaaagaaaaaaaatactatggttctaatacttgtgttcatttgtcaattagatgtatggcactattaatttcagtttaattcagtttagtacatgtttttcgagtacctactgtgtacaaggaactgtgtggggtaccttctgagcacttcacctgctctccagagatgcctactgagtgtttcattgcagaaaagaagtgctatggcatgttggaagaagggggactcatatctagctttggtctgttgaaccaaataaacagatctgtttgttcttccctactagatcttagtgctcacagaaaaagggctgtcattcactttgtatacccagtatctgggaggtgcttggcacatggtgggtaaccaacaaatatctgttaaatggatcacattgggtgagcacaaagatgtgatggaaatctgtgaggcgggcagaggaaagtgtagggctcttgactgtcagtgatggatgtgaggatacttctggtaaggagactattgtgtaggctcagacacccgcaggagggcaaccagaagttcagcatgggtgagcccagggattcccttgccagggttagcaaactagggtccacaggccaaccacatccattcatgtacctgtggtctctggcaactcttgtgccacgtcagcagagatgagtagatgcagcagagaggagttgcggtgtatagatagcctggtaagccgaaaagacttagtatttgtttctttatggaaagtgtttgctgaactctgccatagaggcacagaacaaaaatgagcgcagttaccttagggggccccattgcaaagtgacgatgcatacttggttctcttttgatcaggagacgactgacctgattggagatatgtatggtttaggaaagttgacatgagaatgattcagtggactggagcttttgggaaagggaccaagtatgagaaaaccaattaggagtatattacagccatctgttcaggcatcattgaagaaagagcatcattttgagtcttatctaagcgttggggttggcaagtattacctcctaggccagaaagccttgtccttctcccagtcccagttcatgtcactagattgggggtccacctcacagctccagaaacctcaggtcaaccccacccaatcggtcacatgctaacttcctctctggtgatctttgcacaaacatataactcacagcatggtgtctggttcttgctgacatcaactttgtaactgttttcagattattttttcttttctccacagtaactctcaggcttcttgaggtcagaaccatgcattcttgttttgctgccacctccccacctgcctgcccctcatgctgtgtcgagtccgcaygtgagaaataagatgagagtcactggcagcaaagtgagtgcygacatttaaatatggaagcaagtctggggccccagactccaagcgcctagtacctgtggccttgctcactgtttttcatatgctgtcctctggtcttgtttgtaaagtgacctgttgcacaacctgtcagtaccctgaaggtcagtgactgtgtccacacctctttgtgttctcrgtggttagcataatatttttaacataacggrctctttttaaatgtttggtgatgacacagtcactgagcaggatgtgctgtaagaagaaaacatactctccctcattctgtgaattagtcagaatatatcaggttaataacggtaagagcaagcttctgttggtctgatgcaccagcatctattggatcaagcaattaaacccatgtcagtcattttggtacaatagaactaaaattagacacagcataaatacaatcaagacgtgagcacgtttcccagcattagccttacaatgacaaaggcaaatgcagaagtgtgcgaacttccaggacaggtccggagatggctgttccagagaagagcyagggtggatggcaggaagcggcagctgggatggaacctccagtccatrtgtggcacctcttttacatcttcatcgtaagcsctaccaggagtttgaaatgcaaaagttttagaaatataaaccaggytttacttagtaatattcattaatgacctaaaccaagagagaatctcctacttaatgaagtgattaattagctctgggaattgaagtcgaaaacagaagrctaattgattaatagattactgtgttcatttttcttcctttcgtggaaaggagccagaatttggtccatgccaggtttgctgctttgggctagcaccatgctgcctggaatctgttctcgcctttcccacgtagcctgtctgcttcccatcctcatgcctttcttcctgccctctccacaggtggaaggccttccgtttaaaaccttgctctttcaggctcagcacgcatctcatccccaggatggatttgcgctcttctgacactaccgagctctcctttaagtcaccgttttacctaatcaataccatacggcttagcatttaatttttcttattgctttatrtgtggaataatggaaaagaattaaaagattgaaaaaccaaacacccacctcactccacattaggtgtgtcaaatctgagctgatgagaggccttccccaccacagctctgagcaccaaatgagatgatgtagggaagattccttataaactaaaaagtgccgcacaacatttagttattggcaccgtcttttttatatattaatcttaacttctctactatatttgtaattaaaatctccagccaaaagtcagcaaatttttcttttttttttttttgagacagtctcactctgtcatccgggctgaagtgcagtaggctcatctcactgcaacctctgcctcctcagctcaaacgattgttctgcctcagcctcccgagttgctgggactacaggcgtagtctgcagtctgcctagctaatttttttttttttttttttttttttttttagtacagatagggtttcaccatggtggccaggctggtcttgaactcctgacctcaagtgatccacctggctcaccctcccaaagtgctgggattacagatgtgagccaccacgccctgtccaaagtcagcaaattttttaacattccttaggaatgggctttgctctgtgccaattttaaaaagtcagacttcttcaggttacctaccatcactgtaggtagaaggatagggaagaccccacatgaaacagttagagaacttacatgataatggtaagcacctggtgtcagcccagtctctacgtccctcctcacagctccctcagcccctgggagtcctcacacagatggcctatgacagccctcagcctccaggggcttccccaacccacttagtgttacaaaaagaggcagaagctgatcagagaggaggttgggggaatttggccgtatgctcagaggcattggtagctaagtgactttttcccagacaggctggtctcctgtaagagagagagagaactgacagattatgcgagagaatgcggctccgccaccatcaaggtcagaagcctgcccctactctcattatgtgttgctagccaacacactccttcagtttgtttccagctgatcatctttctgtcttctgcattcccagttcgtaatctgcactctcttctctctccacgggccccagagcagatgggtcacttcttttggtttcaaatacaatttagtggccatcttccctcccatctttttcattaaaaaaaaaaaaaaaaagttctaaccactgcttttctaatcaccactgttctagccactaggactttctgtcctccacaaatctattgctgttaaaatatttgttttgattgttccaggtggtaaatgttaccttatgggctttgttccagctcgcattactttttgcaaggaggatactaagttctaaaacattgagtcataccatgactgagaatagtgaaagtgcaaattctttattaatacagaagttaaagatgaggtagtcatgtagaagacaacctgtgatgattaaataaactatgattctggttcagtgattctaattaatcaccagaagtgaataaaaatgttacttgtggccaggmgcggtggctcatgcctgtaatcccagcactttgggaggctgaagcgggtggatcacctgaggtcaggagttcgagaccagcctggccaacatggcgaaaccccatcactactgaaaatacaaaaaattaggcgggcgtggtggcagcgcctgtagctactcaggaggctgaggcaggagaatcacctgaacccaggaggcagaggttgcagtgagccgagatcgcgccattgcactccagctggagctacaagagcgaaactccatctcaaaaaaaaaagttacttgtaattattttttttgaagtcttcatgttctaagtcaagacttaaactgaccattttttttacaaatagttaatggttacttggtatgacatatttagaacttacccagtagtttttatcatcttgactggtcctcgctatgaaagatattttataatttcatgccaacttacataaatgtagcatttgattttcaggtaactaaatcactagctaatcaattctacttatcttcaagtgttatgaggtagatgtaaattccgtgagggcagggagtcatctgtaggcgaatcatctgttttattccctgcattatctttagcatctaaatcagtgttcagcatacactgtggtcactagataaatattgaacaaatgaatgagtaagctatagacataaactataagaaactcataaaaatcttttataaaaatctagaatcatataatgttaaacttcagatgtatctttttaaaccagaggtataagtagcaaacaaatgggaggaattaaaaaattctttgccttgaatctgaactatcacattcaaggcttagattttagtgatgaccatttctcataaatgcattaaagtcacttcattaaaacttgattctcagccgggtgcagtggcgcacacctataatcccagcactttgggaggccgaggcaggcagatcacctgaggtcgttcgagaccagcctggccaacatggtgaaaccctgtctctactaaaaatgcaaaaaaattagctggggtggtggcgtgcgcctgtaatcccagctacttggaaggatgaggcaggagaattgcttgaaccaggagacggaggttgcagtgagccgagatcatgccattgcactctagcctgggtggcacagcgagagactctgtcaaaaaaaaaaactttattctcaactgaaagtactaccaatgagtctaatccattttggtacacagatcagataaacagttcttaatcatcttcaattttctgatctacattcagcagtgtttatggagactcatgtaaagataggtgcagggcaattacaatgttagaaaaaatgtcacgctagaagttctttttaagtaagtcagtaaatacaaagttcaccagtgttgttttctataaacctgtctttggtataattactatttcttttaattattctactttttacctttagaatcttctattattgtttgacatgccaatttcaattccctgaattccagttgtaatactttgttttcaagtattataaaaatatcttaatgttctttctgtagcagatcactcttttggttcattgtttccagttgtggagttttaaagtgttatttttcaagttgtaatgagaactagaaggtatttaaaattggctttaaaaacctattttgggccgggtgcggtggcttacacctgtaatcccagcacttggggaggctgaggcgggcaaatcacttgaggccaggagttggagaccagcctggacaacgtggcaaaaccctgtctctaccaaaaatacaaaaattagccaggcatggtggcgcaggcctgtaatccccgccactagggtggctgaggcagaattgcttgaatctggaaggcggagagggcagtgagctgagattgtgccattgcactccagcctggacagcagagcaagactctgcctcaaaaaaaaaaaaaaaaaaaaaaaaaagaaagaaagaaagaaaagaaaaagaaatgaaacctattttgaatgattgggaatgcaaaggtggtagctacacacctccctttttaatagctgcagtcagcaggaatcaaataattacaccatttttttttatttttccttcactttttttgttctttttttttttcaagacagggtcttgctctatcacccaggctggagtgcagtggtgcaatcatggctcactgcaacctcagtctcctaggctcaagcaatcctcctggagtagctgggactacaggtgtgtgccatcatgcccagctaattttttttttttaactgattttttgtagagataggctctcgttatgatgccctggctggtcttgaactcttggcctcaaatgatcctccctcttcagcctcccacaatgctggggtcacaggtgtgagccaccatccccagccacagtttccttagacatatgaagagctgggtggcaatgtccagaatctcaattcagaatgcagatcagggggactctttgagtctggcaaccccaacccgcccggaaaaacaaacagccttgtaggacaacagccttttaggacttgaaccttctcaggcccgcctctcaaaacaatatgacttgaaaatgtttagtttttcttgtattgtctcacttgccaaacctccgaaagcaatttgagagtaatttcaaccacatcttttagcaggccttgtgaaaaataaatttaacaggttaattgtgtgccgttttgatttgtcttggcatctcaataagtaaaaggttaaaatcatggccacaaaaagtaaataaagcttgattattccagttgaaaattcatccatgggtactctagtgcctggctttcgtgttgacctcattgccatatgaccaccatcaatagctctttatatttaattaatttcctaaaaaaaccacactcacacatttgtaatgtttgtaatctttttattccatgataattgatgtagcctagcgtaattgtagtttttgtgtgtgtgtgaartakctgacattctgtgctttagtacgttttatttcatcacttaatgtgtcccccccacccgcccactggctgtgacagtgtttttgcgaatgaaacagttcagtgagacctgggaatttcctatggcatttatgtggtctcatgctcatctctatttgccagataccatccgtgtaagaaccatgctcaacagatacattttggagaaccagatgtctcattttstcattcaccaatgagtcttgaaaggctgaattcaagaagacaactttttaagatctttctctctcagtctacaaaagaaaaaacgggcttattactgtcaccgctgcctttaattatgtacagtcacaatacaattatctccctatttgggtgttatctcccctgccagatcaccaatgcctcaaattgggagagcacggcttctgtttattgttcatcctttgaaatgacttaaaaggaagctgagtacacagttgaccccctagccaaggggattgatagtggtctcgggctggggagaggactctgtgattcttcccaaaaggtcactccctatccagaatgataagtcctcagtttttagaatgtagttgttaggtaaagggattaatccagagraagagattttaaggctgcatcattgattttattgttttggataagaacgtggaattggcttttctgtaaattgastacattatataaggcacaggttaaagtgatccttccacgtgaattctttcatggttatttgattattttcagaatatcttgacatttgaaaggcatacagacaaaagccaatcatgtaaataattgcatttctaaaacagtcatcagtcttcttttacttcaccatttttaaccatttggattcaaagctggattttatctcaactaaatagaacagctaatatccaatttaatgtgcaactgtaaccagtcagacccagaaattttgaatagcatttgtaacttttaatcacaaaattaatggcattaaactctaacagaatagattccatttgttaattttttctaatcaaacttcagatatttatccatgcctcaggtgagaaatgtctcaccagacacccagttaaatgaaaagtaaatcatacctttttttttttttttgagacagagccttgctctgtcacccaggctggagtgcagtggcgcgatctcactggagcttgctcactgcaagctctgcctcccgggttcacgccattctcctgcctcagcctcccgagtagctggaactacaggcacacaccaccatgcccagctaatttttttgtatttttagtagagatggggtttcaccatgttagccaggatggtcttgatctcctgacctcgtgatccacccacctcggcctcccaaagtgctgggattacaggtgtgagccactgcactcggccagtaaatcatacctttttaaaatagcatttcacattaattatacttacttagttaacactgaggttatctaytattgcataagataccgttgattttagttgcatatcatatgcaggtaactgcttgcttgcttgcttttttttttttttttttgagatggagttttgcgcttgtcacccaggctggagtgcaatggtttgatctcggcttgctgcaacctccacctcctgggttcaagcgatcgcctgtctcagccttccgagtagctgagatgacagtgcatgccatcacacccggctaatttttgtatttttagtagagacagggtttcatcatattggtcaggctggtctcgaactcctgacctcaggtgatccacccatctcggcctcccaaagtgctgctgggattacaggtgcgagccaccgctcccagccacaagtaattgctttctttgttcttacctaaaagataagccaaagtaaaatagaatatatttactacttaacacctatgaaactagattgttctaatgtataaaggaaattaaccaatatgttttatatattatacaaatgtacaaatattttcccgagaatctggcaatgtttctaaaaagcagctcattctttgttgttgttttctgattataaaagctagtgagtcagtaccacttctgaaatggcagtcactacattaggatcctgcagcagtgattcagcaccagattagtgacactctgcagtgttactagttgtcacaaagggtagatcaaaaagtataaaattaattaaaaactatgtatgtgtacagttcttctaaaggtcagtttttcaaatcatatccccagccatgaatatttttatatccttttacctgatgatctcattccttaaaattataagtaattaattttttaaaagctatatgtgtatatgtgattatccaactgtttctaaagattaaatattaaaaacaaccaaaatcagcaaatgagcagtgacaaagtttataagatggaatattaataattggtggacttgattataagtagaaagaccaaaactatgcaagggtaactataggctatcaagtgacaaaaagaatgcaaaattatatgatactatgattacaactatgtatttaaggagttaaatgaaaatttattgtgttagagttagagtgtggagtttttttgttttgttttttttttttaagaaggagtctcgctctgttgcccaggctggagtgcagtggcgcaatctcggctcactgcaacctctgccccccaacaaggttcaagcgattcttctgcctcagcctcctgagtagctgggattacaggakcctgccactacacccagctaatttttgtatagcagcagagacgggtttcgccattttggccaggctggtctagaactcctgacctcaggccgtctacctgcctcggcctcccaaactgctaggattataggtgtgagccactgtacccagccagaatgtggattttttaaattttgttttcttcatgttgttacgaagttgtctaatacatttctaacatctttttgttatatcagcactttatggaggactagaaggcatcagtccatatccccaaaatatggtgtcttgttgtactgtggtgcctcttaacaaatgattgtattcatttgtggccttctaaaagagtgactgcttttctgagagtcttttacctactcccagaaagttatttactctgtgggacagttcattctgttgcatcttatctgagtacttaaagccccaaggaagaagatgatatttgccagtacataaactgacattttggcacnnnnnnnnnnnnnnnnnnnnnnnnnnnnnnnnnnnnnnnnnnnnnnnnnnnnnnnnnnnnnnnnnnnnnnnnnnnnnnnnnnnnnnnnnnnnnnnnnnnnnnnnnnnnttgacttgaaagagcttacagtctgcttgtaaacagaagacatgaaatgactgaagaatgttctcaaagctcaacatgaacaagtcacattacagacatttgaactgaactgaatgctgaaggaccttgaacaaatgagcatctgggtcagattagctaggcagatggcactgggtgcccaaatggagtgagcatgcatggaagaaaaagtgaaggcccaggcactcatttagaggggaggagtttggtaatataatgaggataaagaatgcttgtagatttctggttagtgagtagtagaataaaaattgtgactaagcaccatgggtggatggatggatggatggatggatggatggatggatggatggatggatggatggatgtggccaggaggctgaaggcagtgctctatccaggagagccaggtcagcgcatgcatagctagggcataagctaagaaaatggggaagacacagcaaattcctgatactttacataaaaggagtttgttgggttttattttaaaagtgttgaatgtgagataaaaaagaagaagggttgggatccctaatgtagatgaatagctttgtttcaggtccgcccttctgggcacagcgggtcacacctgtaatcccagcactttgggagaccaaggcaggaggattgcttgagcccaggagttcaataccagcctgggcaacatagtaagacctccatctctgtaaaaaattcaaaaatcaacctggcatagtggcatgcaactgcagtccccgctactcaggaggctgaggtgggaggaccacctaagcgcaggaggtctaggctgcagggagccatgattgtaccactgcattccagcctgggtgacagagcaagaccctgtctaaaaaaaaaaaaaaaaagagagagaaagaagaagggtaaccaaggaaagagctggaaggaattttaagcctttggaaactgttgttatggtggtgttagagacactctgtattaaggtcagaggaaggagtctgagcgcttgttggtatgttgtaaatagctgatatctgtaggatgtctatgcaaatgattaaggtaaaaaaatagggagcagttagtagcagagattaggttttttgatcatttctgctttggctgaattaatatacagaaggaaaaactagttgaaagtcaaaggggcacctaagttaatggtggagagtgagaaaagagacagcagagaaatttagggctacagtacagctcagagccactcactaccaaaagaagagaccagcggaggtggccctcgttgtcccctgaaagggatgttgcgccatagcaggaagggtggaagccatgtgggaggaataaaaatcaagggtttgcaggagaaaaatcctcaagctactttttttttttgagacagtctcactgtgttgccccggctggagtgcaatggcttgatctcggctcactgtaaactctgcctcccaggttcaagcgattctcctgcctcagcctccctagtagctgggattacaggcacccaccaccatgcccggctaattttatatttttagtagagatggggttttgccgtgttggtcaggctggtctcgaactcctgacctcaggtgatccacctgccttggcctcccaaagttgctgggattacaggcttgagccactatacccaacccctcaagctacttattgtagttgagaaagaagggtgcggatgacaggaaaaataagtagatgaatgcaaagtgagattaacatgagatatttggttggttggttggttggtttgcttgcttgtttgtttgacttcaggagaaacctggatcagattgggcatgaggggaggacgctgaagcgagatgaccaagtgtgagaggagggtcgtcagggactcggtaccaagcgtgggggcagagtcctccttgaagaatggccccttggcccaggcctctggggtttgatccctggtcaccctgtatgtggacactggcttggcagaagtcgaggacaagaatatttctgagagctggtgaaggaagactcgtgggccggcattatgggtgggcttcgggaaagcaggagatagaattgaggaagttcctggctagttccttctccttgctcagtctgtctccagcttcaaaggtcagcactgtggagagtgctaaagtctcaaggttaaattttaccccagagtctaattgaatttaacttttacattttgtttgtttgtttctaatgtctcaaaagcctgttttacccaaagctatttacagttgccgttgggttgggatccctaacgtagatgaatagctttgtttcaggtctgccctgcctggagcccctccttcccaccagttacctttatggttacatatggtttggcatagaataccagtaaaataccagtagacacagctgaggtgctcttttttgtttctgaaggattttcagtatagtgtcatatccgaacgtcaggacagtggaggaagcccacgaggcctccagctcatcagtggcagagccagcattcagggcccctgtgactctccagctgcattgcactgctgcccctgagctgtaaacccgcttcctagttaggaagaaagctgaattaggtgatctccagtccagccttccaagtaaggcttctgtgaatccatggctgtaagcatttgaatgaatgtcgtataaagaaggtgaaggtcagtggagaccagaactgggaggagaagcttcatggtggaggggacttgaagtgcactctgaaaggccagtgggcatgagaagggcaggatgcagggagagttcctgggctgagggaagtgtgagcaggaattagtgtcgaaggtcatggacagaaaggagctggcctgaaacccagtcagaggccatggtggccagtgggaaggtggggtctgatgatggagagccctgatagtcagagacaggacttggatagtgtcaggaatgtctgaacagcagggcaacatgaagaaagtggcattttaggccaggcacgatggctcatgcctgtaatcccagcactttgggaggccgaggcaggcaaatcacttgaggtcaggagttcgagaccagcctggccagcatgtgaaaccccatctttactaaaaatacaaagattagctgggtgtggtggcgtgcacctgtaatcccagctactttgaaggctgaggtaggagtaacgcttgaacccaggaggtggaggttgcagtgagccgagatcacgccactgtgctccagcctgggtgacagagcgagactccgtctcaaaaaaaaaaaaaaaaaaaagtggtgttttaggaaacttcgcctggcagtcgtacacaggagagacagctagggacaggcttgtacacccctggtatatggcccgagtggtaaactcaacctgaatgtgattgattcccaaggaaatttcttacaggatttctttggcaagtggtttataagcaacgatagaaagaccacagggtacccatgtgacctcactgaggaaaaaggcatgccaaatgaatcccatttattttcttcataacattctcagagagttctggcagggaaataacagacaaatccttacctttatacagtgctttcctgctaaaagtacattctaaatttcaactaggcacttgacaagtgtgtgaaattctgtgagcaagatggagaaacatagattggagagtggtgccgctggctggatgttagctaaggactatactcaaagagcatggattaaagagggcgaggtcccttgtagatgctgcaaaaatctatgtgagtgaattgaatgaagacataaaaggctttttagcacgtttgtgggtaacaccctttggaagaataaagaagatctcagtagaggtcagaagccaagctaaacatataacagttggtgagaataatgtagtyttagcaagtgtattttaataatcaattaatgtgaaaaacctgaaataatattaaaagactctgggaggagggaaaggctttgggggagatagttatgtaaggatgaatggttagtatcaggtggctgtcaaaagggttaatgcaatcttaggagagtaagaaaagcatagtatttagagcaagcttgtccagcctgcaggctgcatgcagcccaggacagctttgaatgtggctcaacacaaattcctaaacttccttaaaacatatgagatttttttgtgtgtgtgatttttttttaactaatcagctatcattagtgttagtgtattttatgtgtgatgcaagacaattcttactctgattagcacaagggagataatggccccattgtgttatgttacatttgggacatttttatgttcattgtattgtgggtgggctgttatacttttgatgtgaagggtagtagaaggatctggggatatgtttcagcatggagaagaaaggagaagaccccaaggttcatgaccactgtcttcaagtatgtaaaaggttgccatgttgaagacaccacagatgggtagacttatcctgcacttctccagtgggcatacttagggcattctaagctaggcagatgttagacttcatgagcagctcaccagtggagagcaaaacaggtttggtgtacagctgtcagggattctgtagaagagacgcttatattgggtgtcggattgttctccagggtttctagtgtgttaagtattatccagtggtgtgctggagccagttcataccagcttgcaggagctggttgttaaataatgaggatttttaagggctagtagttaaaatgttgtttgcttgaaatgggccatggaagcagtatttataccaaggaaattggcaatagatcaaccccaccccaccccacccctacccagtgtcagcatgccagcataccaccagtattatccataataaaaaggtgtcttttagaggccgggagtctctggaatgtggaagagcagacgggtgtgggaacatccacgtgcgtgttctttggagttttcagattctgtttccttgttaatggtgcgtagctccccttttgtgctcataccacttcctatctcctgccaagatctggggcctgtgagtttctctgtctctggatctgccaggaaaacgcagatatcttctgttgcttggaataattctttccttgttacgtatctagactggctagccctctgtgagaggtgcctcccacctcattctcagcactagcctcaaggactgtgaatatcagatgaattcaaccagtgaaataggatttggaaacacctgggctgttgagaacaagtgattgtaggagtaaggtccaacccacaaatataacaaagccccgcaggccatatggcaataacagcccaaccgatggggcctttgggttgacctcagatcagcctctgtccccatgctgcctgggcagagagcaaacaatgactttatttctgtcacttttatctcccttatttctttgtaaaaaggatttaaataaagtctgagtcatgctgtaaccaggaaaagcaaatgtcctgtggtatacatgataggcgaattcagctgtggtcatgcaaattgtatttgagtttggttgaggctctaattaaaaacaacaacaacaacaamaaaaaatkggttgtttttacttttcttagttgcctactgtgttctatttgaaaccctataggctttgccattttccccaagggtgcctacttcctactctttcctttagtggtttcccaagagacagacaataacacccttgaccagttgggctacaaccagatatgagcttctcaaactatgggaggccattccagtaaagtgtgtattgccagccagtgaactgtttgtttttgataaaaggttttcttggcaaaacaacccgcccaaaggtgatttttgaaccatggaacaattccgaatttcaaaattcaaattataaataagagagctgaagtataggtgttgcatttaacatgcagttatatattgggaagctataaataggtctgtttttgaagagactaaacccaagtaaagattagctatatgcctgtatgatggtggcatatgtagagggatcagggagaactgaataaaggaaatcaagaaataaccctaattttctaatagggtgtcaggaagaaaagagagagaatgcagctctagccagccagaagttcgtgggctggagacacaccctttaaaggaagggtctgtcttcctttaaagggcataggcataggccaaggcataggccaaggacagggaataaagagaaaactgaatgcctactgcagagactataggatagcaacagcagaggtgacagtgacgaccatattaaccagagtccagacctgggacactaatagcccaagcaggaatctctctctatccgtgcacaagctgcagctgcagccgggggtctgtgctgggtcttctggctggagatctgaccccgcggctcagggccagggaacctaccaaaaagatggactcaaaaaaggctgctcctacttgaagggtgcagaaagaatcggatgttattaaattatgcctgttgaatcttcagctgcatgaaatggcatatctgtgaatgcttttagagtagaaaatttggtttgaatggcctaattgtgatgcgtggcagggaaagggttaagacgagagacagtcccaggaaagaagtagggcagtgagggaaatgtggacacaagcggcatagaaaagcaagtgagttcattaaggtagtgctcctcagtgaaaaaatccctcccggcccccttgcagcagagacagggccctattgtttttggtcagccaatgccaataccacatgccgtcggcctcagcgagaaatatgtccatccgtcagtgtttagccttccccaactagggttcccagggagaaataagccctcctgctttaagacatccattgtagtgaatcgactcctctcctggccactgagagtggtatataggaaggttacagtcacacagatcattttctgtgctctgtagttcagatagaaaaccctggttgagaaagactagtagtgcagtgacccagaactggccttccaatataaaattagcaggcacttcagcaacctggggttttgcctgaaggagatggcagaaagcagttgtaataaaagggcactcagaattaggatgtacaaaacaagatcttatccccaccttcacagcacctcccaactctgccgtacctaccagaactctgactgtctcctcttcctacctaggttgtatattgtccaagactcttctctgtccaaatttctggtatttggtttataaaataggttaaactagtgtgggcattaaattagtttctatggagaaaattttggtttcgctttcctacttctcatgaagtcactttccctgaaaataattcagtggaattgaaaactcttggctcatcttcatttcataacatggccatttgtgtagcatacatacattgaatgatttgagtgagtgaatgagttaattaaacatacaatgaagtttgtcaaatatgtcaacactctgtttgccttttccccgttcattttttttttttttgagaccaagtttcactgttgtcacctaggctggagtgcaatggcacgatctctgctcactgcaacctccgcctcctgggttcaagtgattctcctgcctcagcctcctgagtagctgggattacaggcacacaccactccactcagctaatttttctatttttagtagagacggggtttcaccatgttgctcaggctggtctagaactcctgacctcaggtgatcccctattgattcttaaggtgatcaagtaggaatggctgctaccatcttatggctgagggaacttaggctcataacatttaagtgactcaaccaggaacacaaagtagatagtgacaaggtcatgtggagaacccaggtctcctgatccctgtgcagacctcttaaagggcatctggaaggatggtggccagtcacatggtgtgacacaaaataagtcaatcagttgtgttttcgtgagcacttattgtgtaacactgtgttcagtgatagctgtccaagaaaggaaggtgccatgtttctgtttttgtttttgttttaatcaagaagcttatagcttaattggagagattaaactgctacacctagaaacaagtgcctggcatgactcttacagtttaatggaaggtgtgtgaagggaaagaagagccttctggaaggcatcaaaaagttcctcaggaagaactgaaactgaacattgtgcagagatagcactgggtaaatccagaggccaatgagagtaaaggtctacccaggcaggggatgatggccaagaatcatttgggtggaggcagaatgtgccagtcctgtctctgtctagagatgtgcagctgaaggtgaagtctgataagctcagcgtagataaggcctggggatttgggaccaatacagtgaaaaatcgaatggacgaggtctgaaggaacatttgggtcaacacaagccaccctaacagcataatcactacctaggatggtagatgaatgctgtctaacagacgactctgactgacgtagtacctcccacggagggtcagcgtgcaaggtggacacagtgcagtccaaggctcttgactacagcagaagcctgggtgagctgtcgggggactgctaatagaagtggasgtagaactggcaagccaggcatgggggctcatgcctgtaatcccagcattttgggaggccaaggctggaggatcatttgaggtcaggagttcgagaccagcctggccaatgtggtgaaaccccgtctctattaaaaatacaaaagttagccaggcgtgatggtgcaagcctgtaaccccagctactcgagaggctgaggcaggagaatcacttgaatccgggaggtggaggttgcagtgagccgagattgtgccattgcactccagcctgggtgacagagcaagactccatctcaggaaaaaaaaaaaatggaggtagaactgaactctgaggatgtttaggatttgaataagagaaggagagagcatcgcagatgaagaaagcaacatgcacagaagtgtcgagtaaggagagtattgcggtgtgcacaaatgacagggaagggtcagacctaaaagaagaggatgttatgaactgaacacagaaaaacatgatggggtaagggagggcagctgtggggccttgggagcaattagaatttggattccgtgtgataggcaagttggttcttgaggaaagctgtgggatgatgaaagtgagtcaggcagcaggctgtaaattggattggacggagggaaagattagaggcagagaaactagccaagagactgtttcagttatcgggcccaggccaagggagtagtggcattgagaataaagaagaaaaagtgactgtgaggtaaatcccaaaaagaaggcagaaactcaagaaataaaggtaaacgtgataagcaaagatgactcttgagcatcctaattttggagatgaaaaaatcatggttctgctggaataagtggggtgagctggagaggagccccgttttgtgggggtggagggacatgatgacttcactttgaggcatccaattagagatacttaagtcaatgagaatatggtactagaacccagggagagattggggctgggaatgcatctgcctggtggtagatgcctggcagtgaatgagttcaccatggaggtggaccagggtacagagtgagggagtgggagaaggaagaggagagagaagaatgatgggagaaatgagcagagaccagcaaaacacattagcaaccctaaggggacttggaaagcgagttgaggtcaacagggtcagttatcaaagagaggcaaggctgaggatgagaaccaagggaaggcccctgagtcccaaaagcagcttggtggtgatgtgtgagtgcagcctttccagcttccctggcacragtctcctcatccatggttaaatgatcatccaattatcatataggcctcctgacttgcctccccaccctgagccttcttgaccctaattcattctccagttgcccattacaagagtgtgcccttcctttaaaatcataaccacaatcaatcattatgtttccaaaatacaaatgtaatcatacatcttcacctggacttgtgggttgcttaggaaatgaaagaggggtgtgtagacccctccacttgtgcgtccatcagtgcagggcagggagcagggacaagcattgccaccttaaaggaagaaggagagaaagggccaaggagaaaagaaagaggaagtgagcatgttcagaagcaagagccaagaagaccctgccacgtcggataagcggaaagactccagaggaagacagagttgctgtgcaggttcccacacgccttctgtctacagccacctgcagaactgcaggcagcagcctccttgcccggcgggagcctcttgcacagggcctccccattcactctctactggctccactgcaacttacgtctttgtcccaaagggaagactgacatttgtttgtttatcataactagcttcgcttgctctgaatttatttgtgtgcctgctcaacccttttctgaactattttctggtttgtatttgtcatgactgtggtcccttaactgactgtgatccttgtcatcaactctgcaccttatgggcactgagaattcagtaactggctcatcaatactcagctccaggctggggaccctaattcctagggacacyttcttatccaagcgaattccccccacagtcagagcagcccttcatgtgaattagctattttctattgctctttgtcgcctgtgaatatgtaattgcatgggatcgggaggaaggcagtgatagaatcctagattgtgtgttggcaagggctttagaaatcaccctattcaacctcccactcgcaggaatcccttcaacagcttttatttaacttattaatagcttttctcttgatttaaactgttcccaaaaataaatattgggtaggtgatccaaggagtagtttgagagttgatattaccaggaatatcgtaatgaacaggcctcttcttaagcactcagaatttggctggactcgtgagcgtccatgttgcactttgtccttcccatctgagttttgttatcttgctactgactgcaaccccgccatggagacagcactcagagttttcacaggggcttggtgaagcctcaagcccataacagaccaccataaggactccatgctccctaaatgcattaaacagttccaaagatgtgttttttgctttggggttttttgggggttttttgtttgtttgtttttgagatagggccttgctctgtcgtccagggtggagtgcagtggcgtgatcatgactcactttggcttgaacctctcagactcaagcagtactcctgcctcaccctccagagtagctgcgactataggtgtgcaccaccacacctggctaatgttttgatttttttttgtagacaaagtctcgctgtgttgcccaggctggtctcaaattcctgggcccaagcgatccttttgcctcagcttcccaaaatgctgggattacaggcatgagccactgtgcctaacctcaaatatgtgtttttaatgatgtttaagagcctcacttgtatagcagcagcttttatgtgtatctcatgctgttaaacctataggaacaggggcctggcagcccctgtgtcattgaggctctgttttgctgctttatcattcaataagctgggctgcacatacacaaacctgtctctgtagtaaagaaacagttttggctgggcacagtggctcacgcctataatcctagcactttgggaggccgaggcaggcagatcacttgaggtcaggagtttgagaccagcctggcaaagatggtgaaacctcgtctctactaaaaatacaaaaattagccgggcgtggtggcaggcacctttaaccccagctactcaggaggctgaggcaggagaatcgcttgaacctgggaggtggaggttgcagtgagccgagatcatgccactgcactccagcctgggcgacagagcgagactccatctcaaaaaaaaaacaacaacagtctcgaggaggccagaggagcatgttttgttccccccacctttggaaagaaaaaaacattgtacaagtggaaaatcttcactaatgcaacataaaacttggcgattttcatcacaccaggtcaggtaatcccaggctgtgcttcttgaggcagtggaagctgatttyctttgctcacttatcacctgtgcctctcaatggcatgtctstaacaggaggcagaggcctccttcccgaggtccatgggtcagagttttaccatacgagatggcggtgtgggaggtgtgatttgtcccataagatctctaaatcccaccacccattctgtaacagttgatagtcctcrgcactgcattttccagttactcatgtttacagacaaatgtctctttgtctgtagttgctctctgaagaaatcaaagagcagctgttgtcctgcctcagcaccatggcataggaggtccagagttagcatcgaggatgacagtgacgctgtttctgctctggtatcacttgccccttgctcctactgccctagcccttgtgtcacttccttgttctcctgaacagtttttttttttttttttttttgagacagagtcttgctctgtcacccaggctggagtgcagtggcgtgatctcggctcactgcaacctcagcctcccaggtgcaagccattcttgtgcctcagcctcctgagtagctgggattacaggcccccaccaccacacccatctaatttttgtatttttagtagaggtggggttttaccatgttggccaggtctcaaactcctgacctcaaatgatccacccaccccggcctcccaaagtgctgggattacaggcgtgagccaccgtgccggccctgaacagtcttctttgtgttttcctgcctctgtaccttcgttaatgatgttttcttacctgcagtgccctctcccttctctcaactctgaagtcggtggtacctaacgattctatttaaattctgcctccttgaattctctcctgttcttcccagcctggagtggagtccgctgaggtctactagagttcaagttccatgagaacagagactgtctttttttgttcactctctaattagtgcccagcacataatggatgctcaatacatgtttattgaatgagagagattgctccctctaaacgtagctggcatctgacattcatgatttctgtctgtattcctttttccatacgtgtacacgagatgataagcttcttgagaacagcaaccatgacttggtatcaccctctagcagagtcttgaacatgctgggagctcaataaatatcagtgattgaacttactacataatcactcaataatccaatcatgtccccgagctcaggggaagggggaggcagacagaatgccttcctcctgctgtcttatacaaagccactcgtgagcagcgtcttatgcaaacacaaggccccattctcccccagcccagcacttgcccacctaggaaggatattctcaagaacatgaggctgttgacatcacattccttttccaaaaatgtgcaaaggactacagaattgttcaagaagcagtgatccagtgcttggctagttaattcctgagtaagccactctgaaaactgattataatcctgtttcaaatggagaattgggagaaggccaataaagggtatattattgtatcttgtaggagggaagaatccggcagatattcactgagttatggcgccagagccttcctctctaatgttattgtaaataattgttagagtagaaagccagatcagcaaagtgagactccagcattgcagttcctctccacggaggtcttatataacgaagacctccataaacaaacattgcagaaacataacatcggatctctcctmttaaagttcacactgtgtaatgtaaagtggaataatcattttacattccttgtaagttctaagaagtcccttctggggcagctgtttgctaaaccttttttgtttgtttgtttgtttaataaaagaaaacaaattgtgtacctctccacagtgcccccgctatagagctaaaagcagtgatttcatgtaagtgtttcatttgtccccctccagctcgcctctctcctaggagtcacgaactcaagtgcctccagggccaggyaggtggtcagtgagctggtaatgactaaggtctgcatctggtgacacacacgtgcagagggcagccttatccagccccaggtcattgtgaccacgaactgacaagtggcccagagttgccagagcttttgattttcagcaggaaatccaaacttttaggaatatcacctgagttctaaatgttaatagctagttgaaaaaatttaatatctatgcaggccaaagagtgtctgtctctgtgccgggttcatcctgtggaatagcagcttgcaaacttcatgccatccrttcagtcttgcctgcatttgggtgcttggaagtcctcctcaggctgtgttttccttgtgcctcctacctttttagaaagtgcttcattggttcccatcagggcarggcaggggctggatggaggacctagtgatgtgttgggtatcagggggtgctgacctaaggcttgttggaaacacaaatccagagcttctctgcgtgctccctcccctcttagagacgcccaatcagtatctgtcactgcataacgaagtacctcaaaattccgtggctgacacaataaacattatctcaccgttgctgtgctccaggaatttgggagcaacatgacaggacgattcccactccagttctgtcatgaggtggcggtgagctcttagcccaggctgcagtcacccaagggcgtgactggggctggagggtgttcttcccaggtgggtcacccttgtggctggcaagccagagctggctgttggccagaggcctgggttccatccacgtggatctctccacagggccattgagggtcctcttccagagtaagtgattcaaggcagagcaaaagcagaagccacatgccttttacagcctagtctcagaagccacacattgtcatttctgcgctgtcttattggttacacaggtttgccctgctcagtgtgagaggagaccacaccagggtgttgacttccaggagaactgggtcctcaggggccatcttaagggctggctgtcacagctgtgatcacaaccctcagtcggtcccttatgaacaaatggtccaaccctgagaatagtttaaaaaaaaaaaaaacccgaagggaataaaatatatgtcatagtgatttgcacctaatattcagcccacttactattgtgttccccagatcagcctcagaaattaaatatcctttttttttttttttttttgagatggagtcttgctctgtcgcccaggctggagtgcagtggcacaatcttggctcactgcaacctctgcctcctgggttcaagcgattctcttgcctcagcttcctaagtagctgagattacaggttcatgctaccacacccagctaatttttgtatttttagtagagatggagtttcaccatgttggccaggctggtcttgatctcctgacctcaggtgatctgcctgccttggcatcccaaagtgctaggattacaggcgtgagccaccatgcctggcctaaatatcctatttttatatcccatcttagaactgtcttccctgaatgtatctaaagtcactttttaaaaatattttttaaaatcctacccataccacctcttcaagcgatagactgaggtgtaccaaacagaagaacccttgcttttcaagggaaccctttcgcttgctgcttacccctgtctgcttccaggggtattcctaggtctctcagttgctcgagcaactaaacctaaccaacttctctactaaacctaacgttttgtaaagatttgaaaggaaaatcactctgaacaaagagtagtccctgctttggtataccagtagcacctgtgaagacaggtggccccagaagttttctgggaccctctgaattggtaggagaggggcaccagttaatcagaggcacagacagggaggagcagggttgctcctgttcctgcagcagtatccatttctgggacccactttccaaaccacccccccgaattctaacagcaggagacacacacacacacacataccctcaggctctacatcacctctgcctccttcaagaccacccttaatattcattttaaccagattttgcctgaataaaaacgtgaaggggaagaaaaggtgccccagtgtgttttcccctaggaaaatccctactggtaactagtcttatttgctcaataaacaaaatcttaggctgggaactgaaggtcagcacragcagcatctgcgggtgtgcaccggggctctggggccctgtaacatttgcgcgtgtacctgggggaaggggtgctgcatcggcccgccccccgcagccacccgccgcagcagtggtcaccgagtcrgggtgtggggaggtggaaatgaaatgcataattcataggccgctgtggtgtccagtctgtgggaggggtggtaattacagaactgagaaatgaggctgcagcgggcaagtcacctctaggttagaggctgctatgatagatggcctgcattgttctctttctgacctttttctgaacttccccttagaagaacagaggaaatatggtgctgccttttcccatattgtttttgaataataccttcagacgccagcttttagagtttctgttcttccgtttggggttttgcttccccctccacccgcccaatgccttgcttctttccatagaaaaatcgaatcactaatgactttatcctagtattaatggtaaatacagactacacaaatatttgtccacactgaacacaatacatacggggaaaggaaaaaaaaaacccgcagcaccctctccctccttctgctccgccctccactgccaagcaagacaatcccaagagccgtcctccgtcctccgtaatgatgcagacggggctgatgagaagggtggggggcgttgctcggtaggaagtgatggaacctaagctctggcttgcagaatagaatcgttttaaccggacgtgaaggtgcaagcmggaatgatgctcactcccatgtaagctattgatgctatcccggggggataaagtaacaaggctggggactgtgtgccgtattcccttcatcagcctttccactgtgtaacccgaaagccgcaacgtcgtttccctccacgcttctctctgccgctagtgatttcctggtctgaactgtgactccctagtgatggcctgtaactttgggttctgtgatcatctgaagtctatcaacctctatatagtcagggaaacccagaagagggaagagggaagatttctgtttgattttcacacaagcaagacttactaaagagttaggcagaattgttcacttagccttcaattcaaaattgaatctcaggttgaaactttggggtatgtggggttgttttgttttttgaaaaatgtaccccttttgaggccaaatgaaaaggaactagacagttctgtgtcagagcctttcagactgggggtggaatttggttagctccatttagcgggttaatgttgattgaactcctgctgtgtgcatcaccaccctgagctgtgtggcagctgagcacttccctgggaagcaaatataggttctgtctcctcaaggaacttttgatctcttgggggaatccaggacaagcctaaatacaaccatacaaagacctacttacacagctgacactacagagacaggcctgccaggcaggccctcgctgatttccagtgatgccacaaaacttttcttccttggcaaaaaagaaactaagctgttcataccaatgatcactgtcattctttcaaacatctcacaggtttttttatgggtttaattgcttatgggttttttttaattgaattttcaaaatctccctagctgcctcctccctatctccacttattctctcttcttcttcaggtaggtaaatagtatctcctttatcacctgcttttcacccactattcctcagcatatatatagatatctagatagatagatatagatagatgatagatagwtacaaactccctatgtcaagcttctcctattaaaaagtggagctttataggtttctattcacatttcaccattgaaatccttattatcagagaagaactaaaagagccacttatttccttaaaagtaaataaacagtaagaaatcccagttttcacttcttcttcacacaatcagctactcagttcagcaaacatctgtgtattgggtatttactgttcttagcacagtgcttggcggtaggaaagaagataatgaaaccacagcttcttccagctcatgagtgtgaacaatgacacccaatgtctgcagacaccgaccctctyaccccagtagacaaggctgtacgctgggtgctgtgaggtgtacagagatcagtcatgcacaggccatggcctcgggatgcttccagtctaggagctgattatagatgattcttatttaaaaaaaaaaaaaaaaactatcagtgcaaggaygagtgaaagagctgaattggcagtagagacatagttagcgttgtaggaatagagcacaggagggagcctcagtcagcagggagtgctagagcaggtaaggtttgagtagaaagcttcaaaggctttccatgagagccaggccagacatgctttccacagggccactgacagaggtgcggaggggaagcctgggtgtgctcagggagagtctgggaccaccaagagtctcaggtgctgcctcaccgcccctcactctttcttctctgacttccctcaagagtccctccctcccttcctcctgccttcctttcttcccttctccacccaaagccccagctgatgtgtgacagctccctgattccataagctggttagctcagttggctggagtagtgtttggggctcacgagaacaaaatgagcattctcatctcttttgctgaatgttgctcygttccaaaggcactgtaggagagtccctgttcttggactacaaagaggccccattgttaggataagaaaactggttawtgagaagatggagcagtggtatcctcatctgaaaactttcttttctttctttccttttttttttttttttttttaagacaaggtcttactctgtcacccaggctggagtgcagtggcgtgatcacagctcactgcagcctcgacttcccaggcttatgccatcctcttacctcagcctcctgagtagctgggactacaggtgtgtacaaccactcctggctaattttttaaaaaattttttgtagggacggagtcttactatgttgcccaggctactcttgaactcctggcctcaagtgatcctcccgccttggcttcccaaagtgctggcagtgcatgggtgagccaccgcaccagccttaagggaaccgtttgttcccttacccagtgggtcgcgtccctctgtctccatggaagttgaaggttcaggtggctttccgagcctgtgtctgttgcacttcagcgccccctagtgggaggtgtaaagagccagcttagtatttcctctgtgacccaaacacaagaaggcaaactttggtttggtttggtttggtttgttctttttcagctcctttaagaaaagttgagtgttggaaggtttcccctgagtaagctgcccttggctggagacctggagtttatgcccattttgtttggcaagatcttcttgttcctaactcctgctggaataaccaaccagtcaccgtgagagctcgctcttgtccggaccacagcaggtcctaaccaggagtgctgtgagcagacgggccatggccacatttactctgtggatgctccctgctctaaaattgggtaaaaaacataccctcagtgagtcctgttttgctggtttgatggcgtgcacgtctccagagagcaaggccagcctcatccacctggctcccctcaccgcactcacacctgcctgcttagagtcaggccgcatcctgtacttacaggatcagagcctactccatcggccaggagtagtggctttatttggaaagttgcttaggtagggtattagtgggtttcggccctgctttctcagtagttttccacctaacacacagtgcagtgggggagacctcctcagacgatacctgttttattggaatatcccttaggctgcaatggaaattcactctctaacttgtgtttgacatttttactgagtgggttccttttcatagctcaagtttctggcttctgttctcttaattggtatgtctccggctggtgacactgaatgtatctccctttcaaagaaggagcaagtttctgtcttttatcccagactgtcagccataaagactgactgtgacttagctccacaagccacatgatcagatggtgctgtaaggaaagaaaataccccaaagatgagccttgtctatggcacagtcactcatctgagagttggggattcggggcttctccagtggaggcactgggaaccttggaaaggaaagcatcgtgtttcttctgcctgttgttggttcattcattcatccagcaaacacttattgaggcctcaccatgaaccagtcgaagctaaatgttgaagcaatgagaagttttgcatttaaatcagtaaagttgcacataagtgatgttactttcttagtatgcatccatctagagtagagggtgaaccttgaattaatgtgttagtgtggaagagaccagccttttccccagcctcacatctcatgatcactataagtgggtaacatcaccaggctgaataaagtgaagacrccacatctgcagttgatccacaggaattgaaattccaaatcccttgccagtgcagagaaaagaagagtggtcccagaaagctgaaaagtgacagcaggtgacagtgggacttgggttaggccttcccagaatcagcaggcttcccaacacagctctaaatgcccagtttcaaccctcggcttcagtcaacagactaacaatgaatcggaagaaaaacagtcaacaaaaggatccatgatgaggaccatcataaaagaatggctgaggcctggctcctttctcagccactgtgttgggattcccagcctctggcctttgcgctcacctgggcaggagcctcatctgagcacagtggcagagcacagcgaggcatgggggctgccacaccgatgtgcacccatacccaggcttgagtgtgcaggctgcatgtcacctcccacacatggtgacttcagagcccctttgaggaggagggacagcggatgggaggaaataccacagggcttttgtgatgttgacagtgctctgtttcttcacctggctggtagtgacactggtctttgttttccaataagttgttaaggtatacgtttttgttgtatacttctttgtatatatattctctttcataattaaaaaaaaagataaaaacatttaaaaagagcctggagcagtatacatatgaaaagattacatagataggcacctgcagagacacatggttccatttctctggctgataggtgcttctgcaaacatttgttgagcacattctttgacaaaagtcaccaagcataaagcgtggcctggtgacactgtagtctggtagagtgctgggaggtcagaacaggctttctccagcaacgcagagcttcatggtatagcaccagagaccagattgggggatattgggccacccaggccagggatgggtaaagcaggcacagcacgtgtcaggagtataaggatctcaggaattacagggcagcgtgagtatctttgaaatacttatcatggagtccaaactggttcttctaggaaccttcctcattgacattacaattcatagttttctttttttcttctttccttcccttcttgcttttcttatttcaccaagtcaagtcaatatcgtttaggtggatccatgtccctggctgtactttcttcactttattctacatgcacaagcacataaccacaaatttagaggccagtatgctctggacatctgagaactggtttccagtttgcaccaacatcaccagaagcctttggagattatattcatttcagttgcagatgcaaccttctcctctggcatgtaaacaagtgagttagattttggtgctacgcttagcagagttggagcaggactaagaacgaaggatcagtgtgaaaatgtgtgtgtgtgtgtgtgtgtgtgtgtgtatttagtacatattcagagccaagatgttcwctgccaatatgaatagaaaaaaccgccaatctgattctaacattatacagggaatggccagttgaatcaaggaagcctgcatcctttaagagactgtccaagtgtgccatgagaatgatgtcaacatctagacccaactgcaattatatcaacctccatatggatatgatggttcattctgaagtcttcagcacttgtattggtgatagctgaagatactcagttatgacagaatcatcagtgagggtctgaaatgatcctccttagcacacagttttatggacatcagtagcggccccttaggtagaaaatctctgcaacagtggttctacgtgtattacatcaagctgcaaccacccagaagtttgggtgtcgtgtctgtccccccagctctccttttggagttggaaccctgttsccttgcagcagctctccaccttaatttcttcagcttataaccaggcaaaagtaccctgctgcagagtgcacagagatcttggggtccacggtgtttggcttggccattccaaggatggctccgtggaagccagcgcaatgggtgggccccttgtcaacctcccccatgttttgctcctagagcttcatctctgggtccctttttccttttgcttgtctgcctatcaccctaatcaaagacaaaactatttctctttgatctcctgtttgcctaggaagctgtgtgtctttttaagaatccaatcacaggttgacctgggattagctcacctcaatggccatctacatctccacttggaccttctggatccccctaggcatggtgtggattcatcctgtggggaggctgcccctgttttcccagcaggcttgcctgtggtcacagggcgtgttgtctctccatgcagctgccccgaggtgctttccagcccttgcctttctggctgtcttctgtgcagctctctcttacctctggctccaattcctctgaaatagcctcctcctcctccctgctcttcagatttctgccactgtttcttgggtcctgtgctgcttcactgtaatccctcgcctcccactcccggtcaccagctcaaacagcggctcagagctcaagacagcaatgcaagtctccttatttttgcagtggaaacataagatttaacaacccatctgaaatacagttttacattttgattgcttctgccccagccatactgaggttactttcaatctacatatatttgtgggaacggactttttctctgcagttcgagtacaccttataataccagtgattataaaataccatggactaatagagtgtcttgcttccaaggagtttaaactgttttataattctgccaaccrtaatttatcttcataagctgccgtagagacaagagaaaaagtgagattaataatcacattttatagatggtgaaataaaaactcagagaaattgagtaacatttttccagaaatgcacagctccgcctgtgcgctccgattagcgctgcagatttattacccaagttcggagtggcagtgaaccctgcccttgttttrtcagtgaactrtgtaaatgagcaagacattgactctggtctcagacttgaccaaagtgtttggggtgagcaagggactataccctgaaccctgcgtcccagcccttgttgccgccgatgccataagcagacacagtaatacaggttgactctgcccaccggggtcctcagacccacgggaccaccctcccaaacctgttccccgggctgtgctccctgggcatcactctgacctctagcctggcacactgttaggactccaagcagcccaagcgcatggctgtcttttcagtcttcattgcctagtgtactgcatgtacccagcattcatgtgagatgaaataaaaggaacactaggttacggtagtatttctccacacaaggaagaagcaagaggattgtggatagggagttttattcctttttttttttttttttgagactgagtcttgcttgctctgtcacccaggctggagtgtagtggcgcaatctcagctcactgcaacctccaccttccaggttcaagtgattctcctgcctcagcctcccaagtagctgggattacaggtgcgtgccaccatgtccggctaatttttgtatttttagtagagacggggttttgccatgttgaccaggctggtctcgaactcctgacctcaggtgatccacctacctcggcctcccaaagtactgggattacaggcgtgagccactgcacccggccagggagtttttatttctaaagctaggtggtaggtacttcactgttggttatattaatcttttcagctttttgtgtaaataaatgaaacagttgtttagtgtatatgctttaatgtatttcaacagagtgttccatatcagaaagaaagtggctttaaaaaatgaggaagctgggtgcagtggctcatacccataatcccaacactttgggaggctgaagcggaaggattgcttgagctcaagagctcaagaagagcctgggcaacatggtgaaaccctgtttctatgtgcctgtggtcccagctactcaggaggctgaggagggagggttgcttgagcccaggaggtggaaggtgcggtcaaccaagattgtgccactgcactccagcctggacaacagagcgagaccctgtctcaaaaagaaaaaaaaaataaggaagagggatgatctgtttatttcattgctttcacatggacttagacgtgttatagataagtggtttagtattgttcagctgactactctatgccaggcctctgcaaggtgcccccctatgatgctctgtttaacctagtcttcatacctgtacccagaagtaggtacacaaccagtacctgacagggctgggattcaacccggtgaacactgggatcccaagtgcgggccacgccctcttgacttctgcagcctctacacctccactggaggccattcccctgcagggtcatatgatctggacatgatctgggaatgcttctcagtgtgtgcagtcaagagagcgagtggagctaaatcatcaaagcttccatattgatggtgtccaaaatgacagttgtttttcctctttctttagaaagatagaattttcagtgtcttcctatgagaatgttggaaagaaattatccccctctttcttaggtgcagattttgtctgacacttcatgtgtgtttaaagtatttttgatgtcccaaaatagtaatgaggcgattctttaagatggttccatggggtggagctgtagcagtgaaggtgaggaagagcaaatgrgagatcagttatgacagaacctggaaatgctcactcacagtattcaggaaccagcagccctacctgcctgaaaccgaaccgagaacaggaacagcccctgtggaagcaaccgacatgtgatgatcaacccaaaaaaccatgtaaactctgaaacagaaaggccaagctgtctgcctctcacataggaggtactgacaaggtggcattgccagctccagggaaaactggcaactgctgagggtgtgcacttgacatagactcattccttctacaaatgtgtatggagcacctacatgcccaggctgcgtgctaggcgctggagatacagcagtgacatgggggttgggggacttgcgctgctctgtgtgtggtagccacccctgcctggccacttactaaggctcagctcagactcctcctgggaagcccatcctgctttctctctcctcctccaatttcccccatctttgtgtactatgtacacacttcacacattgtatgtcagatgtcgctatgctgctaccttggctagacggtgaactcctggaagagctgcagggtctggtttactttttgatctttagcacccagcacagtacctggcacagaggaaacacttagtaaatggtggttgaatattctaataagtgagtgaggacagcttgaaacaaattctggctcagaatgactgtcagaatgagcttccctgaagattaagcatgctttagcaaccatccaacatgcttcaggtgggctggatgaaaagaaacattttagacttgactttgaacttctaggacctcagagccttatagactagcagagcagggggacaaggcctctgcaagatcagatcccagcaaaatggtctgaagtccccaaagattcctgggggccaaatggggaactacctcccttacctgagggtttatgggctgggtgttgagcagctgtttacgaagcagcttctgtgtgccaggctgaggatcaaggacaagtgagatgcagaccctgccctccaggaggtatagtagaggcagatatgcaaacgtatttgtgtgtcaaaaatgacaattattggctgggcgtggtggctcacgcctgtaatccagcactttgggaggccgaggcgggcggatcacgaggtcaggagatcgagaccatcctagctaacatggtgaaaccgcgtctttactaaaaatacgaaaaattagccgggcatggtggtgggcgcctgtagtcccaactactcaggaggctgaggcaggagaatggcgtgaacccgggaggtggagctggcagtgagccaagatcgcgccactgcactccagcctgggcaacagagtgagactctgtctcaaaaaaaaaaaaaaaaaaagacaattatttactctctttctccagaacaagaatgtttagtggcttgctttgggaatgttggaaaggaatgagtcctctttcttaggtgcagattttgtctgacacttcatatatatgtttaaagtatttctgatgtcccaaaatagcgatgaggaaattctttaagatggttctgtggggccagtgggtgctcagttagtatttattggaccaatctggtctgagtatgtcattgatctttgtatgcttgtcacctggtagagccagcacagagacagtgrgcagtgtctgtttgaataaggaagaatggaagcgggcagggaggggrgcaggctgtatctgaaacatgtctcatgagtgcagagaaaaggctgcacccttaggggtgggagagggatccagagtggattggaaaaggttaaaaccaaaggcaagagagcagcaggtggctgtagtgaggcccagatggaagagcatgtgatttcgcatgctgcagtgggactgcgcaggataaagtcttcaacataagagctaaggtggaggctctagagggcgtaatgacaatggccataaaataagaggtttgggctaaatccctgaggtcccaagtcctaaccctgcatgagccaggtgccacttctagccctcctgttcctcctccctgtcatttttgctgtaattcttttgttggccacctgcaagtaggtgtccttggcactcctgctgtctgccctgctgtggtgagtgtgagccgggttgctcgtgcccctctctgagcctcagcttctgctcctccttgggctaaatcctgccccctcatgcccaaaccttgattgctgcataatgattcagcccttctactctcttttatctgcactgccttagagctttgtcttaatccatattttaacactttcttatatttaataaaggtttatttgatcaacaaatgcttaatgagtggctaccgaatgcctgcgctgccctcatagacttggtcagggaagacagacagtgagcaggttaagaaagtgctgtgaagtggcatttatggcaccctatatgaagactaactggtgtcaagggaggcctgtctgtagcgtgacagctgagctaagatttgagggatgagaaggaggcagccatgtgacagccagcagggagagcatttaaggcagaagcaacagcatcccacgaagactctggctccaaaggagctccaggtactcttgcaaatggaaaggaaaccaacgggcctgcaacgtattaagctaggagagtggttggcagtgatggtggagaggtgggcagggtcccaatcgtggaggccccatggccatggaggggtctagatttcattccaagtccagtggggagcccctgaaggcttacggcaagggggtggggtgccatctgttccctgtggctgccatggaggaagtgggcacaaggaagggagagacaagtggaaaggctgcagtggaagctccaggtgacgcaggggtgaccagcgccactgctgcggcaggggggatggagaatcaggggctgacttgagactttggagctggccatgttagtggatagatggtggggatgaagaaatcaaacatctttcctggatttctgcctaagcagctggagggtggtggttccctttcataaaatgaggaggacagtggaaggaatatgtttagagagggggatcagagaatagttcccttctagacgtgtggaattggagatgactatgagacattccagaggcaataccaggcttccagaatgcaaatctagagccagaaggagaattccaagatggagacaaacctgggaatacaaatggaatttaaacctatggagcgagtaagatgactgtcagtttcctagggctgctgaaataggtaccacaaaatatctggcttaaaacaaaagacatccaaaatcaaggtgtcaacagggccatgctccctctgaaggctccaggggtagagccttccttgtctcttcctgcctcgggtggctccaggtgttccttggcttgtggcagcatcactccaatctcttcctcccttttcacatgaccatcttgctgctgtgtcagtatctatgtccagatttccctctgatatggatgcaagtcacattggattagggcccacctactccagtgtgacctcatcttagctaattatatctgcagcaactccattcctaaataaagtcacatgccaaggtgccaggaattaggagttcaacataacttttagggggacacaattcaacccataacaattatctagggctgggtggaaggagagaagacggtgggcttaggacttggccaacacacagcagttggatagaagagggcgagcctacaaaggaaatgggcaagccacaagcagagaggcgggacagatatggggagcaagcgatgtcatgaaaaccaagaataagtgtttcagggcaggaaggaatgatcacccgcgtgaaaaaaatgtggctcccaggtcacagagctaagaagttgatcaacagatgtgacagcgtggagatcactgctgatctcaacaagtgcagcgcgtcagtgacgcagagtgtccaactccaattagaggaagctgagcaaatgctgtgaggtgaagaggtgggaaccacagggggagatgactctctccagagagtgggccttgaaggggagctgagaactagggcagcagctgctgggagacgaagggattaggaaaggtttgtgtttggggcttttgttttgttttttgtgttctgttttgttcttgtgttctgctttgttttctaacgtgggagccgctagagcatgtggtgtgctgtgtcggctcgatttttatgtctgtgtctttctgtgacacacgttttgtattcgactcgagttgtcctgtgtgctttgatgtggctttcgcagcatcagaggccttcgcagacagtactgtctcccagccacctagccagatgcctgggcatttgttctttacggtcgcagcaggaacattctgcggcacgtatcatggtaccgtgaatggctgccatttcattttcttggtggactacaagcaattttcccaggccccgttcatgtcacgtcagtcgtcaaaatctatgtctggtgtttcctgctaaagaacatcactaaagtgcctttgtgtggccattttagttgttgcagtctgccttgttcatcactggggaatggaaactggaaaacgaggtttccgtgggttaggaacagccttccgggccatgagaaccacgtaactaacctgataggaagggcaggcccatagtcaagttcagagaagtcccctggggccagaccggccttcctaagacttacttgagtgtcaaacatccaaacctacagactggagcgtcagacttccaaacgtcaggctgcaagagggcaggggccagccaagaggccaggtgacaagaatcgggggacagaggtgagaatgtgcttgatccttgagccagcagtccaggccaaaactctcctcccatgaagaggcctagatccacgtgagaggaggcaggaggccacccctgactctagaacagggagggcagagagaaaagcaggttctgacaccataatactttttttggtagtgttcttttcagatattcccttcttttctggccaggtatggtggctcctgcctgtaatcccagcactttgggaggctgaggcaggtggatcacttgagatcaggagcttgagaccagcctggccaacatggtgaaaacccgcctctgctaaaaatacaaaaattagccagacctggtggtaggtgcctgtaatcccagctacctggaaggctgaggcacgagaatcgcttgaacccaggaggtggaggttgcagtgagccaagatcatgccactgcactccaggctgggcaacagagcaagactctgtctcaaaaaaaaaaaaaaaaaaaaacctgaaacagatagtcccttcttttttctaagggatgtgatgttttaaataaactgaaacgatctctaaaggcactgctagaggcaacctggcagtaatcttatcagttacacacaatgatgagtgaacctgggggccctggtatgtggccaacactgacacaggtggcctaggcaggtggtgggctcgtggtcacatggaagacaagggtgcagcagggacatgtcttggagccaccacaggcatccccagctcatcagtgccagtgagtaagagtggcccctgacaatacatgcgcagtccaatgtggggaccaaaggagacaaaggccaaagggggtgaagtgccaagcagaacactggcagctgaagacgcccagcagcaggcgatggggacaacggaagkttcattaaatagcaacaaggcaactcactccagcccccagcggtcactccttctgctgcccagaccggcaagtgtgactggtactctagaagcacgtagtagccagtacccagtctctagttgtgaggaaaggaataaactaaaatttttttttttttttgagacagggtcttgctctgttaccaggctggagtgcaatggtgcaaatcatggctcatggcaccctcaaactcctgggctcaagcagtcctcccacttcagcctcctgagtagctgggaccacaggtgcgcacctccatgcctggctttttttttttttctttttgcgacggactcttactctgtcacccaggctggagtacaatggcacgatcccggctcactgcagcctctgcctcctgggttcaagcgattctcatgcctcagcctcctgaatagctgggattacagacctgcgccaccacgcctggctaatttttgtatttttagtagagacagggtttcaccatgttgaccaggctggtcttggactcctgacctcaagtgatcctcccaccttggcttcccaaagtgctgggattacaggcctgaaccactgcgcctaacccctttttttttttttaagaaacagggtctcactctgttgcccaggctggtctgaaactcctgggctcaagtgatcctcccatctcaccctcccaaagtgctgggattccaggcatgagccaccacacctggccaaactccattttacttgtgaaaaatcagaacttggtaataagacatttttgggttttgtttgttttcttcttttcaatactattatataaagaaaaaagattagcaatgagaacaaatttaaagggggaagaggaggtactttttcagtagagaaaaattcagctagaagatccaagaccagtgggggtgtttctgatcgccctcttcctccccactctcatgctaggtgtgtgaaaggtaaccaagagaaaggtctccccagctcccttcactcccactccaggctgcagaaagggtaggaaagtagcctcttctaccatctcttagtgaagtggaaaatttatagagaaaacaaaaatcaggctaatgcatttcattatcagcagaatgccttgagctactttctttcttttttttttttttttttttttttgagacagggtctatttctgtcgtccaggctggagtagagtggtgcaatctcagctcactgcaacctccacctcccgggtccaagcaatcctcccgcctcagcctcccaggtagctgggactataggcacacaccaccgcaccctgctaatttgggtttgtttgtttgtttgtttgtttttggtagagacagggttttgccatgttgcccaggctgctcttgaactcctgggttcaagcagtccacctgcctcagcttcccaaagtgctgggataacaggcatgagccaccgtgcctggccttgagacatatttttttaaaaaaacataagctgtgttcatatctcaaactttgagcctggttttgtccaaaacatacccctacctaatcatgacagattcttagaaaagaagatgtacctgggtggtctctttagtgttgattaccaactccctgtgaaatgttctcttggggtttaggtgatttccttgaagggacagaactcctgcattcaggaacaggttgttcatggagtttacgctggaatcctggttgataccagactctgtattcatgaatggggttctataattgtaatattaggtaacttctaagaagattagctttttagaagctaataaaaaatagcaatgtttccttaagaaagtgtgatgtaaattcttaagaaaggataattggcataaacagatattggacttaatcccgttattttgggaaggggacagcttgttttacatcttcctgragatagaatacctcgagttaggtgtggttgtgcattcctatagacccagctactcaggaggctgaggcagaaggattgtttgagttcagaagttcaagactatagcgagctatgatcatgcctgtgaatagccactgcactccagcctaggcaacatagtgagttcccatctctagatagacagaagaaaatagaagacctgcgtttcagaactcctttgtaaaaaccaggcattctctgaagattrgtttcccagactttcagctacaaaagataacttcagaatatctctaaaatggttgttagctcatctgattggcgtgtgaargtaatgaagtcagtagacgtggttctctgtaggtgtgttctaaacacacagacttatccttcatctcagccaaccttccaagtgggccctccactaatggaggggaccaagccaaagaatggaaggattgttgtagcacagcgcctctcctgagagccacaggcccttcagaggaggagtcagtaatggcaccccaggtttgaaagatagtrttcatatagaaacagcttcctgcatttccarcttrctaatggtttcttccattcttccttttcagggcccctgagatcatccttggtttaccattttgtgaggcaattgacatgtggtccctgggctgtgttattgcagaattgttcctgggttggccgttatatccaggagcttcrgagtatgatcaggtgggtccagatgacacagatattcacaagacctcattcttcatctggaaaatagcctggattagcatttcattgattacatgacaaatgggcgggactgtggaatgtcacgttgtctcccaaaccttgcttcccttaaccttgctattttttctttattcctttctcttttycctttttcttttttctcttttttgttaacttctttccctacaaaaattgtcattttcatttttctcaaagccagcagagccattagyataccatatgtatagtgacaggaaaagccctgacctcattcttatcttttcttgcagattcggtatatttcacaaacacagggtttgcctgctgaatatttattaagcgccgggacaaagacaactaggtttttcaaccgtgacacggactcaccatatcctttgtggagactgaaggtaggaagagcgtctcctccactcctcacagtggcccagcgcttagggaagagggccgtagacccattagtggggagcttttgattcagtcagcaaaatgagggcactgggggtgctgttgttaatacatggyrtggctgaatctgaatgctcagaagcccctctttcccttggcctatcgccgcctgtgagagtccaaccttatgattgctgaactcccaggatttaatccgataagccttgatgactgtctgatttgtgctagggagagaaacgaaccccactctgcccttgagagctggcagtccagagggagacaggaccatgtgccacaagctcccgcccactgtagtaagggccctgttcctggtcaagaatgggtgtgggtgccaagaggaaggagcatttaattctgcctgcagcagaggggcaaggaggagcatttgaactgggccctaaagaatgaagagggagcgtggtggctcacgcctgtaatcccagcacttcgggaggctgaggcgggtggatcacttgaggtcatgaattcgagaccagcctggccaacatggtgaaaccccgtctctactaaaagtataaaaattagctgggcgtggtggcatgctcctgtaatcccacctactcaggaagctgaggcacgtgaatcacttgcacctgggaggcggaggttgcagtgagctgagattgtgccactgcactccagcctgggcgacagagtgagactgtgtctcaaaaaaagaaaaggaagaatgaagcgggtttgcccagtatagaagtgtggggtggcggctggggtgatgggggttagggagaggggttccaggcaaaggaggctgcctggtgagcccatgggaatatcctaaggcccagggaggtgtctggttcacacaagtaaccataaacctgaaactccgggggcaggggcttcactttaacagaaacatagtttgctttcactttgatctgtgcctagcaattaaaatcaaagtattttcctggtaaaaagaaaataataaagtcttaaatatgtttcattttaggtatttctttttttgcagcagggtgggtrggtgtttgttttgttgttgttttggatttgtttttttaatggaatctgcagccaaatcctaatatggtttaaagataatatatatccagtagtcacaaaagactgagaaaagagatttgggaactgagcaagcactcaggctattgatgggaggcctggcatttggcaactgtgagggtgagtgtcaaggtcaggtccagtaaaaagagtcctccggtggaggagggtgaggctggagtttgctgttgtgttttattgaagagcctcagtcccacatgtccagctgttcccaggacttaagccgctccaggtgtgctgtccttgagtgagattttgaagacgaattacctctggattacctcatggatgagtacagaaatccatagtaattggaaacagcagtatctccagccatttggggaatgtaggtctgtgtctcagccaccaatagaggggcagcccagccacaaactctggggccagctgccacctattggccatgtgaccatggcaagtgcctggagctttctcttcctgtttccccatctggaaaatggggatagtaactgtgctacctaatgtggttgtcaaaactattaaatgaataaatgtgctttagaacaatgtctggcacgtagcaagagctatgtgcataagggtttattaaataaaattggaaaatgcatgggaaagccctttgcttttccacaatggaatcttgccttattccttagactcagagaaggctgtaagctgatcgaggatgtggcatacctygatcagcctgtggtatggagcaagactgctccatacctgacccggagccagcccctgacacgtgtgcataggaaggaggagggatgggttggtgtggatgaagagagaagggaattgcaggtgtgcaggtcattgaagaatcaaaatctcttccgaaatgtgggaaagagaccctctgtgagacacaggagttccaaggcttgagtcccagtgatgaggagctaagtcacrctaccaattggcttttgcctctcttgacagacaccagatgaccatgaagcagagacagggattaagtcaaaagaagcaagaaagtacattttcaactgtttagatgatatggcccaggtaagcttcatgggtgagtatgcaacgtaagccctttaaaaccaagggcagcaagacttctgcaatagtaatagaagataatgggttgaaatccacattattcaactgcagtggttgaccttgaccttaaatagttacagccagtcttagtaagaataccatttggtgtgtgaaacatttttaaaacttcataccagctcctttaaaatcgttccagttggccaggcatggtggctcatgcctgtaatcctagcactttgggaggccaaggcgagtggatgaccttaggtcaggagttcaagaccagcctggccaacatggcgaaaccccgtctctactaaaaatacaaaaattagctgggcatgatggtgagcacctgtaatctcagctactcgggaggctgaggcaggagaatcacttgaacccaggaggcagtgagccgagatcacaccactgcactccagcctggacaacaagatcaaaactccatctcaaaaaaaacaaaaaaacaatcattccagtgtattggttcccagttgtaatatagtactggcctatctgcctgatgttatcatgagaagaattccagcccattagtacccatgggtttaatgcccataatttagtgtgtatgtttcctggggcagccgttagaaggtgccatgaactggatggcttaggacaacagactttcattcccccacagttctggaggccagaaattggaagttgggcttcagcaggcccatgttcactgtaaaggccataggggaagagcatccgtgtctgtctcccagcttctggcagctctggcaatcctcagcgttctttgacttgtagctgcatccctctaatctctgcttccttcttcacatggcttttgtcctgtgtctcctctgtgcctctgtgtccacatctcccttgccttgtcactgggcccaccctaatcgagtatgacctcatcttaactcaatttgattacatctgcaaagaccctatttccaaataaggtcacattcacaccaactggggactgggactttaatatatcttttagagggatacaattcaatctgctacacagtctcagctcactggcagggaccgcaggctctcacctttgtgccccagagaaaattctagaacttcagctatttttagtgtgaaaattagtctgaaaccagggcaacccaaagtgagttttctctttaaagcaatgagaaacaaagctatacaccagtaaacacttagcacccctcttactgtagatgactataaccaaaaatcatgattctgagtaaagtgtgcttgtcagttgattagcagcttagattgtctgagaaaactgaaattggtttccagaccatgtcctggaaaatacagaaatcaccacaaaacaagccttttaaagtcgatcctagtatagactcacccttggaagaaaaatcctgtgttcagatatcctgcctgtcttggccagaggtgactccattgaacacagggactaaaataattctggccctaactggggaacccatgagaaggatgatatgctgtaggtggaggacgggcacactcaggcccttccacttccctctaaaggttaaatacatgcatacatacatacatacatacatacatacatacatacathgacttttttgtatcttatttgtactgcttggccgtgactcttttttaaaaattgtggcaaacacacacatagcataaaatttatcatcttagcctttgttaagggtacagttcaatagtattaacactcccattgttatgcaaccagtctccagaactcttttcatcttgtggttatttttaatgaggagtgatgaaagctgcatttcaacttaactgatgaaagcaggagcagtttacatcctgtcattcagatatatttgcaggtcccagcagcagccctctccccttcctggggcacagcccctctctgcctttcctgcagagagaaaagccacatcctgtgggcaatgacaacatgtgggtggtgcctcccataggggcagagtycctgggaactgagaaagggggcttgagagatcaggaggaagttacagggcaaaaaataaggggagccaggagaggggaggcacgctggggtcttccttggtaacctgtccttacttgcgtccaggtgaacatgacgacagatttggaagggagcgacatgttggtagaaaaggctgaccggcgggagttcattgacctgttgaagaagatgctgaccattgatgctgacaagagaatcactccaatcgaaaccctgaaccatccctttgtcaccatgacacacttactcgattttccccacagcacacagtaggtgtcctgcctgatgcttcgtaccagggatcggcaaactttaaaggcccagacactaaatattttaggttttgcggccataaggtcttggtaacaactactcagctgtcactgtagctgaaagcagccacagatgcaatacataaacagatgagtgaggctgcattctaatgaaacatttatgaaagtgggcagggctgggcgtggtgtctcatgcctgtaatcctagcactttgggaggcccaggcaggtggatcacctgaggtcaggagttcgagaccagcctggccaatatggtgaaaccctgtctctactaaaaatacaaaaatcagctgggtgtggtggggcgcacctgtaatcccagctatttgggaggctgaagcaggagaattgcttgaacctgggaagcagaggttgcagtgagccgagatcgcgccattgcactccagcctgggcgacagagcgagactccatctcaaaaaaaaaaaaaggaaagaaaaaaagaaagaaagtgggcagtggctggactgggtccctggcctgcagttggcttcacactgaaaaggagggaagaggagagcacagagctggatgaacctgactctgggtatctgtgcaggaagagaggtgcccgaaacggtagtctctgtagcgcaaaactagtctcagggccaaagattgctcccagaaccttcccagagtggacccagtctagtttgggtttggatttgttcattcatttcttcagcgtgctgtgtgccggggtacagtggtgagcagagcagacggccctgcccactggagcttgcagtccgtaagagagagaatggtataaaacaagtgatgcccaaatcaccaggctgctatgaggacaagtatcaggtgtgatgagagcatacccacaggggagcctcattttggggcaaaccaggaagactcccaggaagtggcctgtgaaggatgaggaagaggatgggcatgagcaggcagggcattgcctgtatggacaggacactcccccatgggcaggaccatgcacccatcccagaaggcagtaggtgagacagtgaggcatccagtcagccagggcaggccgtacatgttaaggtttttaatcttgatccaaaaagcaatgggaactcattaaatgattcttcagcaagggaatagctggttagatctgtgttgagcaaagatctgtctgctgccacacaagtcaaatgagtctggaaaaaaatgtccattcggtttaacaactcacaagttgtcagtaacgcagtggcagccattcagtggagtggtaaaagcagaaaccagtttaccaggttgaaagaccaagtgagaggtgaagaaatagcaacctttcatgaagtgaggctatgcaagagaagaaatagaggggtgactggggaggggtcaaggggattgtttttaagacagggttcagagcacagggatgggccagtgtcattggaaggatagatggacgaggggcatgtggatgtcagcgtatgtgctggtctcatggagaaaagttgagggagtcctgtcagacagcttctgcttctcagaagtaggcaatgaggttatctgttgagaacgaggtggagggtggtttaagaagggtagaaagtttaggtagctggagcagaaggtggcagagcaaactgaccagagaaatacggtggaattgttgagccctgaggttcgacatgaatcgtttatagtgtaactcatctccccaggtgaaggcatagagaagacagatgagtcttctgatctaggtttgtccaggtggaatttttgccaggctggtaagagaagaagacagattgacaaggaagctgatgaggctagccagagagtaactgtaatccagaatgatgtctattggagactttgcccaaagggaaaggaagtgaagatgggaggggatccaagtaaacgtggtgttctggtcaatgcagagaagggttatcatagtcatagtggaatgagccagatggaggaagaatgtggctgggaaaacaggatgcttaaacttgtagtttctggaggtggagcaatttcaggtttgacggtccagggaatgagtggctgtactgggttgagaacaagagtcactggacatgagaagtaagcgggaagccagggtatttaaaaagggacctgtgacttctgaagccttcctagcgaggcagggaatggcttggagaggaaggtccagccagtggcaaaggcctcagtgaacgaaggggagaggaaacgaagtcatggccggttgcagtggctcacacctgtaatcccagcactttgggaagccaaggagggcggatcagctgaggtcaggagctcagaccagcctggccagcatggtaaaaccccatctctactaaaaatacaaaaattagccaagcgtggtggccgcacttctgtaatcccagctacttgggaggctgaagcacaagaatcgcttgaacccaggaggcggaggttgcagtgagctgagatagtgccactgcactccagcctgggcgacagagcgagactccgtcaaaaaaaaaaaaaaataggaagccgttggtggatgggaaggtaatggagggtctcacttcagcctctcaaccctgaggtacttgggatgtaaaagaataaataatcacatcctacgtctgcagggaaaaggggtgtgctcaagagagcagcagattctataaggatcaggaggggaagggaatcctgtgagaagagcctggagatgtgagaattgtgcgtatcatggcgggccctgctgtctccagagtcagagggggctgggtctcaaggctggacccgcccctttctggcctacaggaagtgagtgggtggcaccaccatggatagtggggcctccatttcatttctgtgccttactatcagtgaagcaagtcaaatggcattgcaacaaacagatagtgcctctttaatgtaaaaccatgcttgaaacaactgaactccggtacaaaggaatctggacccatccctcccctactcttgttatgggatttgtcctttttttcttttttttttttttttttttgaagtagagtctcactctgttgcacaggttggagtgcagcagtacgatctttgctcactgcgtcactgcagcttccacctcccaggttcaagcgattctcctgcctcagcctcccgagtagctggaactrcaggcacacgcaccacacccgactaatttttgtatttttaatagagacagggtttccycatgttggccaggctggtctcgagctcctgacctcaggtgatctgcccgcctcggcctcccaaagtgctgggattacaggcgtgagccaccgtgcctggcctggatttgtcctgtttctgagtgccataggggtcagccacagagctgtccatctgtaccacaagaagaagaaaagcagacttggcaatttactggatagggctcccatgatttcagtcttttgatatcacgggtaaaatkggatgactgagaaacagctacggataggagactgaggataggggtgccctctacagaggtcctcttagccgtctgcaccaaaacagtcagatagtcacccccataaagcctggggctttaatgacctcagagtccttccacctctgggttctgtaaggaagaatcagtagagtgtttcacggcttggtcacatggagaccgtgagcatcagcaaccaattcagaacttcatctgggacccaagaggggcactgacaagtcagaactcagaaattagcctaagaaggaaaggtgggtctctgaacacacctaggcttgcctgaaagtaggcctgatccctaaagttctctagaacttgctgggaaaaccttgaagaactccagggcaaggataaatctccaggcccatgcagctgtagcgccccygccctgggagctgagccacagctactggattactaggtgaaacagaccccactcctttctccataccaggattccagtgcacaatttttaaaaaaccaatcttcttataaacctaaagtgaaaggacttgccctttcctaaaacccaaaacttgaaatatttcagttggaaaattctgaaggggtatggaaattttgtgttgaattgtcacgaaaccaaatgctttaagcccattccaaaaagaatataaaatgcattggttttatgctgcagcctccacgcacaagaccttggtacttagtaggagctgaaaacacactggcattaacagcattattaggagtatttttacctactggataccgcagaatatgttttcttttctcttcagcatcatcagtccgtaaatggttatgtcgtgtgcatgacgcagccagtgtaagtggtcagaatcttagaaagaagtaggactctctaagtcgcgtctcagtcagtcatttgaaacttggaatgcatttttcacaggatgtttgggaatagcccacagacacctgcttagccccaaagatagcatacccacagagtactgaagtagtacacgtttgtaatcctaaaatagtagaaaacttttattttactcattcagttattacattttttataattaaaatagacattttgagttgaaaattaaatgagttttttttctttttcttttaatttttttttttttttttttcctgagacagggtctcaccctgtcacccagactggaatatagaggcctaatcatgactcactgtagcctcgacctcacaggctcaagtgattctccgacctcagcctcctaagtagctgggaccatgcgcacgtgccaccacagccagctaatttttatattttttttgtagagaataggatctccctatgttgtccaagctggtcttgagctcttggactccacccaccttgacctcccaaagtgctgggattaaggcgtgagccaccccacccagactaaaagggattttattatcttgaatattagcatttgaggaaaagtaagtttaactacaagaaatgaatgagaagcgctgtataaattctgaaggacactttttggtcgattttcaagaatttgggtggctgaagccacttgtggctttccttttccctgatgctggtttcagcaccacttttatactttacttttgtagttggggttttgttttgatacacagatgcaatgggggaagaaaaggagaaaatttctatttcatgtagctggacaagacttagacaagaaaatgaaggctgaagttggtgaaagaggacgtatgtgtatacacgaaggtagccagtgattacctatccttggcaaactccctacctccctaagcttcagccttactcgtgaagtagggacgagaatcatgtctccgtcttatggatgttgccggaccgagtgagaggttgcagagtattattattaggacactaataaatgttaaccactattattaattattagtattattactgtttccattacctacctgcacaacccctgtgggagaaagtgtggcaatagggtcaccatactgggttggagagttccttggccgtcccctaggtggtgctggtgacccagggtagctgaagcaggtgactacaagggttgtctttgggaaaggtggaggcgggttataagtgactagttaatgttcccattcagagagcttatacattggtttgtgggccagaaaccaggctgagagttgagaatgagcagtgatgctgcaggtggacctgatgtgagaatgcagtgtgagcagtcagttttgttgtgatatatagaacctatatggagaaagggtagtagggcaytggagaaaattcatctgaataaccgtgcctgttgcaaatgcacaggctttgcacaagcaatccaagaaacttagacctaaagtttagtttccctgcttgtcctgtttactgaattaacccttctctcctttcctttgttttctccccttcatcccacgttaccctcttcccctccccttatgtctcaatatgcctctgccttttgcatgaacagcgtcaaatcatgtttccagaacatggagatctgcaagcgtcgggtgaatatgtatgacacggtgaaccagagcaaaacccctttcatcacgcacgtggcccccagcacrtccaccaacctgaccatgaccttyaacaaccagctgaccactgtccacaaccaggtaagtgggaaacagaagggaaggagaggcggggctgcacagtgtgagcctcagracttgtattttccatcatacctagtcaggaggcaaaattcctgctgtcatrttcaacaactaawcaaagtatttgcatccaaggttatttcctttgagggacccaggcacattttgtgttgacttctggccccattgacaggtcccagaaaggactggtgagggccattctttctgagatggttccccttactgctttcctctgtcctgatgtgggaatagggggaagggggtgctatgatccttttatgcctgatatgtgmctggtaaagaattctagaactggccaggcacagtggctcatgcctataaccccagcactttgggagttcagggtgggaggatcacttaaagccaggaagttcaagagtagcctgggcaacacagtgagacgccatctctacagaaaatacaaaaaattagctgggtatggtggtgcatgcctatagtctcagctactcaggaggcagaggtgagagaagtgcttgagcccaggacttcagggctacagtgaactatgattatgtcattgcactccagcctaggggacagagtgagaccccgtctcaaaaaacaaagaaaaagatcatggaaacatggatttaatctaaaaaaaataaagattctagaactgggaaggactcagggaatcacccagttcaggcccttcccctcgtccccacatggctggatctacctgatctccttttgggacagataaaccctgtcctttctccgagtcatggagaaaatcagttcatcagcctgtcaccagaatcccagcagctggaactaaatgggatcaggaagctaaggttttcttcccacagatttccaggaaattggcagaaggagcagctaacatactgcttgaaacttggatgacacccaggcaatatttattgaatgaataatctccaagtctgagctgagactgcctctagtgtctaagaaactgtaactcctactcccatctttcaatcctcctagttcccctaaagaagggcccccagatttttgttcttaatatcaatctggaatgaaaagacttctgtgtggatgtgtgtgtacctgaaatgtgaataccttatgtccattctttttgaaaggtccctcctgtcactgaagagtcactgccccctgcttttcagccgctccccttcccacccttttcccctaggccatccttgtggcacattggcctgctcaggcctagcttttcttcccagcctgccatctccctttgcccaaattctaggagacaccacctggtatctgctgccctctgggggccgtttgcattcttgaagctctccttagggtgaaagagctgttgggagtccgaaaactaaccttgcccagccctaaggctaaagcatccatagccagacctgtgagcttcttgacaaaaatcagsatggttttgttcattacctccttgaagacatttgtttctcccaccagccctcatgaggcacctggtcttaactccctaaccccaaactacctgtccccatctaacatctgccccatcaggtatcaaaggcatctgtgaaacaggaggaaggagyacccctccaatgcaggcgtcatgtcaagtggagtctccccagcaggctgtccttcccatggatgtctttctgccaggctggagaactgtggtccctgaccagacgcggggtggggggccaccgccatcttgctggtgatatgacagccagcatatccactccaaagggtgtcgcaaagactctgcaaaactaaaagkgttgctcatcaaaaggcagttgtcaaataagaacacccgtcttctccacggcactgagaccatccagatctggcttgggactggggtgaagtaggagtagctggtaacttagtgtgatgcttgggccagagtcgtgggtaagggaaaatgacatcccacaaaagcaaagggtccaagaacaggatttcygttctcttgcaytggattctactactccctacttttgaatacatcaggaaaaaaaaattactcaggacacacctagccttaagcactaaggcatgctttccctccactgatactgttgttattaaataacatcattactaatagctaacacttattatgtgccaggctttactaagcgtaccataactcttaatcctcccagcaacgttgtgagataggttttattattatcatttccattttagaggaggaaactgaggcaccgagtgattaattctcttacccaaggyccttgctcgttcatgagaggtgggcttaggctttgcagccagcaatctggcttcagagtctggactcttaaaatatacatacacagcagcataagtaagtcttaagtaagtcttatggaggtccccaaatgcctttcctaggtgatgtctgctctttaaatccaacaagacttcttctgttcattgctggttctagtagctagctttctacatgagctccttggagctgtttgcccatttagatatttagaagcaatacaatatatgcatagttttatgttagaagttgaaggacattaaactacttaaagaatctcttgctacctttaacatatatccagtagactaaccaaagaaccatttcccaaatgatcatgaatctacaatcttttaggtctcaaggaagctgggtcaataattcataacccgttaagtctcaaggcagctgacttcctctactttctaaaactttcargttacccagttggtaacatgttgaataataagtcttctctcagctattccttgtttatcatgtggatcagcaacttctctaacatttccgtggaattctattatttggacctagccttctaccaagaatttgaatttgagtttatagaccaagctcaaaccccttccttctggaaccatttgaacgtctactacaactgcttccaggaatcacttcttccatttttggaaaacctgtgtcatcaataaacttgctttttcactaggcacagtggtgcacacctgtaatcctagctatttggaaggctgaagtgggaggaccacttgagtcaggagttcaagtccagcctgggcaacatagcaagaccccagtctctgattttttttaacttgttttttcttgttattactatctgtcagctgcaagagctcttcccagttctctgtgtgctcctctctggcaagtgataggctagctacctttctgagagctaaaggaggatatacagaagtagaaaactttttgttgccctcacatgggcttcttcaactggtccttaagcagggttcgaaactaggggaaaaccttatgcatgtctgatggtcacactggagactgggtccatatcaggacacaagtgccatttgtccttgagtctacagagctggaagattcagcctctcaaggagctcatggtctccatggtgagacaggctgtaagcaaaaatagtttaatcaaaatgcagaatagcatgtactaggggccaggtagacaaacagattatgtgttacagaatcgagaggaaggagagaccactgcaggctggaggaaaacaccactaagacacagcccctccctcccaggagactttaggctggaaagaccaactgtactgtaaggcagattgtaacaggagctgggctagaaggctatattgtactgtgtgatagcaaaggaaggagcaattcatttccattaatggtgtctgaaagggtttcacaatggggcatgtgggacccaggctaggccttaaagcccaaaggcttggagagaatgctatgggtcagagagcttgtatgaagggaaaggcctgtgctcacagtatgcttggaaaacaatgagtaaactaatcttggtgtcagaagagtggagagcagagggagataagtctagaaggtaaggttggccaaaccagggaaaacagggcactagaccaggcgcataccatgttcatcaagctgtaattgggattttggagcaggggtgctgacatgcacaaaggtgtcttgtggaaagaatgatctaccctctgtgctcaagaaggctggaagggaagtagagaccagaacatttctagtcagggccttataggtcccaggcaccaggaagtcacaactgaaaagagtcagtggattccagggacatcaggaaggaagcagcagcaggagcagtggctggcaagaaagtggaaccaccgagcasaagtttgggaacctagaggatacaggtgccaggacccccagcagggacacccacaggggctaagggctggggggagtctagatatgagcagaccatggggaatgtggagggttgagggggaagaagcctccggaagagawcgcgatatggagaaaacaggaaatacaagtcatgtcatctgacaaaacacagacactgatgcccacatatgtacacacgtgtcccaagcagactatgcgacgctgcaaaagcacacccactttaaaatatgtggcttaaaatcagacatctgtgccactcaatttcgtgattattttcaaacaaatcaatttgctttgcaatgaaatttagcacaaaatctaagtatagaaaacatatgtaaaataagactttgtcctttttatcaaatgtgacatccatacacaccctacttgaaattctatttgtgtccaagatatcttcgtggtttcttcctatgtattccctggtccttgtaacttctagaggcaaaacctcttgtagacagtgctgaatgtgaaaccactggtaaccacctatcttgctaaaggatcagtatgaaggctaagataggggaaactggagaattccaaagttggaatttattttccttatacagcctcatttttcatgcaagttcagtctcaagtgatgtctttttctgaaaaagaaaggcaagaggacataatgtcaatggcttgtgtttgtcaaagccacctccatttcagttatctggacacaccagcatcttttctatctgccaggctttgtcactgcataccaacatgaatgcatgggatgcagacacaaagccccaggctcarcatgtccctctccctctctgcatacatctcctgtacttctctaagctttgcagccatctaaggacatctgtaaacagtactgcccatagtcctgagcccctcctcggccctgctctccgcctgttgcatgtgctcctgtgccaagctctgggtactgagaccatagtcctttagggcctgcaagagcctccccctggatttgtcctcccacatgtggactgcacccaccaggcccgaggggagtgtgagcagagcttggacgtgcaggctggcaggtccaggcacccagagctcatcatgttgtgggatggaatggggcttgggcagagagaaggagggcaaggtccagctctctccctgtcaccatgtgtcagcacagaacccaaggaatcccatagtcctcaactcacgcctggtcttcccggttattgggaaggtgtatttgtcaaaatgaaaaggcagaacattttattaaacagttttctagcctaatttttagccttttcagcatttagacatggtagcaggcatccgtgtgtcctcttgtctgggcctcacaaatgccaggagcaagtctgaatgtgaacaccaaggtgactgtctcccatgttttcagggacctgcttttccctgcgactttcaatcgtgtttccactcctctctgcttttgcctttctgctcttagtttttgtttgtttgttcttctttgagttcatttatttgatttagattcgtgtctcccaacatgccacctccctcattttttatttttgtttatttttgtttaatccccatcactcctttaggctccctcctctaccagtgccactatttccttagccaatcccgaagtctccatactaaactacccatctacactctaccagccctcagcggcatccatggctgcagtggcccagcggagcatgcccctgcagacaggaacagcccagatttgtgcccggcctgacccgttccagcaagctctcatcgtgtgtccccccggcttccaaggtaagattgagcagccacagcctctcacctgcttcttacagaacggcctctggggctccggcacctgcagttttctgtcacgctcattttcatggagaaaggccctcctcatttcttccagtgagagcgctggtatcactgaactagagggctcctctcctactgtggccaacctagaaacaatagggcttatgcctcagcaccaagtcaatcctttgtgactctcacacctgccagggactgtgtccctggccagctgtctgtaaataagtacatagtttgtgctttcattgttatgctgatgtcagctcttgcttttcctcgcatgaaatatcctctgtgtgggttatctgtagaaaactgccaatctctgacagccgacatagtcccagctcccatgaagaatatccatcagtctgaaaagtacttccctgggacccctcctcaaaacaattctttggccatgaccccagcactcctctcctgtagactctaagaagctagactgtgtactttgttacaatttacccagaaagcttaagaatttatttttgcaagcctcatggtgtaaactgtgtggttacagtcaatgcaattccaaatgggttcatacatctccccaacacccctcattttgacatacacaggtacatcttgatggtcagaagcccttgttttcctgttgtaatctgcsagcatatctgtcctacttttggccttacagcctccttaatctgaccttctagcctttgaagacattcaagatttcaggaggagttttgttttttaatttgttagaagccaaaggggagacttccaaggaccaggcaatacctggttgttgtcagtgaccagtgcaaagggaagcagaaagttgacataactgcccaggaaggttcttttcatccagctgttcacagcgtctcagctaacccttctctccctcacactgtctggaacaggcttgcaggcctctccctctaagcacgctggctactcggtgcgaatggaaaatgcagttcccatcgtcactcaagccccaggagctcagcctcttcagatccaaccaggtctgcttgcccaggtaattctttctcctttattattactggtattaccattacctgtgttaatgttgttcacaaaagatatatatctccactccctctctccctagtaatgagttaggtgcttctagtcattggaatgtatctgtaatattctaaatggtccccaagtgaattaccttcctaagtatctgcttacaattccaagaagaaatttagatacagggagagtctggggaaattattattattatatctttgaaatgcaaattaatctgggatacctaggttttaatcctaactgctagtaacttgtctatgacctaaggcaagtcagttaatatctctttgcctcaaatttctttcttgtaaaatagaaatgagtttttagagccaaaaggagccttggtgattatcctctcattttatagttgaaaaaccaggctcatggttactgtaagctggaaccttctatctctgtatccatgtaggtgctctgatggtagaatgagatggcagagatgaaaaatggttgaaaatttgtaaagtgttatgtaaacgtaaggtaacagtagtgatgcaatgataacagtaacaatccttaatgacactcgaaccctgataacaaatacatcatcattataccagggcactttacagttgttaattgatttaatccccacaatgccacagtatttgtctccatttgacaaatagggaaactgaagcagaataacttgctcatcagagtcacacaacaattaggtaacagaaccaggacacacacccagtaagtctgatgccagcatctgtatttcaaccaccaagctatactacttctgtataatcatttctactattgagtagcttgacctaaatgttattagtttagaagcagctttatttttaaataaggtaggttcacaaaggcttttcccaaagacactatttgtcctgtcttgttaaatggaagttgtttttgttgttgtttaatttttaatttaaaaaattaaaaatttaatttttatgtaatcaaattgcgtaggtttgttctgtgctcttctattccattggcttctctaatatcctgttgtcttaaccattgtaactttagtctgtcttggtatctagtagggaagccctgttcccagagagttcttcaaattttccttgtctgttcttgtcccttcatgtttttaagtgaattttaacatcactctttcataagaattttagttacagaaaccaaaaatctgctttatatttactggatatacattgaatttatatttacttcaggaacaactgacatctttaaacgtgtaagtcatttttatccatgaacatggtataacactctgtaatgggtgtggtggtgcacacctgtagtcccaggcctgtagtctcagctactcaggaggctgagatgagaggatcacttgagcccaggagttcaaggccagcctgggcaacatagtgagaccccatctctacaaaaaaaaattaaaaattagctgggcatggtggcacatgcctgcagtcccagatacacaggaggctgaggcaaaaggatcacttgagcccaggagtttgaagctgcagtgagctatgatcacatcattgcactccagggtgggcaacagggtacgaccctgtctgtaaagaaaaaaaaaaattaatagaaacactttatcatgtttaagttttgtaatgaatattgaattatatcaaatgttctttctgtatctattaagacactcatatgctttttgttccttaatctactaatgggacaagttatattaatatattttgtaatattaaactacccttttatttatgatataaactccatttgctcatgtgcttgatatgatatgctttttaatattggattcagtttgtaagtactatagttagtatttttatatctatgttcataggtgaaaaatggcatataatttccctttttataaaatccttatctgatttgagtacaaggttacaccaggctcataaaatatcttcttcttgttgttacccacacgagtgggtttggtcacttgacaggtaccaacccaatgaccacagacaaggatttagcaaggggattgtattacttgtaacaagtaaggagaacactggagatagttcccaaagcagtgtctctgagcaaagggctgggtcaggttttataagcatagggtaatgaggcatgatctgattggatcttgcaacgaattgatatcagaggcatgatctgactggatcctgccatgcagtgatgccacagctcgatctgattggatcctggatcctgccatgtggtatccatttctaaattccattcactcgcctcaatccaggcacttaggttctgcctgttgttacatacctggttcatctgggcatgctcaggttatgtgacctttaacctgtggatccatggcaaatgaaaaacaactcacaactttgttacataaaagttgaaccagactgctgtggttacattattatctattctgttttccggaacagtttgtttaagatcgatatgaagtattcttcatctctgtgcttaggtccagaatgacactgtgcagttgaccactaacaccagtgactggtagcacacaaagttttgtcttattgaaagtttgtaaacagagaactttttgtatttaaaacaggccttctcttcgttcctctctctccaatgggtccttgtagcttccttttatttgcatagttcagtagcggggagttcagaaaaggccaagatagatcagagaaagaactacagctcagtccaggggcaaaaaagcttcttcatactttatctgagtggcaaaaatccacaccagtctcccagtgctccgcctttgtgagcccaaatctacagaactcacgtgtgcttttaaaggataattacagatcttttttatgtttgcacacttaaccctagtaagccaggagccatctctgaaagaaataataattagcatttcttattagccaaaatagggattcttcrttgttcagtttggtggaaccagtagactcagcagtcagaatttgtttcagtcctttaatcgtagcaggggagaactttaccttttgcttccttgaaagagagtccctagagtgttgtaaatctccaagtagatttaacctaaagctgtaattaggaaagtgaacaaaaaatacgtgtgtaaggattttaattgctactgtgtttataactgagattgttggaagaaacttgaatgttcgtcagtaagggattggttaaataagttgatgcacacgtaaaatggaacaccatgtagccattaaaagaacatggtagacctttgtgtcttgacatgcagagatttctaagatatattaagtgaaaaaaatcctgccctatccagtatcgtgttgtgtctttttgtcagttgctttttatttttctctctgcttgtcacttaatccatgccaatatgttagcctgttgagatgggctctctcctagatatttttaaacattcccttcaaaggacaaaaataagttaatttataaaactcttatggtggctataaaaaagcacaattaagcatttaaactgaaggcttcgtttttctacagttaaatttctaggcaccaggcagaggcattccaaatcctattatttgacataaatgtattcaaaaagttgacattgttctttttctctaaatactgaaaatcttttaaaggattttacttatgaacacttagagatggagtctttgaatccactcctcatgttaatttcattttctttgcccttttcctccccacctcccagcagcatcacataaaactttcagggaaacaggcctctgtggggcacccagaggatgtgtgcatggcaggtggaaatggtaatcattctgcttatgttagtgatatgggagtgatctttgtggatcaccttgcaacaaaagcttttttggtactgcctaaaaggagctgtcaactccatcctcccaagccccatgccacagctagcatcttggccaccaacagaaattgtgaatgagtaggtaatagtggagagatgggaagcacagttcttgattgagacagtattgaatttatctgacttgtcaaatgtcaggatctaaaatctcctttgactagcagggttagagaaatcactgtagactccacccttccatgaagtgttttgtgttcttctagccaatcaaatcatatcacctgaacctctttattttttacttatttactttatttcttgggctcatatttgaccaactgagcctttaaatgtttccctgaaaacaaactgttggcttgaaccctttaaactgttcgaaatacaaaattttaatgtttctcactcaaaagttcctctgataacattttcagcaaccagtctttccaaccattgtcctgctgtctgcctgtctcttgactggcacctgatattcttagagaataaggaagacttgttcatgccacctttatgcagttaccaccaatgcctgatcctgaataggggccattatttttgtgtattatcaacacaaggagaggtgtatattggctgaaagcatgggcactggaattaggttgcccacattcagatggctgcctcaccacttactggctatatggctttggggaagttatttttgaaatttaaatttaattccttttcaaagtaatacatgtacataatttttaaaagttaattaataccataaacttataggaaaattatagtcctctgctctatcccatccttaatgtctcctccccataacaatatatatagttacattatatatgtatatatgtatatatatacacatatatattatccctgttatatatatattttatatatataatatatattatccctaaaagtttttatttatacacacacacacacacacacacacacacacacacacacgtatttttttgagacatagccttgctctgccaccaggctggagtgcagtggtgcaatctcagctcactgtaacctccgcctcctgggttcaagcaattctcgtgcctcagcctcccgagtagctgggattacaggcatgtgccaccacgccccggctaatttttttttgtatttttagtagagactaggtttcaatgtgttggccaggctggtctcaaactcctggcatcaagtgatccacccgccttggcctcccaaagtgctgggattacaggtgtgagccactgtgccctggccataacgataatttttaacttaactgtttaatctgttctttaactctgtgtttctaaataatatgcttagactgctttttatggatttttttttccattttaggtattayccattgacttcctattatggaagatgaagatttagctttctaacccactgccatccccataacacacacaatttctctcctgttcctcctttcactcactcttttctcctattcctcccacataattttgattcaactactttgtaatatttacataattatcaatattatataatattattcttagttgagccttataatatactgtgattatgttttctttctaacacatctttttgtttttcctggagttaatgattgcctcatttttcccattgggttagttttctgtatatctcattatacagccccaaacccttccagagctataaaaggtttgtatgtttgatgtgttgatgtgtttgagcacactgatctcagtatgttgttttttctttctctgaaagcgactttctcctcatccacagtggactcacatttcatgactacatgccttcttttgggtcttttttcttacattgtcctgaacaccctatttgcccttttaatctggattttttttttcctttgataatttcttcccctccattttctctgtttctcctttgcagaattcttattaattgagtgttggtacttctaaattgatcttccgattttcttatctttttttcccctctatttcctatatatcctctgtctgcactactttctaagagatttcttaaacttttttgaaacctccttttgaatggttaatttctgttgttgtagttctcatttccaagagtttgttctctgctccctccataccaaaaaagagcatgttctctgaatatagatattgattctttatatgatcttgtttcatggatatattttttaactctgtaaaggcattaattatagattttagaaaattttcttctgattcccacactgtttttgtttcctctttcttttgtttgcttattttattctctttcaggttagaggcttcctttactgtctggtgwtcattagctattcattcctatttaagactaaagcactaaaaaactaattggaaacctggagggtaggggagagactattgaatgtgggcttctctatagactgaaaagaggcaagtccagcattttcactgacagatcccctgatccttaaatgtcatatctgtagttattttctcttggactagtcatttcccctagagagaattgtctagcctcctgctttggggcggggagtggagggtggtataagcatgtacaccaaggatctgggaactaaggggaaatgaagacctgatcttagattccttcagtctgttaattcacttagtaattgtccatcagtttttcagcttctaaaattttattcatggtgattgcctctctcctactctctttgcccttatgaatctgtattttttattcctttactatcattttagttgagtgtaaagaaggcaataaatgtatatgtttaatttaccatatttcagggcaagttattaatattattaacctctctgtgtctcaatttattaatcttagaaatggaagaaaataacagtccctacctcacagaactggtattaagaagtcagaaaaaagaagtagtcagaaactcatttatgacttaactctgtgtttggcacacaatatccattaagaaatgttcacttcattcttgttagtagtaataaattataaaaatgtctgatgaagcgttgtcacaaatgagccaagcatatcaatcagtgaaataagtcaaaaatagtctttctaccctatctctttgaggtaaaatgttaatatccatttcagggaaatagaagaaaaatgataaccttagcttgatatcaagatttattttttaaatgacattagttaaaactaatgcttttcatgagctctgaaatgagttccaattggctaagtcagtagaaaccttactgcaaacgaaattgttatttatttaatatttggaatttgcaactgttktaatcaattaaattatgtttccgctttctgtgagttaagtaaacctgaaatacaattaactgtagttaatagcgttggtagagttgcttctttcattttatcaacagatattaagcactcatggtatgcgcatggtccctgagcttctgcctatatcaaaagcaaacaaacagtatcaaaaacatctaagagattgcactgggcctcaggtgcaacatgaaaataacggaacaggtgaactggtccactcagctctcaaatgtgattctctcatttttataagcgtcaatgttttttaggccctgactcaaatctgtaatccatttccagaattgcgtatttgtacctataaaacacccacactgagcacatgcacagtttgtgaagcactgcattcgataaattacccaatgttagtcacatccactctgatagaaagagagatggctaagatatcaaacctttaaatatttgatctgtccaaaaggtattttaccttagtgactatgctttaagtgtccaactttaggcagtggtattcagtctgaatcatctaatgaccaaagacaagcagaatagtgatcatggattaaaagagcttaaaacacaacatacacacacacacacacacacacacacmccagtgaatctatcaaggaagaatcacaaacgttcattttagatttcttagaaaaattaggttcaagcagtgacttccgcctctctctcatttttgctttgagaaatcaaagtaattctcaattaagctatagtcacagctaagaattttacttcatacttgcttgctctcagatgtaggttccagatatttggtgatcttagaattgtgtaaacttagattcagaagataacacaagctggaacctagattctaattgataaatcaaaggtaaaatgttaaataaaggatactaggcagaaagcttcttgagggccagcggtcaccctcatctagctcaactcaactaccctaatcccctgtacatagttgtgggacagaacaagtaaataaataaactttcagaaacttcaagcattgctcattagagcaaatttataaagaaatcattcttcaacatgaatgaatcccttccatacagctgtgtccctgtacttaattatcttctacttagttcatatatgttcttttttttttttttttttttttttttgagacggagtctcgctctgtcgcccaggctggagtgcagtggcgccatctcggctcacttcttcaagctccacctcccaggttcatgccattctcctgccttagcctcccaagtagctgggactacaggtgccygctaccacgcccagctaattttttgtatttttagtagagatggggtttcactgtgttagccaggatggtctggatctcctgacctcgtgatccgctctcctcagcctcccaaagtgctaggattacaggcgtgagccactgcacccggcctgtatgttcattgtttatctccccttactttagtttttgaggccagagaccaggccctcactctcacacccatgagaatgtctagcacaaccccaggcacagaataagtgtgggttcatgcaaatcaattatgtgattagcaaacatggtcattgcacatgtcctgtgttctacagcaggcttggccaagtgggacccagcagatcctrcttcccccagcatggcagcaactgactggagtggccacccacacatcagtgcagcatgccaccgtgattcccgagaccatggcaggcacccagcagctggcggactggaggtaagcaggaaacccctctagggtgagtgggtgtgtctgggatgggaggcacgtccactgccaacacagggctgccaggctggcctgtacttcaattccccggtttgtagagagctttttaaagcttctaaaaatattgtgtggactatgagtgcagggtaacaagaagcaatttttaaataatataccaggatacaagaaaatcagtttcattaatttatgcttggttgtcatttccacccagaattcagttatgtcatttactcatcagtgtaattcaccagacttggttctggatgatgtttggtagtttctcagaattaaattctacgttcagaaaacaaaggtctgtcaccagtgaaagaatgcagaagagggtccccaaagccctaagcaattctagaaagtgttctgaagatgtttgagacgggggtactctggagtctatctgacctcccacgggatggcttgacagaatggggtttatttggaagggtaaatgctggcatgtttgctgagtgtgcctcttcagttaatagtcatatcttacagatcagagtctacttcccacacaccccagaggcgtccacctgactgcctgccagcacagcataccccctgcatctgtttccagaactctaccctgcccaactcatgatttcctcacagatgcgctcctctgttatttttatggctagatacccttgtaccttcccccraacaccaccacaatggccccttcaccagtgcagagccagatggcaaccctccaagttgtccccaactcctcatggccctattgggctatctctcattctgcacgaatatcaggacaggtcactcccctcaaccccctgacagcctccatatcacmcagggaacctcccacagttcttattctgacctacaaggctattgtgaattaagatctctccgagaaaagaagaaaggtggtgatataagcccccagtcagacccctactgcagcttcctccattcctccagttcattttctgcccagtacagagtacctgggcccttccccacagtcccactcacttcccttctggcaacgccctcatgccaccactccagcctgggcaacagagtgagactccatctcaaaccatgtagagctgagttcaatcctggctctgcatgacctggggcaagttaacctttatgcacctcagtttcttcttcaataaagtggggatagtaatgcctgcttcacaggattgttgggaggtttaaagtaagataaaatacaaagcacttggcctatatttaacatgcaccatcgcagtgcccggtacatgacaggcattaaataaacctgtcatcttccctccccactatcacatcggcccatgctcagcaagattgcctttcctcctccagctccttaggagcagccgagtggaaagctgtctgaccaactgggtttttttttttccctcgcccctttttctcctaaaagaccacacacatgacatattcctttttttcccttttgtctttcagcatttatagctcatctaatttcagaaatacacatacacttactaattcctacatattttcttattcctcctccctccttcctttcgttttgacatctcttacctagtgaccacaggagacatctaaagccagcatactctcttcctggtctctctccatttcatgtgtgagccaaagaacatctattattgtggctaacaaacagaagtaccagtgctaggcctgactcaaaagagaaagagtgccacctgtctacaggagaaagagctacaacaaaataaagaagccataatatcagtttcttggtcggatgcagtggctcacgtctgtaatcccagcactttgggaagccaaggcaggcagatcacctgaggtcaggagtttgagaccagcctggtcagcatggcgaaaccccgcctctactaaaaatacaaaaattagctgggcgtggcagtgcacgcctgtaatcccagctactcgggaggctgaggcaggagaatcgcttgaacccaggaggcagaggttgcagtgagccgagatcgcaccactgcactccagcctgggcaacagactgagactccatctcaaaaaaaaaaaaaaaaaaaaagaagccataatatgagtttctaaagtccatgtaaatgcccaaaaggcgctatcaaaatccctacaaaagtgttcatctacttcttttttcctgttcatccttttccccatgttgcaacaataggttcttataattttctaaaattcaaatgaattatcctttagctttgaattttattatgtgttaaatgagctcttatgggccaatctctgagtcagtcaccacctttaacatttctgtgggaaaacaaggctttaagcttcatacaacccaaattataagaattgtgaaacataacccgtttttaggatgagggctgccagtatttctatcatgactgttattaattttgatttaataccaactttatacttgtctagtcaaccttcagttaatctaattattcattcagcaagcgtgtaattaattgatcagctgctatatgcctgagcattgttccagccactgagggaattcaaaagaacattaacacttcctaacaccagaagcatatggctcccaggcttcaaagtttgtttttcacgtaaagtataatttcttctttaataaaatggtattgctaagatatcctgcctacgtcacagagtggaataaaataacccattgaagacactgtgtaaattccgctttttcttcatttaaaaattttttttataaaattaaggtgaaactttttttttttttttgagacagtgtctcgctctgtcacccaggctggagtgcagtggcacaatctcggctcatgcaacctctgcctcccaggcttaagtgatcctgccacctcagcctcccgagtagctgggcccataggtgcaccccaccatgcccagctaattttttgtatttctggtagaaagggggttttgccatgttgcccaggctggtctcaaactcttgagctcaagccgtctgccctcctcggtctcccagagtgctgggattacaggtgtgagccaccatacctggcctgtaaattctaaaatagaatattgttcaggataaacacctaggtgctcagggactttaaaagttggagggaatatttatctccagtccctagaacttaaaaacttggagccggtgtacttggcattcttcccacttgaaagtcctctttctcactcacagccagttatgtttcacctactccttatgagtagaagaaacccacccgttgagcacacrtggccaggytcatcccttcagcagctgcacagctagtgagataaccaactgcagtcagcgtttaattggggaggaagcttgatcttatagaggagctctacttttagaacacctctaaggcaccttgttgtcccggttscctttcagaaatacgcatgctcacggaagccattataatcccatcatgcagcagcctgcactattgacsggtcatgtgacccttccagcagcacagcccttaaatgtgggtgtggcccacgtgatgcggcagcagccaaccagcaccacctcctcccggaagagtaagcagcaccagtcatctgtgaggtaggtgrtgagagccaccctagggaagagaaatcccaggggatgtgagtgctaaagaaatgtagtttagggagtatcagcacccactctgaacatgggacagttgcatgggatgggggcactcctcttcctgcagtgactagcaaaacatcctgtaccacctggtttggcctagggtttgcaggaagcacttggtttaagaccgtggtaatagtgtagggatggatgcaatggaatcttgcagtgggcaagagagattgggctcaactccatacagcgtgggcgagtgaaaatttatagccaaggcagggttggggggtgtcggtggatgggaagttactaagaggaagcatcaggggtaagggagattctgcctaaactgacctaacaggattcttgctaatgacaggcccgggtgatcagatatcacacctggaggatgaggaacctcatcagatatcgagggtgatcagatatcagggatggtgggttcttgctaaactgacttagcaaggttttttgccaaaagtagattgtacagcagagtgcacagttagacctaggagaaggttcacaagcctgactaaagtttggtgaagcaaattatcttttgtcactttctacttgtctggagaacactcagcttcacctgaagtttcattttggaaacaatttaccataataattgttttaaaatattttaaaatgttgaagttgtttaaaaatgttttaaaaaatactaaagaaatgtgctttctttgtatctaagatcagaagtttaactgatttagcaccttgcttaaatagaagcaatagcttgtttaatcccagacactaaccagcagaacacaaatctttcccattccctttaaatccattctcatctcaatgaacactttgaaaaaatcaaggtcaacaaaaggctgcatgctgtatgattccatctatatggcatttcggaaaaggcaaaacatagagacagagatccgattagggcttgccagagaccagtaggagaggaggagattgactgcgaagaatcctgaggggaaaagctctaagtctggattgtagggggggttatgactgtgcatttgtcaaaactcatcaaacacttcaaagggagaaatgttgctatatgtcagttataccttaataaacctgactttttaaaaaatggagatttccaagccagagagagagagagagatcgtgtgactacaggattgctcctgcatctcttcctaatggcacagctttgaggtgcttaattgcttatttgcgataagtcaatcaagagaaatctggtatacaaaatgtctagtgattttggttttctgcttcctcatataagcagataccagaaactaggcctttttcttttcattcttattcaaaaattcatccaagggctgaagttgtcatcctccaagattccttatttgggtatttctgacaactcagggaaatttatctcagatcattggcagctttccagaacgcttttgtttggcagccttgtgacagctcacccatgtcattattagactgggtggcaacaaagtccactgtctcaatcctcatgggctgtcatgcccagcaaggtcacatggagcactactctgtcccaggactgagcttagcatctttgtggttcaccttggctgagtaggggcagtaagaacccttagcctcccaacctgtttagcaagtccctcctttttgtttactcaccacccagctgacttcatgaagcctcattgccagtacatttcaaratcgatataattatagtgaaaggtatgtatttgcttatttttaagaccaatgccttagcaaaacagtctgaaagaccagaagtctctcccttgttggtgatgtggccaggcatacttttccttaacaatgccaagtggagatactaaaaccattggtagtgaaaaacataatcttaaaattgtaatgtattagcaacgacaaatacataggtttatagtaagtacaaacaatggtacaatcatatcagtgaaacatattaccagtccctagaaggagcaagcaatgtatctggcactagctagataggaaaataaatccacctttattgaattattttcattttactgccatccctttagctagaaggtgctagaatctctaaagacatataaaagtctgagtttcattatacattgctgttagtctctcactgcatagatactacaggttgagcatccctaatccagaactccaaaattgtcccaaattcggaactttttgaggattgacatgatgccgtaagtggaaaattccacacctgacatgtggtctcagtcaaaactttgtttcatccagaaaattattataaaataatgtataaaatgacctcaggctatgtgtataaggtgtatatgaaacaaaagaattttgtgtttagacttgggtttcatccccaakatatctcattatgtatatgcaaatattccaaaatctgaaaacaaaaatccgaaacacttctggaccaagcatttcaggtaaaagatgttcaccctgtgccagagtcagtgaggatctaatagggaggggagaaagtatttttcccctaaagttaccaaaaatcacactggttaatttagtaaggaatttcaagttgatcaaaattaagattaaaagttctctttttaagagtgctttttcaaaactcttgcacttttccaaattttctattacaatttagactaatgcgcctcccatgaggctccacgaggcaaaatccagaaaaatcatttttaaggtttttagcaattatatgcacacaaatactttgatggtcatgttctttttccagaggaggaaagaaggaaaactgaaccactggtcaccaaggttaggtcctttagatcctgaaactcttaaggaatgaatgtttcagtagaataaccattagcaaggaaaccaaagcttgatgtggcaaacaccaattcttccaccacccccaaaacaagacttaagtacctttgaagggatgacacaagacagagctcagaagtagggccttgaccctgaaggcgagggggtgtgttggggcaaacacagctggaatcctggcatgacatctgctcctacaagacctgtagagcctggggcacaagagccccctccctgctccgaaagccctggctgctccctttgtcctgctgggagcaggcatgtagatccaaaccagagcccagagaaggcctgtgtagccgctcactgaatgatccctttcccagtcacagatggaggctcattgggcagccactgacgtgttttacagagatttggcaaagcaggtgtttctaggcaattgggctccttcgaaggagttgtggggcctgaccttcctctgtgtgagagtgtggttttctcattacagaaatgtctccacctgtgaggtgtcctcctctcaggccatcagctccccacagcgatccaagcgtgtcaaggagaacacacctccccgctgtgccatggtgcacagtagcccggcctgcagcacctcggtcacctgtgggtggggcgacgtggcctccagcaccacccgggaacggcagcggcagacaattgtcattcccgacactcccagccccacggtcagcgtcatcaccatcagcagtgacacggacgaggaggaggaacagaaacacgcccccaccaggtgagrcagtgccaccttagccttccaggaaggagccgggagggtttgcattgtgtgcagatctgaccatcttccatcatcaaacataaggatccctctcttctgacccttacagtttggttttgccatctactgtggtcctaaagttatttcaagggaatgtcaaacaggttttccataattgtttaaaaccaaaataatgtcgaatcatgttggtcttaaaagataattataggccctatacatttggggaacttgagaccataaaaatcgggcacacaatgccagtgtatttcatcctctgtaagtttaaaagtctctgcctcaagctagtgaatttattcccagttggtcaggatatttctctaacattgccttggctcactcagaatacgaagtaattgtccaattaatcagaaatttccctgtgtctgattaacctaatctttcaaaactgccagttggctcttcacccagagagcattactgtttatcccaaagtaataataattcattttagtctttgtgtgcttcctggggagagggaagaaatctttattatatttacaaaactactaaccctggcgccagagcctctttttctgtactgcccagccagacttcagcaaaatgtggtttttgtttgggccactcagctcaggttctgagcaacccctctagaacagttggcctcctggccttctgcatccctagagtgtggccttgtagagcccaaaatctcatggccccaccctgctggctcctttgcactggaaccgagagccagggaagggaggcctgcccctcccaggcccagcgctgccagtcagcacgcatcctgcagctggatatgaagcctaattcacaattaggctcgaattattaattcctgattggatgcaatgtaactaattagtaatcacaaatcctttgattagataataaattctcacatttgaaatcattacaaaatgtatagatagactgatgaaaacattctcattataactattcctgcataggacgttcccttccctctttataatgaagtccagtggttttagtttgtttctgggtggggttagtacatgtctcattcaagtgtcctcttcccaccaattaggtacagcctaattgtcattgtatttcagagaagaatgtagtggagcacttgtggccgtagcattgtgccaggtgtcagaggggacccaggtcaaaggtccaggcatagcactgaatactttggcagcccaggactgccttttactccccatctgcctagtccagaaatggcctcaggtccctttttgatgacagcctcaagttgagtgaatggtccattctccgcagtgcccccacaccaccacccaggaatactgtcggttcagtcctcacgtgggctcagcagtctcttcacaaaggggacggccctgcccagccccagactgaagcctggccttgagcagccacccacacgtgggtagccttggtcatcagaagggtccagcagccttgcccggccctttgccacaaatggaaaaaagcaaaagcaatttaaaatctgacaatcagctagattggaatctcattcctaacgtatgagatctgagttgacacagactctcaacatctgtgcccaggagagaattgaatagcgtgtctgagaaggaggatgagagagccgtctctccaccagtcagagagctgacagggctgagagtggaacgcaaagccagagcatgtccgtgcctctgcggcagcccctaaggcccccagaaagaaatgatagaaccgagaggctgggcagcagatgaggaccttcatgggaacaactcaaagaaacctgggagagagagccaggtgcacaggtgaggggcagccacagacagacagtagcagtggctactgagtcccacagcatcctgcagtgaagagtggcggggactgccagcctgccagggtcgtgaaaatgtgccggacacatgaggctgaatagggaagctgcagactgaggctagggagtcatccaaaaggcttcagctgtccacagttgtgactgggagctcccagaataatgttttctagagagatctaatggcaagtgccttagaaaatgtctttgcactcaagaaggtaggaaagtgtatttgagtctgagtaggataaaacagaaaccagtagctgttttatttatagagaaaccactgtgtaactgtgatcacattattgtgactacattttgggatcagaaaaaaaaaatgtggggaaatatgattacttgttcttagaagtcagaattatcataaaatttaacacagtcagtatttattggccccactagtgtaagatattatgctgggaactgcaggtgttacataaataaggtagacagtttgtgtcctcatgaggtttgcagggtaataaacaagacgaaacacatacaaatcattataacacaaaacacagtgtcagtcccataaaaatgagcaaagtaccatgggaactcaaagggaaaatagcttaagggaatagcaggggaggggggctttgaaggccaaaggtctggacaggtccacacagtagaggaggtgcggttgcaaattcaagtgaggtgattgatggggcagagcctccaaggcaagcgaacaggatcaagacccctgtgcaggagcttatccaaaaggggcttcaggatggaaagggggttggggagggatctccccttacatgggggtggtcagctttgtcaggagatactgaggggctcaaggggaagcatcagtcctgggaaaacaaggatgcacccccaagtgcagccacatggaggggtcacctggtccctctccagctgaagagcttccccagcccttctgtgtcccagctggagcgatggagaccttccctcctacacattgatcatccttgttctcgagcctgatttctccatgctgtgggcatgttgattcccaccttctgtgttcccagcctcgttttctatttgctacttaccccagtgccagtcctgtaactttgcctaaaatgctggttaattcccctaacatggctcagcctcagcttggcagccagagtcaggcagccgatgaccttcagagggatggcagtgcctccaccaccaaaggggcttttagacctgattgagggtgtcactaaacctctaggactagatgatatagcctagaatttttaaaagaaagccaatgcaaaatcattattcctgaccccacgtatgtggcactgttggttgcacagcagatggctggccagcagctccactcgtaagaactccagggcatgttggaggcagatgctgggagacactgagctaaagacaggagaatcatagcaaacatgcactgggtgttccacccgcactagctcctccatcatttgatggggcatgcaaggctgatatttctattcccatttgatagatgaagaaactgaggctcaggaaaggtaggtgactcacccaaattgatacaggttctaaatagcagaattgggactcaggtgccatgctcttgaagaaatgtcaaacttaataactggcaaaaataactgatttcagtcattcattcaatgaatacagattctatcctgctccctcctgtgactaccactatgccactgtgtgcaggtcaccatgccagggccatagggagtctagagtattgtccactgagccccctcttggtgctgggcgtttgtcagagtgctggagccatggcactgagaagggcggagtcagctctttttaaagtaagaagggcagggaagagccagggaactccttttcagtgaattactgttggactaggggactctggtcatggctagagaattggccaaaagataagacaaacagatattgttctgggtcccccaggattaagtagtagaactggtcttcttttaaatatttatagacaatttcgattagaaaagcatttaattgtctacacatactgaacaagccatcttttctctcctggactctcttgatccacgtctcctgatccagacccccctgctatctttaccttgtgttgaaatggtcttgtaaaggctgtagcatacaacctttagtcatgagggtaatttctttttttatttttgtaagaactagagacagtgtctcactatgttgcccaggctggtcttgaactcccaggctcaagcagttctcctgccttggcctcccaaagtgctgggattacaggtgtgagcctccatgcctggccgagagtaattttttaagtgtgtaaaccaaagtggttcacatcaactgatcatatagaaatgattttgtccagctccattattcattcacgcattcactcattcagttacctggatatttctggtaggtgggttgttctgcttaggtcatcaagtgtctcctgcaggctgcacttcactgtgcctgtgtaagcagccactgtttcagccgacgttaccaaaaatgaaaactttaagaaaattgattcataaatatcattcagtattttagatataaaaacagttacttagctcactcttaacatgtttatatataaaaaaaatttgacccgaaatgttttccttgtttatactaagttgaaagtctagagaaatcattatagataaagcaaggttagaaaactgataaactgcagctcaaattactttggcctgaaaaattaacatccacttaacagagggagcaaaaaccacacacactcatttattattgcatgggcaaaaagcccaaagtgggattagcctccattgctacctataaccatgtagcttgctccatcctgccattggttgagaagctgctacagccagcctcctgccatgctcatggagacgtgggaatcaggcttgagtgaaggaacaaaggaacccagacacacagtgccatttgaaggaactttggtgtctctccattttgagtacaatacatccccagttgaaaaatatttcagtcatgtgactcatctcaagaggtgatggtaggatcttttgtccagctgacttcgccacaccctctttacagggctccatttaagacactccagtgggctgagtagagtggctcaggggtgtattttgaagaagagacacttcaccctactgtccccagctgctgtcacattacaaagctgtcactgatatgccacagcttcctggtttgctccttgctttccacagggaagaaggaggaagaggggtggcagagggttggataccatagggcagagcggtgctcagtggatagactgaaggtgatgaggaaagatgagtcaaaactcccaggccagttgggaagagagagactggacttcagaagaagatggaaggagagcaaacacttccttccgctgcatctgatgggacaaggacgaggtgactactcatggctacttctgcgaccctgtttctgatttctctagaaagtagtcatgtaaaaatgatcttaagggtgatatatgtgtatttatatacacacacgtgtagacatagacatagacataaatatgcagataatacaatttgaaaggaggagccaggcatggtggctcacacctggaatcccagcacttggggaggccaaggtgccaggatcacttgaggccaagagtttgagaccaacctgggcaatatagcaagaccctgtctctacaaaaaatttttttaaattccccaggcacagtggtacgtgcctgtagtcccagctacttgggaagctgagatgggaggattgcttccgcccaggagttcgaggctgcaatgagctatgctcataacacgatactgcagtctggatgacagagtgagaccctgtctctaaaaataataataataatttgaatggaatgtatgtgccatattaaaatgaagattttttttttctctctaatgactctaagtcagcagctatcaggaaggagcatactggtctggaggcacactggaattaccagcgtgagccactgtgcccagccaaaagtagtcatattctttaccacatcatcttgccatgatgattaaaggagataaacatataaagcactttaagctgtagttagtatgcatccaataaatgttacctgtacttaataatcagcatcatagtaatagaacacatagcattgactatgaaatcagaagggtaaaagaagttattggaggagatgagttttgaccctggtcttgaaggatgaaattgactcagattagcaaatagaaatcagagacacattccagataagaccctacagggaaggggtcacaggttatatctgatcttctgccagtgctttctcctttagggatttctttactttttagctccttatttattttcatcattttraaatgatgaaaattatctattgccatgacaacataatgcaattgtgaactctgacagctttgttctttattcagaagtgatgttcttccaaggccatttcagcaaatatttctcactctgcccctatcgctatctctctcacttgcattaaccaactcataatgggattgataagctgtcaataataactagacgcaatcatggaatgaatcccagtagtatcgatagatacgagcctaaagaatctgccgtagtcatctgaaatgtgtgctcatttctaaagtgactcatttaacagcttcccattagttctctaatctgcatagtgtgttcaggtagagcgcagagctttctaacaatggaagagatgaaaaacagctagcaaatgaattcaccttctgcaaataaatgtgtcacttgtaaatccaaaaaggtaggcaaatcagcatcaagctgtgccgtacatatttgctcattaagccaggggctccccagctacaacaaagggatgggacctgggaagagtttataaaggttttatcccacactccttgtagataattagacactgacatgcagattcttcagtctcttcagtgggaggctcactacctgttgggtttccatcaaggagatggccctcagttctcacaggtcacccacgccaagctgtcagctctcacaagactcatgccagaaagccattcttcagtgacaagaagctcagtgactcatgaagtggctgttgtgtcttgagatagttctagttgttagaaaattcttattcatattaagctgaagcttctccacaatttccacatttgagtgaagagctccaaatatgcccaatttgaattttactcgagggcagattacagttttgccaaaattagtgtgtgtttttgtctttttgttgttttttttttttttaaatgctcattttctaaactactcagatcctaaggaagatatgatcagcaagaactggccagatctgggtctataggtaaggtacatctgctaaaaggatctctttcctctccagattagggctagaccattcctattttagaatgtctctaggaatctttcagagatcctcataatggctcctttaatgccatgagtaatctctctcaatgaatttcagagcagattggagctggatggatgttacaggttatccaggccactgtccagagccacaccagtaaaggaacagcagagctaggactgcagtgccagctcccaggacacatttgggagtcagcctccatcctcacctggggtcctccacccacagaatgggcacctgcaacagaacatgtctgcgtttcatgagatgaccagaggcatgttcatcattcaggagtagctgtgcccgaagctgagagtgaagggcagggcagcgccatctcctcacctcccctcgggagccagcagctgctcccagtcatggctcccagctcttcccctggccctcagagtacttcgaaacagtgtgaggtgggaggagttcccttattacacaagagactgcagcagaccagttgtttccctttactcccccgcattcatcccagaagacagctgcaggtttctctgcccttgtcttcttaaggcagctctccttccctcctgctccctcctcgtcctcagcctccagcatctccctgctttcagatccctcctccctacctcctagctcagagacctcctagagtcccacttcctttttttgcttaatttatatttataaaatatttcgagatattcttttttgttgttattggtagacagcaatcttttttttttttttttaagacagtctggctgtgtcaccccgactggattgtagtggtgtgatctcagctcactacaacctcacctcctgggttcaagcaattctcccacctcagcctcccaagaagctaggattacagtcatgtgccaccacacccaggattgttttttgtttttttgtttttttttttcagcagggggccagcgcggtgtgggggcagagtctcactctgtcacccaggctagagtgtggtggtgtgatctctgctcactgtaacctccacctcccgggttcaagtgattctcctgcctcagcctccctagtagctgggattacaggtgcacaccaccacgcctggctaatttttgtatttttagtagagacggggttttgcaatgttggccaggctggtgtcgaactcctgacctcaagtgatccgcccacctcggcctcccaaagttctgggattacaggtgtgagccactgcacccagcagatttcttatttttagtagagacaaggtttcatcatgttggccaggctggtcttaaactcctagcctcaaatgatctgcctgccttgacctccccaagtgctaattacaggtgtcagccaccgtacctaactatttttatttatttatttattttctttagagtgtaggtctctttgtcacccacactggagtgcagtgacacgaccacagctcactgcagcctcaaactcctgggctcaagccatcttcctgcctcagtctcccgagcagctaggactataggtgcacaccaccatgcctagctaatgtttttatttttgtagaggtgggatctcactgtgttgcccaggctgctctcaaacttctggcctcaagcgctgggattacaggggtgagctaccgcacctagcttccactttgtaattcttgtactggatctcagtgccctcccaccctctgggtgtctctactgagccctgatgtacagcggcgaagtgcccaagactctgaatctcttttgctttttttttttttttttttttttttgagacacagtcttgctctgtcgcccaggctggagtacaatggtgcaatcttggctcactgcaaactccacctcctgggttcaagcgattctactgcctcaggctctgagtagctgggattgcaggccccaccaccactcccggctaatttttggtatttttagtagagacggattttcaccatgttggtcaggctgatctcaaacttgtgacctcaggtgatccacccacctcggcctcccaaagtgctgggattacaggtatgagccacctcacccagcctggactttgtttttgatggagatagaattcatgtactgtactgtatagttcacccgttgaatgtgtacaattcagtggttttagtctgttaatttttaattgtggtaaaatataaaatttgccatttcaaccatttttaagtgtaaattcagtgacattaattatattcataatgctgtatagccatcaccgttatctattttcagaacttttccactaccccaaccaaaaactataccattaatcagtaacttcccactctcctctcccctagcccccaacctctggtaacctctaatgtattttctgtctgtatgaatttgcctgttctagatatttcatatatgtagactcaaacaaactatttgtccttttgtgtctggtttatttcatttaatattttcgaggttcatccatattgtagcatgtatcagaactttttttttttggagacagggtttcactctgacacccaggctggagtgcagtggtgtgatcatagctcactgcagcctcaaactcctgggctcccacctcagcctcccaaacagctgggactacaggcatgcaccaccatactttgcttatttttttaattgtttgtagagattggctcttactgtgttgcccaggctggtcttgaacccccagcctcaagcaatcctcccacctcagcctcccaaagcaccgagattacaggcatgagccacccctcccagcattcattcattttcatgactgaatagtattccactgtatggatacaccatattttctattcattcaccagctgatggacactcgggtcgtttctacctcttggtattttgaatagtgctgcagtgaacattggcttacatgtatctgagtacctgtttccaatcctttgagaatgtacttaggaatggaattgctatagggtaactctgtgtttagctttttgaggaacaagcatatggacatttcacatttaaactgtcataactgggaggtgtgggtctttattaattaaaatttatctactttaagttaacatgaagagccataaatatatgcaaccaattcattcctcaccttcttctgagttcttaacaattatcatctgtacgattcatctgacagttaatcacggaggctttgtgacatccattattctctctaactggttattttaaagcttttactatttaacttgtcatgttgttatacagtcctccactgagattttaatctcctcgagggcagagacacatatttctttgtataggtattccctgtagtaccccgcgtagatctccgagatatcatgagttttaattttctttgatttcaatcttctggtttattcataaactagaaaaaaggaaacttttccagcaagtccttaccctgatagaattctctttgcctaaataagttttttgcaaacctgttttcacatgttaactaaggtaacacaacttgtaagaagaagaagaatagcagctattatggaatacttaccatgtgttgtgtatcattgaaagcacttgtattttctcacttagttctcaaaacaagcctatgatataggtacaattattacctaccttttactgatgaggccactgaatcactgagaggttaaatagctgcccaccgccctgtcaccagcacatgccgaagttagacagctgactccaaggttcgtgttctcacccacgaacacggttaggcaccctgaaccagagaggacagtgtccagccactggaagaattatccagcctagatgtcaggagcgctgggcgttggggagcagggccagcgcctcctggggactgcaccccccagatcccccagccttctgtagctcagcagacaggctctgcttctgtccctsctgcctggctgctgtgggctctggaatttgcccacttccctgctgcctctagggtggtggagatccatcatgggaagagcctggcctggctgtgtggcctcaarcaagatacccgggaggtggctgtgactctatgaggctcygtaaataccagctgcttctctcatccaattagctggaaactgaccagttgcctaggcaatttttatttcttaaaaataaatgatcaatatataaaaatagatgcacattcattttaaagtcttaaataagcacacaataaacaataaatttcacatccatcatgccagcagcctctcactgagtttgaagacaaacagaagtagttcccaaagtaaccacactaacttaaatatctctgaacaaacatgccggccaagagctatccaaagccagtgcctccctattgtatgaagttccacatataagatgaaggccagggcttcagagtggctttcacacagcatcaacctggcaggggccttcccaccaggccccggtgcaataccatctcccccgatcccttggcccaggcagtggaaaagctgcaggtgagcctggctcctgaaaaggggactgcagaggtcgtagtggcctgcacacagcccacagagcacactcaaagtaaggagaggcagagggtgtcaactctagctctgcgttctctgcagcatgtctgcactgtgctgtgtgcatgcagccccctcagagcctcacgctgcatcccattggacattctgctccctcctgcataagctttgccaggccgcaggcaccaaacctaagcttatgacattcttctcccagcgaggtttactcctaacccaggtccccaggttgctgggttcttgctggttctctccttgctcagatgtcccattctggcaggcccacgggggttgtacccagctctgggctgcaggtgcctcccctgcagctctgctgagctctgctgcacaggaagagcccaggccagcccggaagcatctcactccctagtttccagaagcccctgtgggtccagcaccagccccttctccatgtcttcacatgtccccctgctgccggctacacaggggacttttgcatgcccagtctccctatgggggttagggagggcaaaagccctgttcctgccctctcccctctgcctccctcccctgccccagggcatgaagtgctagttgggtgtctcacctcayggccttctcccacctctgacttctccctttgcattttcagcactgtctccaagcaaagaaaaaacgtcatcagctgtgtcacagtccacgactccccctactccgactcctccagcaacaccagcccctactccgtgcagcagcgtgctgggcacaacaatgccaatgcctttgacaccaaggggagcctggagaatcactgcacggggaacccccgaaccatcatcgtgccacccctgaaaacccaggccagcgaagtattggtggagtgtgatagcctggtgccaggtaatttggggccaggacagggmaggaacctctccctggagagtggttttcctgcttttctgctgctagaaatgttgctgtatgggagctagtacaatagaaagtgcccagtgactgcaggcgacccttaccgaggattttattcaagtatccaggggaggcttctgctgaacagcacattgtataagcagcgttttccttctttaatcctgtaatcaatacctctctgcctttacaatggctctgcttccaactaggttgattaatagaaaataaaagcctcctggttctttatgcctgagcctggaagaatacctggtctggggagttcctggctgacatctagcaccactctctgccaggaagccctggtggtcagatgggcttcttgtgtaggaagaacctcctccgagtcttgctagggaagggtgaaattggcccctctcagcccctcctcggaatcagctgctgggcggcgagaccaagccatgtgtgtttctctgctcatgcactgctatcttcagaggactcctcctgtcccgcgaaggcttgtcttgaaaattgggccctggaataaaggctgagaacgtaaccttctgaataaactcagtggctcactgtagattttgtagcatctatttagcgtttcccttgctcatgctcacagtggaagaatgtggggactaaaccagaagaagtctgcgcgtcccgctattccgccacaaaccacacccaagccagcctgcacctgcgtggcggcataactgaaaagggaaggaaagggaacgccaggaagcttttgtctagatgtgagaagctgttacttctcaggaggacctcatgtctgtcacctgaggtcgctacaggaaactggggactcttcctgggtggtgaccacatgtgagacccagtgggcgcaggccccattcaggggctgccactgaggatgaagcgtagaggcaggatggggtcattagggcttttccagcccagtgcctcaggccagcctgcacggtgagggtcagagccctggcacgctctcccaagagctcatggcattgcctgggatggggccccttttgctgagaggctctgcctaaaggggagatggtgacagccacaggcttgcgctccccgccacctacttcctaacccaaggcagcatcaccctttccgacatttgcggcgaagctctttttccctgactttggagttaccccagctacctttcctctgaagaaatgcttgtgaaatgcagcttctcagcaccctgctaaaacgtctccttttgcaagtcctggtctgtccccaacagtaccgtcatgacgatgcagcctccaagcagctttgacatcagagccagcgctcctgtgggcctgggggcagggggtcgtggtgcctacagcgagaaagacacacaagcagcacgcagctcgcgctgtgctctctcggaagaaggagaccttaccttcaggaaaaatagagccacagcagtgccacatgccagggcgagcattctggttgacaggggccaggctgtacttgctgctagggtctggtgacctggggccagagaagcaggctggagccctcccaaaattaggcatctctgtgaggaaaagaaaatgaagctgtcccttccacaaggctacaaggacatctctctccaaaaaccatctttttccacccgggcaaatgttttggtggaaaccctgccaggaagcaacattctctagcagtaaccaaagggccctgggaggcacccgaagtcattcccgggagccaggattccttaaagagagctgcatacttttcagctcagctatcctttaaatattgtttaagggtatatgcagcacacatttttaagtttaaatatttgcaaaggatagaatttgtcttgtatcattatttaagttccttaaatatatgtttgtgcaaacctcgaagctgcagactgaactcataccatatgcgggagtgctgcctgtgccctcacgagcaggggcattcctcgtctggtgcctgcccttccccagccagtggcgttcaataccgatacacacctttagctgtagaacccacctaggcttggaaaagtcgggaaagcagccttcctcagctccctggagcccagtgatgcatacaggccaaggtacagccagttaacagctcccccagctacagcacccagagcatgggagagttcagcgctcccccagccctcttaggccaggatatgcactgctgtttccccgccatactcaccccctcctgtggctctcagtctttcagtccttctcaggttggggttagtgaagtttcttttggaagcaacagaatgaactctacactggcttaagacaaacaacttattggaaggatgcagggctaagggaaagttcaacaactaagtcccaggcagggcaggagccagaaccccggggacctgagccctgggggccagatgcctgctctctgaagctgccttcacccgactcaccgacagcagctcccaggctcctggtgtcccatttccaggagaccagaattgattgtcccagcttggagagacacttgtcgttgcttttttttccggagaggagtctcgctgtgtcacccaggctggagtgcagtggcgcgatctcggcttactgcaacctctacttcccgggttcaagcaattctgctgtctcagcctcccaaatagctgggactaccggcatgcaccaccacgcccggctaactttttgtatttcggtagagatggggtttcaccgcgttagccaggctggtctcgaactcctgagttcaggcaatccacccgcctcagcctcccaaagtgmtgggattacaggcataagccaccatgcccggccaagacacctttttttgagcctcagctttaaccaggagacagagttcaataatgacaccaacaatagctaacactaagtacgtaaatgccagatactcaatacttaagcccttagatgccagatactaagcattctacacttgttaactcatttaatcctcatcacagccctacatggagctgccatgatcttcccagtttcccaggttaaaaatggaggcacagaggggttgaccagccttcccagagccatgtggctgggcctcccagaggtctggccctggagcttatctgtgctgtaagcacccctgccaactcacctagtgtagacagggccactgtggctgttctcaggacaggagatcacggagagtagctggacaaggcatgactggaaaactctagaatgtttcctcactgttccaaagtatacattaggaggttgaccagcattagcccattgtcgctttgtccatcgccacaggaggagttactgttatactttaatctcttggtccccttcaggacgtcctcccttactcggggctctcgtcctctgagagcttggcaagctctgactcaacccccatctcctgtccccatgatgatggtagcatcagggctgcattacgcccatttcatctaacattccctaaccccttcactgatccctcgagctcagtgtttctccctcaaatatcattaccacaaaatgcccaggaagttggaatagaagaagtaggtgacatgcacagcggggcccagcacagtctgtgacccgccgcagagcaagaaggaggcttcccccaacacagccacattgtggctgcagaaggcaagaagcaggctctgcagagccaatgtttgcagctttctatttttcttttctacattgagtccacaaaaatccctccatccctcaggttttgggggacctttgagtctaatgggtttggcttgggcacagtgttgggtcgcaaggccctgattcccaaatgcaggtctgttcagccagggccaggaggctctggtgtcctgggaagcttgctaagaatactgattccggatctcccgtacctactcgagggattccgattcagtggatggggtgggaggggccccaggcgcaaatgcacggttggatttgcggcctctgaatagcacccactgcccccatccccactgcggcagctcacccttcacttagggcagggggctctgagttttgrggtcaggaaggcccccttccacctgtagtgagcaccagaaacttctgtccccaggtttccggttttcctttgaccttcttgagaggctgagacctctagaggcacatttctctcttcatcaacaattaatcagcattctttcttgctggctccagcctcaggcgtctcctctttgactttgatttcatcgccctgggatttgtaatagaattgatccaaycgaattcaatcaagggcctggtcgtttccatgcatggctcattaatatttagcacctctgccccaagaatgaccagattctctccttttacactaaccacccataggatacttcattgagacagtatgagccttccagttcacctaagatgctcaggccccaaaatgaatgctccgaattcttgcttctgaacgtgaggtgtagatctgtctttggacatcttgcaatatgttcttgctgcctctcccttcatatgaaacattttacctgattcgtcctttgaacacccctactttgggcaccttcctcaaatgtggactgctttagagttggggctctgtggaacaatagcaccgyattttggcgaatgactggattccctggccaaagctctttcccatactcagttatttcatctttcctctcctagggcttccttacgcttttcagtgtcaccaggcagtaatcctaaagtccagcaaggtttccaaaaaatataaatcacagaaatatagctgtccggcacggtggctcacgcctataatcccagcactttgggaggccaagggtggggcagatcacctgagatcaggagttcgagaccagcctggccaacatggcaaaaccccatctctactaaaaaatacaaaaaatagccaggtttggtggcacacacctgtaatcccagctactcggaaggctgaggctggaggatcacttgaacctgggaggcagaggttgcagtgagtcgagattgcaccactgcactccaacctgagcgacagagcaagactccacctcaaaataaaaaaaggaatttagctgtcctccatagaaagtcaaggtgataaaaatatttcaagcacattccagaaacttaatgaagaaaaataactgagtacaagatacaacacatgaagtgctcaaatcaacaaaggatggcggaaaggaggttactcattacctttctctctwaaaatgcgctccctttttcctgggcaaagtcttcctcagtctggttcttagactaagaatcagtaccatggctgggcacagtggctcacgcctgtaatcccaacactttgggaggctgaggcaggcaaatcacttgaggtcaggagttcacgaccagcctggctaacatggtcaaactctgtctctaccaaaaatacaaaaattagcagctgggcgcggtggctcatgcctataatcccagcagtttgggaggccaaggcaggtggatcacaaggtcaggaattcgagaccagcctggccaatatggtgaaaccccgtctctactaaaaatacaaaaattagctgggtgtggcagtgggcgcctgtagtcccagctactcgggaggctgaggcaggagaatcacttgaacccgggaggcggaggctgcagtgagctgagatcacgccaccgtactccagcctgggcgacagagcgagactctgtctcaaaaaaaaaattagctgggcgtggtggtgcatgcctgtaatcccagctacttgggaggttgaggcacgagaatcacttaaacctgggaggcagaggttgcagtgagccaagatcacaccactgcgctccagcctgggagacagagcaagactccatctcaaaaaaaaaaatcagtattgtttctgtgcacatctcaccccagcaggactggttgcccaaggaggcaggacagcccccagccccagcgccaggctcttgttcattccctggtctgccctgcccttcttggtgggggaccatctgcctgtctttccacctggaagatgttttcttctccattaactctactgttctttagcgtttaaggaacagaagcaatgcttgttgtaactatggtttctaactatacaacacaaaccacacagtcttcaggctgctttgtcgtagccttcacttactaaacccctctttttctgcttccgttgtcattgaagttagagaaaggtatctggaattttctgcctcccacactttcctaggccattatgcagtttgctcctaaagaagcccagtgttggcccagcgcggtggctcacgcctgtaatcccagcactttgggaggccaagggcaggtggatcacctgaggtcaggagtttgagaccagcctggccaacatggtgaaaccctgtctctactaaaaatacaaaaaagttagccaggcgtggtgccgggtgcctgtaatcccagctacttgggaggctgaggcaggagaatcacttgaacctgagaggcagaggttgcagtgagccgagatcgcaccattgcactccagcctgggcaacaagagtgaaactccatctcaaaaaaaaaaaaaaaaaaaaaaaaaggaagcccagtatcttctcactagtctgggtctgtttgttgcttttgccattacaaaagtgcttgcatttaatgaatggctatgactggtgcatctgggtgcatttgattggaaatttcatttaggtgtgtattaatactgcactgtgtgttaggcagccctctcctggaggagagctgaggcacagggacatggggggctagtaaagcatctcttctgcttttatcaaggggtgatggtcctgtctgcagaactccccaagctggggtggggagatggcccccactcggcagcagagctcccgccctctggggctcttgcccctgctgggctggacactcatgccctgtcctgccctgtcctgttccatcagccttcttggacttgggctgtccctgactgtcagcgtcttcatctggtttatcctctggcctcgccacctcatctgcgtgatctgtgatgcctcctccttattcacgctctcagccttctccctgccacccccgtccctggtggtacacagtcaccgtccttagcacagggcaggagctcagaaaatacttggatgagttaaaaccactgggctctgaagaggctcctggctcccctggctctctggctgggtaacatggaagccatccagctcagggtttaacccacctctctcagagcccctggctactcagagcgtggtcccccaagcagcagcactggcaccccctgggagcttgtcagaaatgcaggtgctcgggccccccagagctgctggccagagtctgcactgaacaagatgcaggaattacatttgagaactgttgatggagccacctgctgaccatgaggtcacctctggagggttgcagtgttttttccactcttcagcccccttggcaataacatggaggcagttttgtgcttggccatgtttggctcacagggccattccccggatgatttagtctcatcctgcctagaggcaggtaactggaccaggtgactctgagggttattttagcttctagtagtttattaggtcccaccacagacactgtctcctctgatactcatagtcacccatggtggggaccaagcagggatcctgtcttagtctattttgtgttgctgtaacagagtacctgagactgggtaatttataatcaatagaagtttatttggctcacgattctgaagactggaagtccaagaacaggatgccagcatctggcaaggacctttgtgctgcatcttcctagcacaggaggcagaaggacaaaagagcatgagggtgagggggccagacttgttttcatcaaaaaagccaatctctcaatagctaacccactcccgagataatattaatgcactgatgaactcatacactcatgagggctctgccctcaggacctaacatcccttactggccccaccctaaacacttgcactggggactaagtttctaacacaagaactttggggaacacattcaaattatagcagatctctcctacccattttccagatgctgaaartaacacctcccagaggaacggcactgggcctggccttaggccaccagcccaccttgcctctcctgattcttttccgctttcccttgcttcattccctcatgcagccccgaccaccctcccagccgagggagtgagccagagccccactgcatccagagtcaaggcaaagtcctagtgggtccgggggagatgaggctgatttgttactgcccggcctcaggcacatgtttcttcctggaagaccactgttctctggtggggtagcatcttctgggcagctgggaccctgccactgatctgacctctttctcctcccgccrcagtcaacaccagtcaccactcgtcctcctacaagtccaagtcctccagcaacgtgacctccaccagcggtcactcttcagggagctcatctggagccatcacctaccggcagcagcggccgggccyccacttccagcagcagcagccactcaatctcagccaggtaagccccacagctggcgccccaggccaggcagggcccccatcccctcatccttccgcttcagagaggattgctgtggcggcccctcacccacctcacagggctgcagtcctggccacgggtggcagcacatgcccttggtgacctctggtggctttttctaccacaggtcacccttggggaagttgatatcaccagtgcacagagtgctggcccaaagcaaagcgacttgtctaatgttacaaagcccttagtgacatggtgccagagcttaaaaataggatggcccacatactgctgtttcaacccagcaaagggtagagcactgtgtcccggccctgtcggcctgggacatcagggacagacctgcatccgactcattgcagggagggcccgcacaccacagcccccaagtcaagggtaagatttgtcccaggacctggaggaaggggggtgggttgaggtgaaatgtgagtgacctgagtttctgtgggtgcagggctgtctgtgtcaagggctcggcatcaggcctgactcacgtggtggactcagggccctgtttctctagaaacaaagtgagataaatggggtgtttgtgttcagagcccctcatctgaagtgctgccccaggtcatcagtggagcccgtgtctctgtcacgtgacttaggttcaccaggtagaagagggctattttatttggactgacagaacttcaaacagcaacgcttctgagagccaactttttttttttaagacagggtcttgttctgtcacccaggctcaagtgcagtggcactgtcatggctctcactgcagcctctgcctcctggactcaagtaatcctccaccttagcctcccgagtagctgagactacaggcatgagccaccacacccagctaattttcaaaattttttgtagagatgttgtgagakccaataattttgagaacaagattttacagtgagtaagaaagcaactgctgctcaaagagaktgtcctggccgggtgcggtggctcacgcctgtagtcccagcttctcgggagcccaaggcggggggatcattctaggccaggagttcaaggctacagtgagctaggttcatgccactgcactccagcctggggcatcctgatacttcacagcttctgtacgtccttgggagaaatatgttctcctataactttgcagctggctttatccgtgtatcatcccagcccagtgagtggcaggccaagtcgggattttctcagtccaagtaaattttttttttttttttgagacagagtttcactctgtcacccaggctggagtgcactcgcgtgatctcagctcactgcaacctctacctcccaggttcaagtgattcttgtgcctcagcccaccgaatagctgggactacagacaaggcacgtgccaccrtgcccggctaatttttttgtattttagtagagacggggtttcaccatattggccaggctggtctcgaactctagacctcaggtgatccgcccacctctgcctcccaaagtgctgagattacaggcgtgagccactgcgccaggtcccaagtaaatttttactttctcaacacacagagggaagccccttctattacttctggagtctttcccttctcttcctcctccctgccctcctgcccctcctcccattccttcctccccatgtgtcggcccctgacgtctctcttggtgcctctcctccccaggctcagcagcacatcaccacggaccgcactgggagccaccgaaggcagcaggcctacatcactcccaccatggcccaggctccgtactccttcccgcacaacagccccagccacggcactgtgcacccgcatctggctgcagccgctgccgctgcccacctccccacccagccccacctctacacctacactgcgccggcggccctgggctccaccggcaccgtggcccacctggtggcctcgcaaggctctgcgcgccacaccgtgcagcacactgcctacccagccagcatcgtccaccaggtccccgtgagcatgggcccccgggtcctgccctcgcccaccatccacccgagtcagtatccagcccaatttgcccaccagacctacatcagcgcctcgccagcctccaccgtctacactggatacccactgagccccgccaaggtcaaccagtacccttacatataaacactggaggggagggagggagggagggagggagagaatggcccgagggaggagggagagaaggagggaggcgctcctgggaccgtgggcgctggccttttatactgaagatgccgcacacaaacaatgcaaacggggcaggggcggggggggggggggcagagggcagggggacgggtcgggacaccagtgaaacttgaaccgggaagtgggaggacgtagagcagagaagagaacatttttaaaaggaagggattaaagagggtgggaaatctatggtttttattttaaaaaagaaaaaggaaaaaaaaaaagtcaataacaaaaaacccagctcaagaacccattctacgccaaactggaaaggagaagagagcaacaggaagattccagaaacggggggccccagtttttgaagaactttatgaacttttcaaagattattttcatatggcagcaagtgatacggaagactgctgtcagggacacctgatatggaaatcaaatagatttttaattaattgaacataagatttagggatttttccagaactcgaaagggtcaacagccctccagaatgtcgggctgcagcctgaggaggctgatgtttggagctggtgtgggattggcgaagcccagtccgggctccctagtcaggaaagacgggggacggccaggctgctggaaggcccccgggggcgcggggcgagttttctttttctgagcactctggataaatccctaagcaacgttgtttctcaaatgtcattaataatgtgtgttgcaaactttaggtttttttcttttctgaaaatgtattttctctttgaatccacccctagtcgcgtagcgtagggctagcggtcgtcacagacaccctagtagaatgtagcactcagcacccttgtctcctaccttgtgttcaactccaatgataccaatagaatattcctcaatgtaattgcacaaaaaaaagcgatataacataggcatgtaaccaatgtggcggtgcaggtgtgcgggtgagcgagcacgtgtgggtgtgcacgcgccgccctccccgcgtggccctcggcgccgccaccctagctggcgcagtcttgacactgcatccttccctcctagtgccttaccgagcgacagacgcggcgtgagggtttacttccactggtactccaagaaactgaggctagtcagacacaatctcagctcttctgttgtgctgttgtaacagtttacgctggccttttttttttctttttctttttctttttaaaatgttaatgcccgttgtctttcctgggctgtttgctagcggaaggatgccagggaagccagcaggagctaggagagagtccgtggatctcgaaagaaatatgggagacagatgcccggcgggtgcgtctggagatggggacggcgggagttgagttgtggcagtagttgagttgtaatttgtgggcggaggcccagagagactccccacccttcacccctgccccactctgtccccagttccgccatttgtgaggccagaggtttccggactgttggcctcgccaggcagccgtctcccgccccaggcggcatcccccagtccctcccgcctccacgagagcctggagctctcagcctcgcccggggctccactctctcctccggctccctgggctgttttgctctaacgatcttgccagatccctccctctgtagacaaccaccaacctctgtttgctgttgaattctctcctcacattacccaggtctgctcaagacatgattttggttttggtttctgagggttctagtgggcagaaggttggagggacacttatgagggtggccgggggtctgacgctgcactttggaaaaactcacacagttgaatttccaaagaaatctgccctttgccctctttgcacctttgatacattctggaagttttctcaggctttggacacttctggggatggaggtgtggagaagtggggagttccctctcttcatagtaaataactctgaaatatgtgaatgtgaatggcaggagaatctggccaaggatggggccgaaaagggtggttctaattgtttgcttctgatgttgagtctttagctgaccccacaggcaggtttccaaggtgcaaagagatctttcccgagtcagcggccccatcctcatcctccctccctttacttcctcactgtgcagtctccctcaaggatctactgtgaaaggtgtgtttgtagtgatatccaacctaactcagtaacgaagtcgttacttagctcttagctgtgaaataactctggaaacttccccaccccaaccataaattcttacttataaagaaacaggtccccaaactggaaacagcttagtccaggcctcagcgagaaggaaggacaccatgactgctccatgctgggcacagccgggcagtcttgccaagtgcctgctggaggctgtgccggcaagaggcctgcagcaaggagattcccttccctcgggccattatcaatactgtctttatctggaggtggggaagcgcagccctctgagacagcaggacaatggtcagttcagagagggtgagggcagcaaacgcttcagaggacacagaagccagaggacccccccccgccccacagctgggtcagcctggaaaatccatctattagggactttttggcagccagatggcagcaatagcccattaggtctcatcccgagttccaagtcttggctgcaaatgagcctcagttcgccttactggagagcacccccagattcctgggcacagttcatttccagccctttctagatctgatcttttagggggaaagacagcttaaaatgttcttttcattttaaagaaaattattctgtctgcttaagttggaggctacttactctttcacctgacattttctttccttttattcttccagatcaggaatgaaatttccatgctgctcataaagataatattattgtactaattatttttattaccattgtaattatgatcattatgttgatattttagtcagggttttaaatgcacatttattccaagtatctttgtgttttctctttaatatttaaacttattctctctgtgagtatataagtagactggagggacatccagatgtccagttttgtcaggcaaaaaaaaaaaggaaagacttaggaagtaggaaaattgtttctgtcatctctatcccaacaagagacgtcaagaaagatccaccacagaacaaaagtttaaagaagaatcaaagccttgattgggcttctgacaacatggtcaccatcaaggttgtcattttctagatcccagaggcctgggatgcgacgtcaggtggcatctcatgggctcggggaatgtcgagtcactgactgtccagcccttagccagcttctctcccacatcctcagagctctcctgtgcttctgaaatctgttaactaaatctttggcttgcctctggtatttaagcaagaaaattccctcccagaggtgaccccatccgcttccccacaatccatccttttgccatcggcgcacctggggcgtggcttaggttcttcaatgcagggacatttgccccctcccagaagctgctgggcacagtgaggtggcgtaagagtgactggcaggtggtaccttccccaggaaatttcaccacaccacccagttcctcagcctgccccctccccctgtgatgcatgcccccagcacccaattctagccagctggaagtgggtggagggacagcaggaggccagagaaaccctgaacaaagctgggcggctgctcaggcatcacaggctgcaccccctctgaaagcatccccactgggctccggccacatcttcagtgcactgtgctgtgtgcgctgggtgctcacacgctgtccccagacccacaaagtgctaggccccagttgaagaaaggggtgaaatagccagcttcaccgaagggaagggaagggaagtattgggcgatgccagccccacagacgctcagcaaacattagtgcacattctcctagtcctcacccaatggcctcctctacccccatgcatggagctgccacatcagaagccccaagagaagctccctgcaggagaggccagctccctggatgcccaattgcatacctggccgaatctgccattgagtcaccttagcaaataggctgctgtcactaggaccaagctctcaagcagagggatgccaacctagtccttacttagcccacgaatcatctagagcatcctctagtcttttgtgggctccctccttcccatttgaagagacattgttcagaggaagaggggaagatttgaaatgtcaggtcacggaggagtgtttaactggagcctggtgaaccgcagggcaatttgcttctgctcactgggttctgactggcccgtctggacgtgggcccccatgtctctgtgcttagggcctcttcatgatgttttggatgtttccaagggaagtgggtgagcagatcaaggggtgggagagtcgaggcttgatgccagttaatactgtgaagtggagcgtgcggtcagtggaattcagaggaaaaagaagggttggagcaaagcggcattcatctcctggactgttagcctttctagtcttcctggtggctgaggtgttcacgggctgggggagccagctgacctttgtcctcttcaacctagaagactcagcccgcccagacaccaacgtgtgagacggatggacatcaggaagggaaggggagattagcccaactgctgacagaacgatttcccttggttggaccttgggaatggcaaacactcatattggaacaagcttggggtggaagatttaggccgtgtgagcatgtgtgagtgagtggaacaaactttcttggaaactggagggaggagatgaggaggcttcgggaagtattactgatggctcatggttgagagagcgacgtggggacccagctcgccccagcttttgtcccaggttctctttgtctgatgctgagggcagggtggggtgtgggaccaccactcttgttggcctgtcaagtagaccctaggacagaaaatggaaagaaggaaatggctcggtgctctcaactagcagagagaattgaggagaggtaagggttccttctgcaggccagcctgggactccacagcgccagcaggagtgacttggccacaagacattccagccccagggactttgcaggcttcattccctgtctgtgtcttttccttctggtgtgttttacagacttctgatggggaagcttcaaacttgagcaggccagagatgtccttaccaaattggaaaggaaggtgaaactgttcctttctttagccaaagaacccttctcaaagacgcctccagaaatggacaaaatggccttcccttcgttcctttccaggcaataatgacatcattagtgatgcaattctatttgtctttctctttcctctctgtccttttttttaaaaaaaaaaaatgcatttatttcaaaactgtgctattcttttaagaggagtggaggtgaccccttcgatgctgctgctatcgggagacaaggtgccataccaatacgtgggcttgactaatcccaggccaccatgggagagagcaaagcagggctgccaggagttcagttgcatcaagggcgtagagcacgcgggggctgggctcggaatagcagtacttttccactttgatgccttagaactctcacttctcatctccacagaccagactcagtaaaatctcaggccactagagaatggaaggcggtgaaacaggatttaaatgcaaaaaaaacctattggaggcttttggcaccgtggctcactagagggacccagcatagtagaggtttctcttgttgcagcttctgaaaagttcaaaaaagaactccaggccgttcttccctcaaacccagtgagagtttgcagagaagtgccccctgcagggctcccgtcccagaacaccagcaccagagagggtcttcccgatgccccccgctggacttgcccaagcctctgggagcccctcatctcagatccctgtgttgaacatgacactgactgtcccttatttgttaaaatttgcaatatctctcaagtaaataatagccaacatttgttgaatgctttcatgactcccgggctaaggcctttatgagcgttgtctcaaggggccccaacagccatcccacagggagggggataacagcccccatttatagataagggagctgaccggatgctctgagaagtggcaggtgttgaaggaaggataaagcagtgatgggccagaatccccaaggttcccttttttgttcatcaggcccttcctgagatgtgatttttaatcttttaactttttttaattaatagcaatgcgtggcctcatatttctatgaaccatttagtgatactcccgcttcctgcatgccacacactgtgctgggaattgctcatgggttgtcctgtttcatcttctccgtagccctgtgagatcggcaatattagtccccctacagccaaggaaactgcccagagccacacaactcttgaggggcgaggagggcttgaacctgagtctgcccagctccagaactgagcttgcagccattagccacagctgtctcctgcatgtctgagcaaagaaaggcctttacacagcatcaccctgtgccatcccatgcaccgtgggactcagctaaaggactgtgcaaagagggggctcctgagttggatttaggcaaaaggggcagaattcgtttgatttttagagaaaatctctggagagtttcttttgattcatagaattccttttagatttctttccagcataccaactagctttagtagtgctgctacaaccagctcttataagtaagagtgaaaaagtattcttttcttctttaaaaaataagtttttcttgcttatagttaattctagaaaggcaatactaaaggtatatatttttttcaaaatgctattttttactgcacttgataattatcctgacagctctgatctctgtaatagattcactcttcagctctgggcagaaccagaggcagggttcacaccaaatttgtaaataccatatgtgggtctggtgtccaggaacttttttctttctgttaaaaaaaagaaaaaaaaaagaaaaaaaaaaagaagtagaggtggaagaaagacaagacttagaggaacaaaagaatgttttcttttgagatactcttctcaaagaaatagcaacaattgtataaacaggaaaaccagccagctttcatgataaaaggaaggcgtgtctcttgccctggtatgagattaacagaaatacagatgcatttttattttgattgaaagatggtgagaatgtagaaatgcttaggactagatttttaattttttaaaataactattatcatttattatgaaatatttgttcagttgttttgagtgggtttcttgttccttttttcatttaaaaccttctttgttgactggctccaggcttgtttgcctaaattcttaggtagtttacacaagttctagaatcttttagaactttaactccattggaagcaaacctaactaatcggagtttgagatcctggttggtttcaataggtattctggaattctggcagaacacctaaagattttttttttttttagaaggttttagatacattatcttacacaaactgtgacctaatggcaataattacctcaaatgtgggcattcatcctggttttagccttttttgaaatcatgtagccagcttgatcttggaatttaaagactatgaattctctgtgggctgaaaataatgattacttcatacccccggtcatcgttgcttaagtgaattctgaaaatagctcatctttacaacaaaaattaaaccaaggaagagattattctttgtgtgttgtactcaaatgcgatgttcaaatgcacatgttaagtatatatgtttttagctactgtaaaatgctgttagccttctaagctatcaaaacagtcacattttaaatgagtaaactaaacaattgactgtggatacttaagcatatttctggctacgttttatagttaaagtgttttatagtttacatttagactggtactttttaaagaaaagttctgtttataactgacatccgcaaaccccagtgaatgcctcttagttggaggttgtgtctcccccaaggcaagtgtgttgtcccagactcttctgtagtccagcatgcgcacttccctctggattattactttccacgtgaactcaagagaacatgaaaggcaatccagatggagggaaaaggtgtgagtccgcagcccgggccagatgcgaaggtctcatgcgtgtcgtctaaacacttgtcttcaaggccttctctctgacatcttggaagagtcattgagaacagataacctggttcattgatttttgtcttgatttgaatatttaacttattaatagatccactgatttccaggcaccaggcagtagaagagactgggattcaggtgaccatgaaggcacagctgctacttctgggccgggggtgatattttgatcagcgttttgtaggggaggaccatatacccctattcccatggtcgctggctgggttttccatatatctgctgtcatttattcgttttccccttaaaagcaaaatcaatgtaaaaggctatgtttacgttttactcattgtccagcttagactcaaagtctagttcggtgggagggggaccttagcatcctctcagagatggtcagggctgagcaggaggaggcagagacagaggggcagctcagcctggtccattgagacccactctaaacagacatcatatttggaacaagaagatgcttcgagacaggaatgggccccactgtcatgcagaaacagactgggggaatggcagtttccctgagtcttggtttcttttatgttttctcttgtgccaccaccaaactgcagaggacctgctgtgacctaaagggcattcctttagcagataagaccttgaaaactgcaaaacacctgggaccagggagcttttaaaaaatacaaaaaaataccacatttgctttttccctgtgaactgtattgacagcgtgttcttaggacagtcttttggtggaaatgttactgtaaaatagttttcatctcacccctcctaatcatactcccactttcctgtttgtgtggtggtgttgctgttttttcctttacatgaattaaccaaatgaattttgtgtcattgtttttggggcttatatttttaaaacatagaaattgccttttgttcatttgaaaagtaagtatgttgtatctgaaaaagggctctgcctctgctctccctcgcttccttgtaaccaatctccaaacgaatctctcctggcaccgcccccttccttatatagggtcactgtccccggggccacctctgcctccaccctgctgtcaccactgccctgggccaaggcacccaggactcccagaaagcgcgagagccagcaagaaggccccactcagccttgagactggtggtcacacctccctgtcagagtcgcctgctgggctgaaggggcaatggattgtcattgttgaaattgtttggctcaggttataaggaggaacttgggaagtagaaagtgacttgaccatgtgcatccttggtagcttcctgtaactaacaaatggaacagagagcacacccccgccccgccccaccccaagcagatgttcccgtcagcgctgccctgagtcagtcggtcccccgtttctgctctcctcccttttgtgttcctgctcacttcaagcttcttccatggactttccagggcacagtcatctctagcccccaaatcatctcttcatcctctgtgtgtgcatttttttaaccaaatgaaatagacaagaaagtcatactttggggcagcagaatttctaatttagtagaatcactgtatagagatagatgttgatatatatgtttgtgtatatatatcaaaccaaattggataggagaagtatagctttacagatgaggagaaggagctctttagaggtcggagtcaagactggtgtcttggacgtgcatgggctgtgtcccaggccactccgcacacatggggctgaggcgtggcgccgggcccttgtcatccacctcaccacggcagagccagcaggccctgtagggtgctgctgctgtctcactgggtcccagcttcaagcgcatcagtgggtgacgggggcaacaaatcagagtgactggaagtttccatcccgttttgctttgaccacgtgtactgagctgcagcctctgatactctgtcacgtttccaaaaatggtatccattaggatagaaagagaatggatctgcagaaatgtttacctttcaactgctcatgaattcaggacactggatagaaagactcactccccaaaatgagaacagggaagaggagacccggcgacactaagtcaccaggtccaaggaacgtggctccctccccagggtcatctcacctagatctttctctcccaggtcatctcagctcaatctcaataaccctatgaaagccctggtctgttgtgttccttcaccgtacggtttctgtaataaaaagtgttaatccatgttaatctgtgtgaaaattattgcgtgcaacagtattttctcgtgtacctctttttcctatgtgaattgtccctcttttttatttataaatgtctacttttgtttttttaaagacaaaccaatgtgttgtagacctatatgtaacctattccttagtctcatattataggtatgttataagaatggatattttacttggctttagaatgttttacaagaaaactaattcttaactgatcaagtccttgctactaaaatgcttgtgtttttcatcatgacgtcgtgtgcttctaaattaatcattttcgttgtagaaaaatggagtgaatttatattagtcttggaaactaataatagcattgtaaatttatgagatgattttaacagaaaaaatatagaagaatatagttattttaattgtaatattactaactgtagggtgagaaaaaggggggggggtcccattgtggtgaactatgttatagcttgttactcatagtttctttttgatcattttttcggtctccgaggtgaaatgacttattaattaaaatttgtaaactcacatatgcatattgtatatgtgtagaaatgtaatcacactttgtcttggaattacattaaactgtttgaaatcactgtacacctgcctggcatgcttatttatcctggaaccagacctgtcataaaagcgaagaggttattgttacaagtaacatatttggggtttgtttgtttatttagatggagttttgctcttgttgcccaggctggagggcaatggcacgatcctggctcactgcaaactccgcctcccaggttcaagtgattctcttgcctcagcctcccgagtagctgggattacaggcatgcaccaccacgcccggctaattttgtatttttagtagagatggggtttctccattttttggtcaggctggtctcgaactcctgacctcagatgatccacctgcctcggcctcccaaagtgctgggattacaggcatgagccactgcgccgggccgagattatttaatggctctggaaatgtgtagaagccaccactgcattgaacatttgcagagagaggtggggggccttgagatcacattactaccaattcccatgcagttgagtggggctaagagtctcccagcttcctgctgcctcttccaagccatttcagccccatctgctcccaatctctgtccctgacacctaaggtgtggctgtcacctgctgtcctggaagctttccaatatgcatcccggatcctccgcacccaggccctgccgtctcaccagacaccatcagcacccggagcctcgtggcttgctggcccattgccagggcccttgccactgcgcacttgagctacgtgcgccacagccccgtccaggcgctgtgcctgcagcagctccacctcagcaagcctaagaaacgccacatcctgctgggactggggtttcccagccttctgacactctttttgtcttaaattatggtaaaatatacataatataaaattaccattttaagtggactactagcaacgttaaatacgttcacattattgtataggtgtcaccaccatttccagaattttttcatcatcccaaacacaagttctgtccccattaacaactccccatttctccctccacccggtgcctagcaaccacccttctactctgtctccatgaatctgcctatcctagatatttcatgtaagtagaatcatatatttgtccttttgtgtctggtctatctcacttagcataatgtctttagggttcattcatgttatggcatacatcagaattccattccttttcatggctgaataatattccattgtatggagagatcacatttggctgatccatttatctgttgatggacatttgagttgcttccaccttttggctgttgtgcaaatgctgctgtgaacattggtgtgcaaaagatctgttcaaatccctgctttcagttcttccgggagtgtacccacaagggaactgccggatcctacagcaattttaagattaaccctttggggtcccatcattctgttccccacagcagctgtaccgtttcacattcccaccagcaatgcacaaggtgtcctgtttctccacccagcactcatcctggcttccatttccaggattttcaagtctggggagctctgggttccaagccctcggtcttctgtgcctctgggttggccagactaaactccacagcccttccctccacccaccttttcccctacaccctcagctcacagccttttgcctctgccacaccccctcgcaatggctcagtgattctgctgtccacctctgctccgagggctgctggggaagaccaccaagccctgaaaacgaataacctccagcttcgccaggtcttctgttccagcagcaacttctgtggctaatgggaaacaccgatctctccaggccctgagccccactctcatgagacctctactccccaggcaacccaaagaggttaaggctgctggacagagtgccctcatccccctcctccagtcgcagtggcatctgccttgccgcctcggatcccgtcagccctatataggagaggaaggccctgtgcttcccccgtcctttcctctctcccgagggctctttctccgtcaagtctcccctccctctttcagatcttcagccgtgtctcctaaatgtccttcaagaaccagcctgagtgccctctctagggagcttgccctaacgctcctgactgaggcagtcagcgcaggtctcggttcccagcgccttgtgcattgttctcattaggccacactgtcaacattgcttcccttattttccttccctacaaaaccctaacattcttgcaagtaaagatctgtctttcatctgtttccagggcatcttattatgatgccaggcacagagtgggtggtcaatgaaccttcgggtgaatgaacaaacccctcagcccaccttcatccaacccccaacccacctttccactctccaaattcagcatctcccagaattccagtaataaaaacaaaaccctgaatgtggcccacacttcaactcggattaaattcaactcaggtaaaatgtaaactacataaaatccatgcaacacattcggataaagcttcagaattcttccatcatgcattttgtcatttttatgacaaatgcattgagaggaatcacattgtgtggaaatggaaagggaagtagattctgcacaccagtgagatacgagtgggccaggctggcgcggcggcggagggatcacctgaggtcaggaattcaagaccagcctggccagtatggtgaaacctcgtctctactgaaaagacaaaaattagccaggtgtggtggctactcccagctactcgggaggctgaggcaggagaatggcttgaacccaagaggtggatgttgcagtgagccgagatcatgccactgcactccagcctggacaacagagccagactccatctcaaaaaaaaaaaaaagatacgagtgggtcaaaggggaaggcagtgtagctgtatccaaggagctcacactcgtgcaccataaagttgcttaagtctaaagtgaaaagataaacttactgttgtcgatatttcccttaagcatatttaatattggggtaataaaaatgataagctgcttaatagccaaggcggcccctagagaaagaccaagcaaacaagtaaatggcgccctcacttagcagccaggttgtggtggtccctgttgcggcattggctctagagggcgtgctcctgcatcacaaacccctccttgcttttagggcacatggctgggtgtcagcagctatgccctagcctgttccaaacaagtgtaaagttttttatgacagtccagcttatatgtgttttccaaccctttactagaatagctaactttaagcaaacattaagtataaaagcagagcatacattaagagcaaagtgtagatgtaacactattagggttggatgtcctcatgtctcttaactttcattttcagtccttcctttttgccagcatttggctttaaagaaggaatctgtgccgcacgcagtaactcacacctgtaatctcagctacttgaactcaggaggcagatgttgcagtgagcccagatcacaccattgcactccacccttgggcaacaaagcgagactgtctcaagaaacaaaaggaatctgggactctttctttcacctgcctcacacattttatatccaacttggaccacacaaacttcctcttaggaaatttatttccttcatggcttcccatacaccatcttgcactacttgaggatgaaaaaaatctactgttcagcatcaaccccaaccctcattctatacggaagaaactgatagctagaaactagaaatttcatccagtattgtgagaccatcgattccattttgtaaatgcttgttttccatgtacagagatctctaggtctatggtctcttctacagggtcactcctcatttgctgccacttctaaagcaatgctagattacaggtaaccttgaaaaggatcacttgacatacacttttctgtcttcatatatattctgtttctttttttgtttgttttttgttttgtttttgtttgtttgtttttttgagacagagtctcgctctgtcgccaggctggagtgcagtggcgcgatcttggctcactgcaatctctgcctcctaggttcaaatgattctcctgcctcagcctcccgagtagctgggattacaggcacgtgccaccacacccagctaaattttttgtattcttagtggagacagggtttcaccatattggccaggatggtcttgatctcctgacctcatgatctgcctgccttggcccccccaaagtgctgggattacaggcgtgagccaccacacccagcctcattacttctactcaacattatttatagaagttaaaaaaaaatacaacaaaatacaagattgtataatatgaaacaccatataataaaaatattgaaaagggagacgtaaaactgtctttactcagagaaaacatgattgcatacaaaatcctaagcaatctacataaaaatctactagagctaacaagtcattcaggcaaagttacaggataaatggcctgtgtacaaaaatcaattgcatttctttatcctagcaacaaataattggaatatgaaattttaaaaacaataccatctataatagcatcaaaaataaaaaatatttaaggataaatttaacaaaatatgtaaaagcttatccttaaaacttgtaacacattgctgagagaaaattttttaaattgtaaatgaatccagagagccaccttgctcattgattgaaatgctcattgttaaaatttcctctctcaactgatttatagcaatgcaatctcaatcaaaatcctagcagaattttttttgtagaattgacaaactgattacaaaaatgtatatgaaaaattaaagaacccaaagaagagtcaaaacaattttgaaaaagaatgaattacaatattgttgtaaagataaacaaataaattaatgaaacaaaacagagtatgaaagtaaatccaggctgaggaaggcagattgcttgagctcaggagttcaagacaagcctgggcaacaaagtgagaccctacatctacccaaaacacaaaaaattagctgggcatggtggcacatgcctgtaagcccagctacctgggaggctgaggcacaagaatcacttgaacctgggaggtgcaagttgtggtgagtcaagatcatgccattgcactctagcgtgggggaagagccagaccctgtctcaaaaaaaaaaaaaaaaagaaaagaaaagaaagtaaatccacacttatagggtcaattcatttcaactaaagcaccaaagcaattcaatgggaaatagaaagtttctttaacaaatggctgtctatatggaaaaactggctgtctatatgggaaaaaaaggaaccttgatccatacctcacaacatatacaaagaccaattcaagatagatcataaatctaagtgcagaagttaaaactattgagcttctagaacatatagcagaaaagtctccacaatcttagataggtaaagatttcttaggacataaaaaagcaaggtgtgcaaaagaaaaaactaacaaaattgactgtatcaaaattaaaatcttctgttcatcaaacatcatcatttaaaaaatgaatagataagtagtggactgggagaaaatgttcatagacatataccttggaaagaaatgtatccagaatattgcataagctcacagctcctacgaatcaagaataaaaagacaaacaacctaatttttaaaaatgagtgaaatttctgaacattcccttcacaatggaagatagacaaatggccaataagcaaatagaaaagtattcaacaatgctattcatcagaaaaatgtaaattaaaatcataatgaaacacctctacacaccccgtggagctgacaacagtatttagagcaaatgaaactgattctttgctgatgggagtgtaaaatggaatagccactttggaaattgatctgacaacttcctatatataa

SEQ ID NO: 8860 - DNA, 16964 bp, Homo sapiens
aagcttacaccctaaagaagacacacatatggaaatgcgtagtttcaagccagtcaggtgctctataacaggataattttgaaagtgctatggaaatcctcagaaaaaaacaagtaaataaataaataataataagaaaacctctacagaatcctggaaagactttccagagaagctggctttaaaagctgggcaggccaaggtaatttatagattcaatgccatccccatcaagctaccaatgactttcttcacagaattggaaaaaactactttaaagttcatatggaaccaaaaaagagcccacattgccaagacaatcctaagcaaaaagaacaaagctggaggcatcacattacctgacttcaaactacactacaaggcttcagtaaccaaaacagcatggtactggtaccaaaacagagatatagaccaatggagcagaacagaggcctcagaaataataccacacatctacaaccatctgatctttgacaaaccggacaaaaacaagaaatggagaacggattccctatttaataaatggtgctgggaaaactggcatatgtagaaagctgaaactggatcccttccttacaccttatacaaaaattaattcaagatggattgaagacttaaatgttagacctaaaaccataaaaaccctagaagaaaacctaggcaataccattcaggacatagccatgggcaaggacttcatgactaaaacaccaaaagcaatggcaacaaaagccaaagtagacaaatgggatctaattaaactaaagagcttctgcacagcaaaagaaactaccatcagagtaaacaggcaacctacagaatgggagaaaatttttgcaatctacccatctgacaaagggctaatatccagaatctacaaagaactcaaacaaatttacaagaaaaaaacaaacaaccccatcaaaaagtgggcaatggatatgaacagacacttctcaaaggaagacatttatgcaggcaacagacacgtgaaaaaacgttcatcatcactggtcatcagagaaatgcaaatcaaaaccacaatgagataccatctcacaccagttagaatggtgatcattaaaaagtcaggaaacaacaggtgctggagaggatgtggagaaaaaggaacacttttaaactcttggtaggactgtaaactagttcaaccattatggaagacagtgtggcgattcctcaaggatctagaactagaaataccatttgacccagccaccccattactgggtatacacccaaaggattataaatcatgctactacaaagacacatgcacatgtatgtttattgcggcactattcacaatagcaaagacttggaaccaacccaaatgtccatcaatgatagactggattaagaaaatgtggcatatatacaccatggaatactatgcagccataaaaaaacgatgagttcatgtcctttgtagggacatggatgaagctggaaaccatcattctcagcaaactaccacaaagacagaaacccaaacaccacatgttctcactcataggtgggaactgaacaatgaaaacacttggacatagggtggggaaaatcacacaccggggcctgtggggtgggcgggggggatgtgagaggaatagcattaggagaaatacctaatgtaaatgactagttgatgggtgcggcaaaccaacatggctcatgtatacctatgtatcaaacttgcatattgtgcacttttaccctagaacttaaagtataataataaaaaagaaacaacccaaatgtccatcaaaaacagaatggataaatggattgtagtatattagtataatggaatacagaacaataaaaactgaaagaaccatatctataagttctttagtttttgacatggacaattcccacaaataatgtattaaaggattaagccacagagtaatacagtattattccatatacgtaaagttcaaaaccaggctaaactaaatcattctggatgcatgtgtagacagtaaaactatgtcgttattatcatgaaactcaggaaggtggtgatacagaggggagggaagcggatgtgatgagggaggagggtgtgatcagtagggaaacacggcctccagcgatgacaatattccagttattaaactgggtgatgggttgtactgctgttctttataattcaatacacattttaaatgttcttttgtatttattcaataggtaatgaaacttattaaaaccacatatcaaaaaaaaaaagaaaaaagaaaagccgggcaggcattccgtaggtggtgaaatgggggatgcaaataataggctgaggaattagcaggtgccaagaatgtggcaggaagacaaagggcatggtttgtgtggtgcccctggggtgggtttctatggtttcctgtgagccacgtggtagtgagataggacggacccttatgccacatttaggagtttgaacttgagattatggtctggaaagccatgcatggtttttaaacaaacgtctcatatgagtgcattggggctttagaaagataacccggctcagtatttggtatgaaaagaggctggggagctggcgcgtaggccaccaccatgggccagggactgctgaaagcagagggattgtctgcaatagagaagtgggggctggaattgccaggcagtgactgctcacatagggacagagcacaggagggcccagtcccgaggcgcctagctgttataaattcatactcagggtgggtcgtgaaccactggaattttaaatgaggagtcaggctggaatggggaatatgacttgttccatttgagatgcgtggaacacaccataccaggtgaacctgtaacaaagacagccaaggatgtttgtaaacagttagggacggggatgagtagactgtctagagccagagacctggagccatcagcatcccgattccgagaggttccatgagaatggatgaaactacacagaacatctagtggaggcacaagggaagaaatccacctatttctgtggaatttccaatatctggaggtagtaaaaggaagagacagaggagggcgaggggagagcgcgcgcgcgaaacggagactgagacccagccatcagggtgtgctgggagaactggggagacgagtctgcccctccgagtggacccagggaagagggcgcggtctacgcagagcccgaggcagggaagcgggaggggcccggagagcagccctgggtgaggccctttggaatggagaggtctcaggagtgaagcagcagccagaggactgagagtgtctggaaagtgaggaattggttaaagtaacgccggtggctgcaacagagaggggcgtaggtgaagaagcacccccaaccccatcccatttgagaggaagcagacaatgaagaagagaatatgaaagatacagaaagatgaaggcaggggtggaaagaacggaggggggggacaggaagggaaggagaaggtgcaaccaataggctgtaagcacaggggcaagcttgggcgccaggggagcagggactcggcgcctccccgatctgccccaggcgccacggaaattccaggccccgccacccgcactcccggagcctcctccgcagcggcggctcctcccactcgccctcccggggctcccgcccaagcttccggcgcttccaaactcactgctcgcgtcaccccccgctcccatccggcagcaaatcacagcgcagcaaatcgcaagcctagaaacagacgctccctctccaggggcagcttcctattcagggcgggtctgggcgcacctgttctcgggacccggccctcggccttcgccgggtctcgcggtggggcttgggaccccggctggtgccagggcgacccccacagccccgcgactctctttcccggccgcctcccgccgtcattctcctagttcctgcccgcctttgcctcgctctgattcctgctctggccttcctcccttcccctctctcacgcactccagggaagaggtggcctccgcgggaacctgggcacctccgtgcctgccccgcccggtacctggcagaggcccccacctcctgctgctgctgctgctgccgccgccgccgccgccgctgctgctttgactattcctcctttgtagatgcttcacgtccgccttgattgagggcaaggcttccggcagatgactcagaaccgttcgattgctctggcttgtgcaatccctgattctttgggcctgtgtggatgtctgtgggcaccggagagagggccagtgcctggtccttggagggtggtttttataaaaagtgtacacattggctattgtccttttttcaccgttgattcacgtttgactccactgtagttagacgtccacccaaacattctctgaaattgctcctgataaggatactaatcattttctaattgccttggccaaaaaatacatcccaggtcttatttcattttgtttgttggcgacatttagccctttcttctttgaccttcccaggatttccagagcacccttcccttctttcctgactcctttgcttggtatcctgattcctttcctaccattctaagccctcttcttttcattataatatgatcttcttgtatgacctccactatatccataggttcatgtttcaacttttaacttatttcttcaaaatctctaacctgtctcgagccgtagatgttacctgtgtactactggacatctctcagaaacctgggtgtgtccctccgcagttcttttaactaaatgatcaacagtcctgttacttctatcacttttgtgttcctcctgtccatactctgtcacctctatcatgtctcatgtctctcctaaacaattaattttcctacctacagttctgatccatgccaacctattgcctactctgaagttcaggtaaacattccaattctaattattttatacctcagtttaaaatcctttataacatcctcttatccaaaaagataaattagaaactattgagcaaggagtgtaagcctcttcacgtcttgatttctcccttcttttctttagagccatagcaaattatttacattccttcatatcctctgttcatatacatggggttcctggcatgcaagcttgtctttcaaaattcagttcaaataatgtctcctgcaggaagctctcacagagctctccagtttgggaattctgcttttaaagatgcacattcccactctgcaccccaaaccaattaagtaaagatctcttggaggagggaacccagcagcagtattttgtaaaactcgctcagtgatttccctgtggaatcctaaaagtaactgttcccaagaactctcctcaataagtcttggtgcaggattcacccccatcttttctccatgactttgaaacccctctctctagtggctacagactcacatttgaactgtgcccaaacttaccggctctgccagttgaaaatgccaaggtcacttccccattgtgcatcaatttctccttgttggtcagaactagatccagactttgggccccactttgtccatccactccttttcctctttgaccagcaaaacagattaaaagatgaaaaatgcttgttttcctccgtgaaacttccagcaaatgcctggtggtttgaagtcctttacaaaggatataatttggcccctgggagtttggttgtaaacacagatatcccatgtaggaaacacagtgcgtgcaggtgcaaagaggcacaagatagcaccatgaaaaccatgacgtatccaggcctgcagtggtacagatagtgtggatgaggcactgcaagacaacgtctgatgtgtccacagggccatgtcgtgaaggccatgtggacgctgttggtggtgtttcttcgttcccttgtggactatggggaaacacaaaaggattttaagctggggagaaacataatcatatttgtatttacgaaggtccctctggctgcaacatggagtatattgtaggagggtaccattgcctgcagtgaggcgttaaggacgcagcatggatgagagatgaggaaagctgaaatgaaacagaggcaggagaaawggagaggaggacatggccttgaggaatttccaggacataaatttggcatcacttcttggaccatgagaggaasagggagcaggaagaatcaaagatgaatccaagaatgaacaaatctaatttttgaaataatgcaatgaaaagtagaactggtctgttttcctaggtaaggaatttgtcygcaagtcgatattcacgaggattaattgtatttattttctgagtatggacaatttaaatgctgggccctgaagggaaacccatctctcagaataactaaagcccaatttcagagtgagcctgaacaggctccccactccaccctggcccactggggacacaacaggtaactgataaggttccagagtatataattcagtgcctcagaaactgtcctcagcctcatcttctgtcttcttgcctcatacctaacttcacatctcttcagtcagtactagggagtatctgctggttctcaactcccgactcaaccttgacctagttttgtctgactccctcggctcctgactttgtggacctcaggaagggcacactcctaggctagtctcaggttgagctaccaccgtctccaaattagacttccacttgtcaagaaggaagtagagtccaggcataattggagcttcctggggtgattcgaggtctctgtactccttgctgtaaaatgcacaaatactccaccttaaagaatctcacggggcagggcacagtggctcatgcctgtaatcccagcacttttggaggccgaggcgggcggatcacctgaggtcaggagttccagaccagcctggccaacgtggtgaaaccccgtctctgctaaaaatacaaaaatgagccaggcgtggtggcaggtgcctgtaaccccagctactagggggcactgaagcaggagaactgcttgaacctcgggaggttgcagtgagttgagattgtgccactgcactccagcctgggcaacagagcgagactgtctcaaacaaacaaacaaaaaacaaagagtctcaccggagttccaaaatatccttcagtgactgaccatatactctagcaaaagttacttcatatatgcccggccacagctctcaatctcccatgagattcccagcaatcttccctggttttgagaaagtgtaaaaaaacacaaaaagcaaaaacaaaacacacttgcttcagctaattaatgctagagaaacaaacatagcatcataaaatgtaagcatttgaaagaaccatattgttgacgctgttccttatattttgcaggagaggatggtgaaatagaggtagtttgtgtgatttgcccagagtcccatgaagaattcacagaagaattgagactacagtcagtatggccacattcccagagaactgctttttctgccataccctgtggtaataatattgtcacaagacaattggacagtgtttcacatattcagtgatggaagaagagtttaattgaaataaataaatgtcaggaaaaattaattcgattgtgataacacttaaggaatggagtgttcactctctaggagaagttgggctaaatgatgaaatggagtgtccgtgtatgtgatctgtggtgctgttttgctgtagttaattcctakttttaacttgaaatgtgttctgactgcgttagtgccaatttttttgagaccggtgtacctatcctatcaggtacattcgatttacacaagtacattctcttttcagttctcccaccacttctctttattcaaacaattaaaaccttcttgaatattatttggttagtcctttgagttaatgaatcaattttacaggatctgcttctgtcatttttcattaacattccccagacaaatttgtactgcttactaacagcacaatcctaaattcaaaagattactgagttataaagtggatgtctggacmatccaaaacataatggctgtggtttgggtgtggatttttgtctccacsaaaacmcacactgcgattcagtccctgctgtgccagtgttccacttagggagaggtgtctgygtcatgtgggtggatcccttgtgaaagccttggtcctgttctcctggtagtcagtgaggtacaattagctctcatggaatggattaattcctccragagtgggttgttataaagtaaggtttctccccrtgtttggtccctcttcgcatgtgcctgcatcccctttgacctttccctcattgaacctgcaggttcaatgaaggttcactgcaacctccgcctcctgaggttcaatgtcttttgacatagcacaaaagccctctccagaagcctggggatgccagtgccatacctcttgtatattctgcagaatatgagccaaataagccttctttctttataaactacccagcctcaggtattcctrtatagcaacacaaaacagactaagacaatgcttatatgaaaatgtctagattgttaccaagacaaatgtaagcaatgaaacatacatgttgtagagcctctgctgatcaagggtatggagaacccagtggaccttaatgtgaaaagcattacattaatatgcctggtattgtatttcaaggaacttataaaagaaaaaaaggctcctgatatggcattgcctggaaactgccattagtccctcattagtgaatcgtcagtctctccattaatttgaagggggttaaggggaagtattaagtgacaaagaatttggagggaattagaaagatctctttggtttctaaacgtatcttttcgtgctttgattgaatgtgttgcagataggaaagttgaataggagatccctgatagcctctcagattttagcttatcaatagagttaccattgattgttgaaacagtgtgagttcctgccacttgttctagtgtcctgtctggttcagcattaatctcagaattttcagtttttaatggagtagtttttctaatagctgcacaccctcaagccagaatgtgtttgctagatccacactgtggacttcagtctcctgccacactctttcataatagtgggagagatgcttattcagttacatcaggcagtgttcactttgcaaacaaactacatcagagatttgaagagaagagaattaatacaaagaattattaagtaatagattttttaaaaatactgtaatggcagcagatgtasaaggtacaaaagagaaattgtcacttcatgtcttggggtaagtggaaaaaaaaagaactaaggacttaggaaaagacataggtcatagactgtattatgtcctcacaaaatttttatgtaaaagccctaacccctaagatgatagtttctggagatagggcctttgggagttgattggggtaaaataaagtcaggagggttgggccctcttgaagaaattagtggcattaaaagaagaagagataaattgctctccctgccatgtgaacatagctaaaaggtggccttctgcaaaccaggaatagagccctcttcagaaaccaaatctcctggcagcctgatcttggacttcccagcctctaaaactctgagaaatgtcagttgcttaaactgcccagtctatggtattttatttttattttttgaatcagtgtctcactctgttgcccaagctgaagtgcagtggcatgatcttggttcactgcagcctctgcctcctgggttcaagcgattctcctggctcagcctcctgagtagctgggactataggcaggtgccaccatgcccagttaatttttttgtttttgttttcagttttgtattttcagtagagatggggtttcaccatgttggccaggatggtctctaactcctgacctccggtgatctgcccaccttggcttcccaaagtgctgggattataggcatgagccaccacacccagcctatggtattttattatacccacctragcaaactaacatgactgaatgtcccaaggctgatattcagagctctttgaaggtgtggctgccacaggaacatgcagtctgcagtggctatgaaacttgtcagatggccaaagstggcttacgagaagccatatgtccttgctggagggtgtgggcaggctggggctggaccatagaagcaaatgcctggtagggatatagttgccagaggttgcatcttgaccaaatgcagaaatggccattgtgtggagaaagcattccctgagaatgtggctacagatgaccaagtgagctgctgggtgcctacactgaataatcctaagaagatcagaatccagaaagtgcatttctacttctatcttcttacagtgtctctccagctccctctattggcaaagcygaacactgggccagtcagtcaagttcttgttacaggatccaggtttactatcacaaagtccacaaaggtagatttagagctgatagacaataaattgatatctggcacagcaatgaatggagttctcaggcaagcctgtcattaaatctggatgataactactgaatctgtctcttttcctgatcctctccagaatccttcatctcaaggacaatatctaaggaattcactggtaaaacattttatgcttggtcacaagcagctagagaaagcaaactacttccggcctggtgcggtggctcatgtctgtaatctcagcactttgggaggccgaggtggtggatcacgaggacaggagttcaagaccagcctggccaacatggtgaaaccccgtctctactaaaaatacaaaaattggtcgggaggctggggcaggagacatgcttgaacccaggaggtggaggttgcaatgagctgagattgcaccactgcactccagcctgggtgacagagcgatactctgtcttggaaggaaggaagcaaggaaagaaggaaggaaggaagcaaggaaggaaggaaggaagcaaggaaggaaggaaggaaggaagcaaggaaggaagcaatgaaggaaggaagggagagagagagaaagaaagaagagagagagaagaaagaaagaaagaaagaaagaaagaaagaaagaaagaaagaaagaaagaaagaaagagaaagaaaagaaagaaagaaagaaaactacatctgaagtcaacactagtattggtgggagaggaattttatgctgcattccccaacagccactagatacgccaatcaggtgtgcatggtccatgctatgatctgtgagtatcagatcaacgtcagcttgttcagcaagccctcaggactggaaacctccctcaagtcctctgccccctccatctccttcaacacagaagcttcagctcaggaaaggaaaggccacctttcacatgcagaagcacatcagcttctggaggggtacttcatgaaggtactgcctccatcttctcagtctccaaaccatcccttgctttggacctctccttttcaactgtggccctgcagccctctttgagaagagggatgcaagagccttagagttcccacttattgaagcataggaggagtgaaggctctcaggacctccattcaggactcctggagggggtagcaatgcttgcagagttcatagcgcccagatgcacctgaccttagctccatatcccaggatgctcatccctggatccaggatgatgtgcttttggtgccagaagtttctgagttccacttttcagatgggataacacagccaaagaaatcagacttcatcttaaagggagacaggtttctggtccctactcttcctgcactgtgctgacagctgcccttctggtaggagctgatataggtaagtttcacaataacaagaggaagagattactcatggcttttctggatgtaccaggcttgtttgagtaattttccagtgtttggcattaccagacattggatccacattctacctcgttgctagctacaagaacttgttcaagctacttaacttctgagtctcagattcctcatgggtttattatcactaaggattaaataatctatgcaaaatgtccaatgcaaagaaggtattcagtaaacatatctgaggaggtcagatcaactttttttcctagaattcaattctaaatggaactcactttgtggatacttacaagaaacactacatagtgtaagggaaatgtcttagtgcaatttcacaaaacacatggaattattatttgggaggctggacctttcacggaattgtagctgttttgattgtctcatattcaccttgttggtgaaggagggatctcccccattaaatagtaggagataactagacacatggcatgacacactggacagatgaaattggcggcagtttattagtcacaactgctcacagggagggaggtcaccacatgccatgcggggtcacaggagagttgcatttgggaatagagtgaaccagtaggggctgtggaaggcaggctttgcagtaacaagaggaagaggcgattcctggctcctccagatgtgacaggcttgtttgaataattttccaggctggagggaagtgagccacgttgagacccagggagggtacagctgactgcctggtaagggaacttagaagggggaagagccttcctgctcagtgggtgaatagggtgcacatatctgacaagagcaggggacttcatggccaggcctctgaggccctgagaagcccatagatgtcaaggcagcacatgagctttcaggctttacaagacagaaataaaatagtgaatgataactcttcaaagagaatatgacaaacaaaatttcacaagaccctctaggaacaatatgcatattgttatctctatgttttatgatttacatggctaaagtctgattatattatatttctataacagataaaaccattatcattcattttcataattcatattgaaatgatttgattatcctcattccaggaaagaaaaaaaaaaaacaccctcctgcttggatacttagaggttactccatttacactccccactcccacctcttactccacttgactggactatccacaaggcagtgcaaagaggtgtgtgtttccctgaagaagagggtgccaccctgttgctcctggctgtaacactcagaggctctctctgcagtggaagaatcatatgggctgattattccccacctttcagacttctttccaagtccaagtgttgggcagaggaggaagaggaatgagagtagcaaacccggcaacctctgatactccctctttcctctctcagcccacatataatgtggatgtctccttgtaatcttcagtctcattctctccctgaagctaagtagctggctttggtacaaagggaaaagttggccagttatggaaagaaaatatgggttgtgtcagtgaagttctgagggctcagggtctttctggctgcaagggggttgatggaatgtctttttagctgtgccctagaaaacaatataactctccctgttcaatctaaatcatcagtgtgttcccttatcactgatcacagcagttgcatttcaagcctgtaaaccatacagtatggcaataccagtgagggagacagctagaaatttttaaattcaaattttaacgctatttgtgaaaagaaaaactacctaatattaacaagcaaaaaaacctggaagagattatttcatctagagagacatcacagatacttgataagggaaaagctaaagctagagaaaaggtctacgagttggcaatatttccaaagaaaggttttaatgtttgcatagttgtttagagaaaaaaggactcctttttatatttgacagttttgtaaagaactgactataaaactgtttaaaatattatcgaaatagaataacaatatattttcacctttagttttatcagcaacccaggagtttacacgtgttgtggacttctctgtatcattcacaaagtctagctgttttatcgttgcttggtagaatttgccacaggaatctgtaaaaccctaggaaaaaccaaaaacataatttcacagctacagaaacaactaatatcactggcttacttcttcattgtgccacatcagaaaatcaataattttatgatttaccatatataatttgcaaataaagatgaggaattaacctaaagtccaaattcttttcagctattcctaatcttagcttataaactaagcaacgcggtgggctgcatatcaagtgattttcatcaactgctggatccttcatgagagtggcagtacacccatcaatgagataatttaaaacactgagaaatctccaagaagacatagaaatccttaataggtaagtacctaatagtggaccatcaagacacataaggcaacaactaatagaactgaaaggagaaatagatgaatccactattataactggagacttcaatatccctctatcaggaatgaacagatccagcaagcagaaaattagtaaagaacatagttgaactcaaaaacaacatcaagtaactagatataattgatatctattgactacttcatccaacaagagtagaatctatattcttctcaagcttacatgaaacatttaccaaaagagaccacattctgggccacaaagcacaacttagcatatttaaaataatagaaatcatgcaacgtctgctctcagacaataacgaattaaactagaaatcaataagagaaagatggctgaaaattccaaaagtactcggagattcaataacacacgaatcacagaagaaatctcaagtgatattaaaaacagtttgaactaaatgaaagtgaaaacacactgacaacactaaatgctggtgaaaacgtggagcaacaggaactctcattcattgctggtgggaatacaatattgtatagtcactttggaagacagtgtggaagttttttataaaactaaaaatatgatccagcaatcatgacccttaccatttacccaaaggagctgataaaacctgcacacaaatattcataacagctttattcctaaccggccaaggtagaaacaagaaagctgtcccccatgactgtactaggggatgttaatcacaggagggactatgcatgtaccttttgctcaatttttctgtgaacctaaaattgctttagaaaataaattctttttttttcttttttacaaatggtgactatagaagctgtcactcctgtaaattattaaatttgttgagtgaggattaacacagcaagtgctatatttgcctctacattttagaacaacagactataaatatgagtctgttgttccataaattacatgggaaacatatacaatcctagaccagcagtgtccatcggaactttctgggatgatgaaaatgttgtaaatctgcaatgtccagagcggtgccacataggctattgagcacttgaaatatattaatagctagttggactgaggaactgaataattaatttcatggaaaccttatactcatgtacataatgcatagcattatgggtgtttcaaactatgatcaactttccaaaaaagttcaaactatatttagttaatatattctgtagaattataatgatcttaacagaaacctacactatgccacataaaagcagaacatttggtggaaattaaatgagctgaaacaactaatttatgaaccatgcattatagaattgtttcccaatctttctctcaaactgctcacagctaaatatttaatttccctttccataattttgcttttactttggaattttatacttctgtatcagtatggcatggagaggaaatgtgactgtagttaggaacacaagttctgcaacttactagttgtgtgaccttcaaatatttgcttcctctgtttatgcctccatgttctctcctgtagaacaaggaagcagtaatagctacacctcacaagataactgtgaagtcctgatgaaatatcaccttttcatgtaacgtttttgaattctcagtaccacgtaactgatcgatgtacactatttcacttaatcctcccataattcatgcttttccaaaattgctgcctctgcctatttttcagtggtttggaaattatttaaatctctcagtgtaagaaaataatctgaaggcaaactgatgaatcacatattgatgacttcttgcacgcctaggtgatctttccatctgttaaacgtgtttttaaataactgtctgctattttaagttactatttgacaaagtgtggcaaatcaaacaaaaagaacatgtaattatatattgctattggtatgggattcttgaaaataagaataaataataaattaatctgaaatggtttacaaatatttctcatctttttaatttatattccaatatcaaaataacattttaaatatcaatgcttttctttcaaaatatccaccacgaattgatatttggttgttaacattttggttgtctttatatagaaaactagtaagctagtaaaaagatggcaataaactaaatagtgctaagactagtaaaataagtgaagttgtaaaatcacaatatcatatacaaatcttataaatatttcacttttatgtcttaccaccttcactttataccaatctgtttgcaaacaattaatttagagtcgaaagcaagtttgaaaaaatacatatcacagtaagagagatatcctctacaaaaataattcttataagtcaataagaaaaagacatacaaccccatagaaaaatgtgtaagaggatatgtaaataggcaattcacagaagagatagaaattctcaatacacataaaagtgtttaatcccatttataatcaaaagtttttatttttttttttgttgcttctcttg

SEQ ID NO: 8861 - DNA, 13445 bp, Homo sapiens
tctgcactccagcctgggtgacagagcgagactccgtctcaagaataaataaataaataaataaataaataaataaataaataaataaaataaactgtcccgtttgttctatttccccagcaagaggaaaacttgggcaacttgatccatgagaccgaatccttcttcaagacgagagacaaggagtaccaggaaacgataggtcagatcgaggtgagggctcgggacgtggagcccactcgtgaggctctcctgaggtccacatggttgagatcctggcgatcaaacacccatgtgtcatgggcaggggctggtagagtggggcaggcgcaggatcgggagtcaggaggcctcggggcgagtaatgtctttcttagggcctcagtttcctaatctgtcaaatgggggtggtgatccttgcctgcctcagagaattagaaagaatatatgtagctgagatgatcccataataaccacagagctgacattcgagtgatagtgagtgacacaaggtgctgagtatgcccggtatccttacctgtgccctatgcagtaggcaccgtgcaccccttttacagaggaggagatgaggctggaaaggaccaagtgacttgcccaaggccttgcggccaggaagcagcattgaagtataattctctctggctccagaggctgtgcatgtgatcacttctataaacgatagtcattgctattatgcaggagaaagggaagcccagctccttccctagaggaagtatcacttgatagaggacaagagtcagaaacatgaaaaagccttcaggatttttgtaatcaggtctggataaaggaacccaaagatgttgagttctcagaaccgggtggggtgcatcagagccaggctgctgctggggttgctaagcaaccattcccctttggccagaaggagttctaggggaagtggacccatgtgcagagagcagagggtgagggaggttgatgtccggaggcagggtcctgatggcatggtgtccaatggtggccttgatggcaccatccctgaggaatccaggaggagaggttgccgaggcttctgtcacgaggatgacttgccctcacccttattcctcattggttcctcccagctcgagctggccacagccaaaagtgacatgaaccgacacctgcacgagtacatggagatgtgcagcatgaagcgaggcctggacgtgcagatggagacctgccgccggctcatcaaaggctccgcagacaggtacccgcccatcctcccaggggattcagctatggcatccttggaggggaattcccaaggctgcaactcggccatgtgtcatgctcccaacctgtctctctgtccgtccatctgtccgtccgtccgtccatccatccatccatccatccatccagtgactattagcacacctatgtgccagatgccttacatatctaacctcatgcaagtcccaccaccaccctgccctttgttgattcaatagatacttgccaaaggcctgctctgtgcaagacggtggggccagtaagtatagcccctgccctcaaggagcttaagccccattttctgctgaaatggggagcagaggtggacagggcatgctcccatttgctcacaggaagtgatttcccttcctttcccatctgttagtctgttctcatggtgctataaagaattgcctgaggctgggcgtggtggctcacacctgtaatcccagcactttgggaggctgaggtgggaggattgcttgagcccaggagttcacagctagcttgggcaacatagcaagaccccgtctcaaaaaaaaagaaatgcctgagactgggtaatttataaaggaaagaggtttcgttgactcaccgttccacatggctgaggaggcctcaggaaacttatagtcatggcagaaggcacctcttcacagggcggcaggggagagaatgagtgcctagcaaaggggaaacccccccttataaaaccatcagatctcgtgagaactaactccctatcacaagaacaggatgggggaaaccgcccccacgattcaattatctctaactggtccctctcatgacacgtggggattatgggagctacaattccagatgcaatttgggtgggaacacagccaaaccatagcatcctcttccaacccagggcctgtccccaggagactgacaagtgtcaggcatggcacataaagcagagcccctgccttcaaagacacacagccttatcgggggacagccacgctgagaatgagctaatatgaggagaatgcctgccacacagcacaaatacgttgtcactgttttcctcgttttgctgcattactgtacgagagggagggacagctctgtgggggccagatctgtgtgcagggccgtagccttgcctttcagacctttaactcctcaaacccccagaacccagtgtggttatctccattatccagacagaagagcagacgctcaggcaggttaaacggtttgcccaagttcccccacccccagctcatccgagatagaatcagaactgcaccccagtgatgttaaccatatcccgcatggcctccttttgagctctgagtcattcaggttttacttagcacctactatatgcccagacatgggttaggtgcttggagagtaacagccaaacttgatccacggtccagctcccaaggggctttcttcctagagaagccaacacagccagaccaagtaggggctggtgcagggggttacctcgtgagcttaaaggatcttaaggatagctgagtgaggcaggagctcaggaccaggcccctctgagagtagatcttatagaagtggcagctcagccttcccactccttgacccttcagaggcccagggctgctctctgaatttccccactctcttgtgcttctcaggaattcaccgtcccccagctccgtggccagcagcgactcaggaagtacagatgagatccaggatgagttcgagcgcgaggcggatgtggagcccatggtcagctgatgactgaggccctgcgagcctggtggtcttggtgatggggccctgccacctctcctcatggggccaggaaggcccctcggagtggggttcgaagccacaccacacagactttctctgccctcccttctctggaggccctgagggactgctgcttccttccttccttccacaccaccaacgggtgccccgtctccatcccccacccacccaaggaatggtgctgtcaatttctattgttctccacattacaaatgcagacttctgtgcggactttgcagtgttaactgtgccttctcccttaagctgagccactttgagctccaaagaattattcctagcaggtgtttttatacagaactctaagctgagggccgggccaaccggccgtggtgtaatgtggtttctgccgtccgtcccacctgctcctctgattggccatgggctatgccctcccttcctcctgagccagcccagactcggcctggagcttggggtgctctgccaacccccaggaaggagccgcttgcctctgtgagctttctaggcctgggtagggaccaccccaattttctcactccctgaaggagagaaaggtggaaggaagggaaggaggacacattttaattttttggggggatcgagtggcaaagttgaagggacaaggcactgtgaggggaaggcagagcctcactgtgtttaaactactatgcaaaaaacaaaacaaacaacaaaagcagcttgccttatatcattgtggaaggcaggacctctcctgggctcctggcttccccctggagctgggagagaggccggggttagggtgatctgtgtggcagcactgactgggtagtgtgggtttggccgaggttggtcatgaggctggggttcccgcaaggcactggcctccctgaccgcttgcttccttccggacctctgggttcagggcgggggcggagggatccttgatttccctgataacttgatgttcttccctccctcgccagccaacaatagaggcttagagatctgtaatttctctgtgagaaagtctgaaggggccaggcctggtctctgctcccttctacccgccttgggttaggactgtccggcagttgcctgcttttggctgctggcaggagagaagcagggtgggctgctggcagtgcaggagctggagtgagggccatcctctttctgctcctcgacacacgcaagccgctctcagcagttccctcgactggccagtcggggtattgatctgagccagcatcccccaagacttgaatggcttgagtgggactgcgttgaagggcactgtgtggcccccttccaaatctcagcttggagccagctgagcaggctttgctttattattattttttaagcctactgcagtgggtctgttgccaattttaattttttattgtcccaggagctccctctagtggtcaaggtagcaaaatgtgcccaaggactagaacttgggtccctctgccttgcctggaggcagaaggagggggctctgggtttgactgggattgtggtccccaggggtccgtggcctttaaggctcttctctcttttctgtttcccccacctgtgttacagtcttaaaaatactgtacataaaagatatatgtagagagagagagagagcgtgagaatgtgttagtgactatgtgtgatgtaatttatcacgatttggtggccttcgtcatgagttttttcctttgttttcttttgctgggggcacctcccacgggtcccctgtggcagtctggctgtgacacttccatagtcagcatctcttgttagccaaacagttccctttgacaggtacttggagggacaatggttttggaagagagacggcccttctctctcctcactcacccttgttctaaaggttacagggttcaaacatacctgattcttgttgttattgttgttgaatttttattttaaccaaaggttatcagagccagttgggcttggacctcagctgctaaaaagattttccgtttcctcgagggcaggaaaacatccaccctcgtgggtctcctccgtccagggccgagggaggcattggacaatgtggtatgggagtttcgtgggcagcgtggaagccggccctgggttgttccccaaggtggtgggagggtgacagatatatctttagacttaagactgtaaggcagcagtgttagcatgggagtaactaaggttactgtggttatcggtgtccggcggtattatttttactttcctccttgtatacataggtcatttgtctttgaggactagggtactctagggagtttgaaaactgcaggagccagaaagagatcctggcctgagagtcccttctggctggcttttaatatctgctctcctcttgggagtgaggacttggggcaggtgggtaggagagggaaagccagagtgtgatgggcctgcctcctgggctggttcctgggtccggcctgcctgcctgcctgcctgcctctccaccacatgcttttttcagttaatgtcagtgggccctgcttgtcccctcaccatgagcccacagcttgccaagaaagaccccaacgctcgctggggcagcaccagtcctagctgggacgaattggtccatcctttgtaaagctgtaaatacttaattttgactttctatttctaagcccagtgtcatattgacactggtattttagaattttctcagatgggctctcctgcgctgccctctgtctcctgtttttgggggttttatacaaacagaggattggggagggataggaagactagcatccttttggctccctggttggttgtgaaatacacacacacacacacacacacacacacacactcgcactcctctgagactccgaacagagaaaaaaattattggcaaatcaacacatttttctttctcgtcttgagaaaatgtcttgaggtccctgaagggccaaatccatcgtggactaactctgtgggtagagctcagatgacctagggagaattaaaccacttamgcttggagtgggaggagagggggtggggtgggggagaatataagatgtaacttaagctaaatgtaatctatttataaagcaagagactctcatctatttttatgaaaggaagggttttttaatctagggtaggcagttgtggtagcccagcattttcctgtggacgagacatggtgcatgttgttgctggattgaatggaacccattcctgtccccyggcctcgtcttctgtcctcacttttggtcatccacacccatgagcagcttcagcagagtgtaggtcccacttcaccccattctcctctcctctgacccctcagctccttggaagtcttggggtggggatctgagggggtgggtgggctgcaggaaattcagaaatgtggtgggtgggggaagggacaaggcgcattagggagggaacaagctgggctctggggataggctctgattaattagttactctgactctggtctgccgagatccatttccaacccagttgcgttgggagagggttgggaggcagcagagcatgggtracagtgggagcacacgacttccttggagcctgggcctttgcgggtcccaggtggtcaggcagctggagcaraagtggaaatggcttaagatgctcatagcccagccccggctgtgtctactccaggccaagcctgggctgcagtccttgctatgttccccccagggccctgrggggagggatcagggtgctgggggtttcctaggacaggggtcttcccccttgagacaccaagctctggctctagaagagctctctcctggagtggggagtctggaggggactgggtgggtgcaggtaaagccagattctctctggaagggaattttctakgaatggatgatttccaggctcagggtgggctgtgtgttagttctgagcaaatccctcaccaagacccttccctcccaagccctcaaagaaatgaggcaaagcccttccctgcaagaccccttgtggaygtttttgcatctacctgatttttagccccacccagggagactttataccccatgatcctgccccaccgttgctgttgtctgccagctgggtctagcatcacagggaagggggggatttatactcayggaaagactactgatcctaccggaaaccaacctgtttactgtactgttgtaaatatcatgccctttatatcctgtatattggcttcttttaaataaagtgaaatgtcttagaactgatggtgcttttttttgtttttgtttttaaacagaagatgaatctggtgttgggggaggggtaggaggacggaaggccacagaaaccctcaaactcattagttaattagccataaaataggggatttcatatcacctgttacatttgtagctcacaataaaagctttggaagatgacaaagcaggaatcattacacacattttactgaaggggaagagaggacatgagacatcacaggctcagtaactggcttggcctggtttggaactgatgtccttttaaccacaaagcccccatttttccaggctctccaacgtgcccacaggaggtcaccttcccaggctctggatttgacagtaaccaatgttctagtttttcttgtcaatgggcatgttcagggcaacattgcccaaatgtgaactgagcccacctgtctagggttttctccaaaggtgaagacaaatagccgccaccaattccaatttgctttttgccattcctaatacttggcacttaggtaatctccctctcctactcttcatttaaatgtttacattctcccaaagtacctcaaatggtgtaatctggagaaaaataagtggcttaagatcacgggggctttgtgagttgggtactattacttccgttttacagatgaggaaactgaggcccggaaaggatatgtagtctgcctagtgccctgcttgaggaaccaaaatcagcatgggaactgactcctaagcaggtgcgcggttcatgctgctggaagaaatataaacaaattagaacagagagtaaggaaacgtaacattactttaggaatagattgggtccctgagacctcgtcatcagagaagacttcagaatccaagttttaaatagcattctagtgtttaccaagcacacaacattttgcaaagaaagctgaaatttttacttgggggtaaaaggctcaggaacaactggttttgcggccaaaggctttaaatgaaaagctaagcgttggccagctcaggttttatcttgcattgatcgtaatctgcaaggaagctaagaagctggccggccccgcgcctggagggtaggtggagagcggctgggtcctggccaagaagctggaaggcaggctcattccaggggccgcagcccccgggaagaagcagggggctggccgcgctgtggccctgcggggtcgaggagtctggtagcggacaggtttccagccttgtacaagccaccggcagcccgagagaagtcagtcggactcccatcgaacccggggcgcacgccagagggccggacgcagcgagtccttctgccccgcttcagcacgtgtcccatttcggttatctcattggctctattcagcccctctctgctccgctttggaaggctgccgcaggaccgccccgctgattggttcagaagctttggtgtgtcactctgactggtcgacagagttcacgccctctctcccgggtcataccataaagagaggaggggaaaacgcatgcatttcaggacttcgctttcgggttcccttgtcctgtgttgtgtaatgcccccgttatggcactagaaatattttttattagccgaagctaaatatagtgggactttggctgatcccgagctcggaggacagccggggtgatccgtttccccccgaggatcgaggtggtgcgctctggacggggttgtgcattctcgccgcgcccgggcggacgatccagcgaacagccccgcttctaacccgagatgctgctgccggcgcccgcgctccgccgcgccctgctgtcccgcccctggaccggggccgggtgagtgagcacggggcccggggcggcccgagcgcgcgcctggggcccgggagcctgagagtcactgggcgtcccccgcgccgcactccctccctgccggacccccaagctgcctcggtcaacgccgggttcctcaggggctcccctccgacccccacccaggcctttctcccactgagatcccttagcctcctccctcaggtagtcaccttcctttagcgaggggacccctcttcccgaatcctgcgaccgagtagggtgcctcggtggccctgccggttcccacgctcggaaagtagcctctgtagtcactcacctcactcctaatactggatcttcgcaatttgctggcttcccctgaggggcccttctatttttagcacaccacacatctcacttccccaccctcgtctcacgttcagtgtccccatcccgccccggattccccgagtcctctccttctaccaggatttctacctctctcttttccgctccccacacaccccgccgcccgtttttttttttttttttcaagttaaatgttggacagaaaaaaggattcctttcttcttgtaggtggaataatcatatttatagagtgcttataatgaaccaaatgctggccgggcaattggcaggtgtcttatgaggattaaatgagttaatacatggggagtgcactgaacagtgcccagcacaaaggcagcgcccggttattattattgccacgatcatcatcattatcacctctatttaaacttctcactcctgtgaggcaggtcattattccaaataatgaagaaacccaggagcagttcaggggtggacctgcccttcaaatcccgatttgcaaacctgacattgtggagccaggtgcctggacccttgcccactcaatgacaaatattctcagagcccctccagctcggagctaggtttggagaggtaggtgggacacagaccctgccccagaggggttcctagtctggtggggctgcccacctgtggatcagccccccctcccatttgaggtttgtttgcttgacccctggggctgttagtggcagtgtctttcctgatgagctgtgccctttctgagttaatcagtggccctctcccttcccccaagggatggcatggtggtgctctgagcacaagtgagttgcaacactgctgtgtgtcctctgtgggtgaagaggggataggaaagggcgcaggaagaggacatgggacagaggggttcctcttctaggctgagactggggccacacttgccatactccctgtgtgatcccgtttgcaggccttccctgcactctgagactcaggaagatggagcttatagagtcctgtgtttactgagtgcctactgtgagctggtgctctgccaaacaccctagagatgaggggtacccagggaatttacatggggtggggcctttgaggagttttcggcttaataggggagaaatgcataggaaaaccctccaatatctagtagaaagcaatccatattctaaaagataagcccatgataacaataatgattatcaagcaatcaagcaccatgggcctaacaccgagccggtaagtactgtctcattcctgtattatcatgggaaacgatctgccatcagagatatatgactgaaattacatttggtctaaatccagatttatgctctgaattatgaggcctcctgaattgagaggggaaagagaaagagcattttgcagctggttccctgggctcaagttacccctttgatacagcagctggccgcatgccctagacaggatttctcaacctcaccactattcgcatttggggctacattttggttgctgtggagtctgtcctgtgcactgtagaatgtttagcagcgtctctggcctttacccgctgcatgtcaggggcacccccggccctgacaattacgaaaaaaaccctggccctgacaggaaacacaagttcccagacattgtcagatgttacctgggggacaaaagtcacctccggttgagagccagtgctctagaggaacagctttgatgtttgatcacttgttcatttactcagtgaacatttagagcacacccgtgacatgccatgtctgcatttatggagaaacagtcgcagggcattttcagtgacatccctcagtgtcctacgtgtaaaactctagtcctgagaaaaaccgctgcttttgaggaacgggtataggagatgcttcttagtgttttcttttttgccttgagtgccaggaatctctgctagttttaaaaaatacccttgatacatgttttcttttagtttaatacatgtcaactgtgaaaagtacagataaggcaaaaaaatagaaaaatcacctggaattgtaccacacagaggtacccactgttaacattttgattcatgtcctttaactttccatgaatagatatgcttttaaaaaaaacctcatagaaacaagctcatctgcccatactttattgtagcttgttttttccctttatacacttgtctgccttacagtatgttcccaggccctggaactgtgtctggcacctggtaagcccttggcaaacatttagggaatgaatgaactaatcatgtgagcccttccttgtcaatcgatatttatcacggccagcctcaggacaatcaccataaagtgtggcctttataggtgggcccagggatggcagctggtgacaatgactgccatttacttttcatgtggattattttactcagcctctcagcaacctatgatgtaggggttaccacccccatttcacagattaaacaactgaggcccatggaaattaaggaaaacttgtccgaggccttgagctggtgaacaccaggcctcccaactgactgtctctttcctcctttaaccctgacttcctgtttttttctcaatcaactttaccatcagtatcctcagttctctttggaaacaggcaggatacagattaatagccagcccaggcatgtagtaggcttataagagttcacttctgttccttatttcttgtgccaagcccagacatgactccagctcagcccgtctgacatcagggggcttgtgggccggaattggttactaccgtgtcccctgcagtgatcctgggtggttttggactcttctcaggctacctgatggtttaattttcaaaatatcaaaagcacacaatgcttttcctagtctgcccagcccttggatgggcacagcttgccctgggtcgagggctggcatttcccaccattccttagacattctctgctcttgaactcctccaaccagtggctggggcagtgcctttggcctggaatgtcctgctggccacctcggtgagcccatccagtgctttgtggccttggcaaggcagcttctgtcccttcagtatcctcgtctgcaaaatggggatgattgtattaacagccacgtagcaggtggctgcaaggattagcggtgatgtgatcagtggtttcctggatgctggtaccgaatgcgtgctctgtgagtatttgagttggagaataattaaaacctgtgattatcatcacacttctaaagtagtgaaagcgccattgaggcagtgcttggcagtggcacccctgggagcagcctgcctcctgtgccctgcatctggcccggcacacagtaggcgttgaacggttgctgttgagatggtccagaacacagcatggcttggatcctggctccaactcttggcagctctgtggccccgggcaggttactcaccctctctgggctcccttatgttctcatatggaaaataaagatgacagtagtagtcacctcataggattgtcctgcgtgttaaatggtctcatacatggaaagcactttggagtgcccagcacctgaaatgctcagtaagtgctgctgtggttatgatgatccccctctcccaccaatgggcttcctggagtgatcatcttcgatcaggaatatcaagacagcagggcccagcagtgaaggatggtggcaggaggggaggtatggaactcagatgtcctcggtctcttctgtttattccaattaagtaccccagatgccaaacctcttctgttattattgttggtttgtttgtttgtttgttttggagacagagtctcactctgttgtccaggctggagtacagtgtcatgatctcagctcactacagcctcaacctcctgggctcagtcatcctcccacctcagcctcccaagtagctggaactacaggcgcacatcaccatacccagctaatttttgtattttttttttttcg

SEQ ID NO: 8862 - DNA, 12526 bp, Homo sapiens
aattttggagggctggggtagaatgctgtgaattgaatgtttgtgtctgatatggtttggctgcgccccaccgaaatctcaacttgaattatatctcccaggattcccacatgttgtgggagggacccggggggaggtaattgaatcatgggggccggtctttcccatcctattctcatgatagtgaataagtctcaagagatctgatgggtttatcaggcagtttctgcttttgcttcttcctcatttttctcttgctgacaccatataagaagtgcctttcgcctcctaccatgattctgaagcctccccagccatgtggaactgtaagtccagttaaacctctttttcttcccagtcgtgggtgtgtctttattagaagcatgaaaatggactaatacagtgtccctccaaaattattatggtgaaaccctaattgcccatgtgatggtagttggagacagggcctttcagaggtgattagatgagagtggaatcctcatgaagggattagtgcccttacaagacacatgagacagtgcgacctctctctctctctctctcaattcctctcagctctccaccatatgaggacacagcaagaaacaggctacttaaaaaccagaaagagggacctcactaagaactcaacaaggttggcaccctcgtctcggacttccagcctctagaactgtaagaataaatatttaagccactcattgtatgatatttttgttattagcccgaagtaagacaaagaagaaatattgctccaacaagatttatgagtatattttacagatctgcattggacaagttagctttccctgcaacgaccatttactgaatctttactatgtgccagaatctgagagtcatattagcatctgcaggtaaatcagccaaggttcaaagagatgactaaggccaggcacgatggcccatgcctgtaatcccagcactttgggagacccaggcaggaggatcgcctgagcagaggaattcgagactagcctgggcaacgtggtgaagcccttcctctacattaaaaaaaaaaaaaaaaaaaattagccaggtgtggtggcataagcctgtagtcccagctactcaggaggcagagatgggaggatcacttgagcccaggaggtcaaggttgcagtgaaccatcattgtgccactgaacaccagcctgggtgacagagcaataccctatctcaaaaaaagaaaagagagagagagatgaccagatttgcccagggacaccgagtgagttagtattcacactgggatttaaccccagatctgtatgactccaaagctggggctacctctattccactgggttgcgtctgcatatgtaaaaattagctgcattttaaatatttgtctaaaataaaccttaacctatcgcagggcgtgctgccccagcctgagactggctgcttcatctacagttgtttctctacttgtccttgcgtagggaagttttatcaccacaaggaccgtttctcctctgtttaatctaacacctgctagtctgagattctctaaatgtcccacaataaatatgaaaaacagtctcaggcatatttttcccctcttaaataatggagtctaaatgccaagtggccaaaagcaggcctttcagccattggcggctgaacactgtctgaacatgaaatccgtctcttcaaactatgtcaaaattgcttaataagaactcaggggaccccacattaatgaaaggatgcatctgctttgggtttcacattattgggagtgatggttcagagccagccacctatgcttgactttcactctttaaaactctgcagttaatcacagccctcattatacaaaggttacatggatataaagtttgaaagattcggttcaagactgcgagcggtggccaggaaaaaaaaaaaaaaggagaagacacaaagacaatgatcaaagaacaatgaataacattcaagactaagtcggtgcaaaattttcagaatgagaaatgaaacggaaaacttagaggataagtaccaagcacaagttttaggtattctggagacaggaaactcagaatattttagcaaccgattatgtctatgagggggatgaataatttattatctgataaagaatcttccctgagcctgtgacaagaaaggtcaaataggcaactgaagtagaacagtaaatacacgatatactactcgaaaaggaagtctggaacggaaggcgaaggaaagagcttccttggcccatgttcatcaactccctcagattacaagaagcgcagcggatgtactttttaggtaccctcatattaggaacccagaagtattcatacaaataaatgcaaataatgtatgagtacaatacttgtctaagtccttgaaaaaggccaatcttccggcatcacccacacaccagctgcaaatcttggatccaccccgttatctcccagctgtgtgagcctgggaaagtctatgcctcttccagcctctaaactgcctcatctgcacaatgggtttcacacataatataaatactttactgttaaatgctaagcacagtacctagtacaaagacaaataggaatatccaaccccccacctgcaggtgacaataataggacattttgcaaacgccccaaagaagaacttcagaactttacgttcctttgtgagcatgcgcttattgacttgagcaagtggcttatatagttcttgctggtttgcagacttgtttatatcatactttatttattgaaaatccaatactatacagaaaaacaatttgtaaagcaaagaaatgaggaacaaatctaatggctgatttaggatgcgctcttcccggtaatctacaactattaataatattaatagcttttatctttttgtttagctacagatcgttcagaacaatggagataagccctgtgacttgtgatgcgttgacgaatgatcatcttttccaagccaagtcaccagcttagacaggcatgaggctcgtattttacccgccccacataccacatgcctccccccaacacatatatcataaaagaaggccaaggccttccatccacaaaggcaaatcatgggacttaagcttttagtgtcaaaggagattgcatggaattcccacaaacagtgaagctataccagctcataaagtcactgaattttaaggagcctaaaagtaggtggagttttgcagaagtctttaaaagtgcgagcaatttactcctcagcatcctacccatcgttccttaatatcatgccatgaaaacacaggatgcggcagtttcccggcagggaaaacaacaacaacaacaaaatgaaaacacaagtgtcagtatctatgaaaagcacagcaaaatgttgagcccatgagcctaatataatggttggtactgagtgctccctatctgaaaataatgttaaagtcattatttccgatgcttatcaatgaggctgcaatcacataatgctgtcagtactatccctatcccttcactcccacaaaataaatagacccgatatcaactctattgaaaacctgaatcattacagcacttcagcagcaaaccgtgtggttgcaatcaactgagcatgcgctctctccctaaaacatgcacattccattacctctggctaataaatcttttatttttacccctcatctctctgctttctcaataatcattttgatataaaccattgcttgctgttcctgatgactaatcccttaatcatctttccaaaatatatgcagagtgtatttctttgtaaatacaaaagaaaaagcaatcacataaatagttaagatggcttttcaaatgacagttgagtgctaatatgagctacactggaaaatactaatcaacaaactaaatacacatccattaaaatgtaggagtccagacatatgaagacagaaaaagaattcattgcaactccactgaaatcaggctgataaacatctgccctagagctcctctttcagccagttggagaggttaagaaaagtaagcatcactttgcactttcatgcgtgaagaaaatattattattgttgttattaatagcagcagctaacatttaattgagcacttaatttattccacaatgggttaagactttatatacacagagttgatgtgtttaatagaaccacctgtatctctgaatagagatattatgatgtgcattttacagatgaagaaactgaggtttaaagaagttaagaaacttgcccaaggtcataagatgtatctgattctaatctttgccactataatacagcatgttttatagccgtggttatgaactggggacgatttgcacccccaagagacatctggcaatgcctggagacattttggttgccacaaacatacttgggtcacccctcccatatgagaggggaatagactcaagacacattctgggaagtcaggggtgagtcaaatagtaactctaagggagagccacctgcccctcttcccataccagccctctctgaccaacctgtggccatctcaatgtccagcagatgctgatgtttcacaacacttattgggcccctcgctatactaatggccagtccccaacagaagctcttctgcactctctgttaaacagatctagtgagggcctggcaggcatgaggaacattggttactcataacaatccctctcctctctctcaatccaccgcccctgcctcccagcctcagcctcatcccttttcctcctgcaaacaacgtagggagatggatgacatcaggtccatctgctcccactctaccctacctccttcttccacaggaccagagttttagatcccaagttccggggatctaaaatttagaaactaaaatttagaaatctaatagaaacagaagaaggaggaactcagagccccactggggtctttcaagagctctacactggaatgtcgaggtcttgctgtagctgttcatgaagtatgttttgatacctaataagctcttgttctttacatgcaatgcccctcagaggtcctgagatctcaagacagggagtgggatatgccagaccccgagaaataaagcaacagaagcccaactccaatagatactgggtaaaggaaagaataaaccatggtaatgcaggactcagacacacctatcgttgtcccagacttagagaactcacatggattcctaacacatagacactgctgctaaataaaagagagtccactgcatcttgaaaacaggaaaacatcttattccaccagccacactggcctcttggaatacacaggaaaacgataggtgcttgtcttaagaggtgagggcaccagtgtataattcacataaggatgtgaatgaggtagatcacatctgtgtgctgttccacaacataggaacaagccccactgccccgttttctttatttaaatatgaatgggggctgatgtgcctccatctcctccctctttttttaattatgccaaatggattggccttttaagacagtggtttacttctgtactgtccatgttatcctgttttaattgttttcattttttctcttctaactttggagcatctaaaacatctcagcaggagggcattttcccatgaaataattagtagtcatagtaattacatataggttcttaatatacttctatatggaatgtgttttcacttaagttgtattttattaaatagctccttcttcccaaaagtaatttgagagctctataaaggatatcttgaatataaagagacgacagggtagatcagagtggcttcctctaagaaataggatggatcctgaaattaatcactcaaaccgcagctagagagtttgaaagcaaaatctgcaaagtatgaacattgatactaaacatggtaaaaagatgggccatggggtggagcagacagacttggagtttggaagccagatggaccaagcaaggagcctgactctgagctcaccagctgtgcaattcgggtgagttccttcaccyttctgagccatcycttggctcgtctggaaaatgcaaaaaaaaaaaaaagaaaaacaccaggtttttgcatcctcctggatgagggatataaagtgcctgacacagcatatgacagggatttgataaatgggggctrttagctgtcccattgtggatgtgagaatagcattctgctggctaaaaggcagacatgaatgttctagaacatggcgatcccggaatgtgcagtgaaggcaggaagaggaagaatgggcagggaagaacaagttgggatggaggaatgaactcttatctccagaagcagagctaagaatgcccacggagccttggcacatgacagcctccgctgagccaaatggcccaaagacttctgaatgagcttttgctgcaacaaaaaactttggatcattttgagagcctcccgtgaggygccaatatgttgcagtaccttcccggccccgacactgatgtgattcatcgtaggtaacatatgaatacgctcaagctggccagcagcttgaaaaattggagtctatcaaattgaccttgagaaacacaggaaggtaatatttagtgacataccagatgaaatccttgcgcagagatgtgaggtgaggaaggacctgaagggaagtagaccagcaaatatcaagggtcaaggagttgggggatgatatagagacgaagcctaacagatgtcaccagagcaagaaggccttacgacttcacatcctctctgcagggtatgaatggtgcaatggaatgaaatggtaactacagcttctggtgcaaaatttgagtttccataatcatcatcttgggaaaatgaggaacacaatataatggcatacagagagaacaagtgaaaagatgagagatgatgaacaggttgagtttcttcagcctacaacctatcaaatctaattttaaacatctggagccacgtgtattagttttgtttctgttccattttcctttttctgtgtccccgacggtgaatgattctgaataattcttagtctgggatcactggtctatctcaaggtactacatgttagagtaaaactataaaacagcaaattctatcatctgaaattgactcacagggacccaattaaggctcaaaatataagaaagaaagactgaacagtgggtctttgacatcatccatccaacctttttccttaaagatgaggaaacaggctccaaatagatccagaggcttacccaaggtctcatcgctaattggggcaggtccaggaatttctgctctaagcatcaaacaataattaaaataggataaatgcagatgaatgtgttctcatatatattgtgttctcagaaaagaagaggataaatttaatgatgcaaaaacagttgtgctacagcattatcttccaagactggtttaaacatgaatgtcactgtacaatcaggttaccatagtgtcactagcgtccctggaattttacctttctagtttcaaatattacatcaaataggcagagttttacaattttgacacgccctcctgctagtcccaagaacactgcaagccctcagcagttgtctgtctacactgtcagtgggaatggaaattggagcaacaagataagaaatgactcgggaggtcgggcacggtggctcatgcctgtaatcccagcactttgggaggcctaggtgtgtagatcatgagatcaggaggtcgagactatcccagccaacatggtgaaactccgtctgtattaaaaatacaaaaattagctgggcatggtgacgcgtgcctgtagtcccggctactcgggaggctgaggcagaagaattgcttgaacgcaggaggtgaaagttgcagtgagtcgagattgtgccactgcactccagcctggtgacagagtgaaactcagtctcaaaaaaaaaataaaaaagaaaaagaaaaaaaagaaaaaagaaaatgactcgggaactgttaccaaaattttaaatgcatatgccctttgaatcaaggagtccagtgctaagattctgccccaggcatttactcacaaatacgtaaataaagaatgctcacagcagcatagtttaggcccaatatcagatgatatcgtaagaaagactgatgcaagaaagagagaactgtgaaacaccattgcttggaataacaaatagcaaaacaatgcaaacaacctaaatggccaccaaagggaagactggttatagcataagcacatgatggaatattatacagcagttaaaacaatgaagtagatctatatgcactaataagagatctcctgcagtactaagtttaaaaaaaaaaaaagtacagaacagaatgtgagtgtgtttgctggtatatagataacctttttctggaagaatacataatgtttatcttccaagagaaggaccaagaacgactttcacatttcatttttcaccttcccattctgcgtgtagattcaaataagatgcacgtattcccatttgtactcttctcaatacatccctaaaaattgctactatcccacctactagaggttactactttttaacattagtcagaaagacaataaaatgatcagaaaaagtaagactctgttttcttttttatttaacccaaaataataagctcagtgagctcaagataagggctcatttcaaatatactgaatttcaaatatttcatcataaatacactgaaaaagcagaaataaatcttccttttctttattttcactacttttcagtccagagtaccaaaaattttcttaagtacactgtagtctatttcttcaaatggcaagaaatctttcacagcattcaaaaatgaagacggcctccacagggtgtacccagcccccttcaggctctgctcccaaacacgctgctctatctcctcctccccctcctcccagggcctctgcacctgccattcccctaccccatctgacccttctccaccctcttcaggtctttcttcagatcttagttcaatcacttcttccttggggaccccaaaggtctcccaactccctggcatcattactgattcctaggaccactcactgctttttcaagtttacattaagatctgtgttttttgactaaatttgtcttccacaataggctgaaagctctacaaagacagtggcaacgtctgttgtccttaacagtagaccccagcacccatcacagaggtgcacttcatgaatatgtgaatgaatgaaaagtgaatgaatgcagtctggacttcattctgaaatccagcgatgtttcaaaaatcaaacagctcgcatcactctctagctcaaaccctctaatgtcttcctcaccgctatctcagagtctaccagatacccatcccccaacagcacctctcctacccactccattcatctccagccacactagcttccctgatgatccttgaaatctccaggcttgtgcctacctctgagccttagcatatgctcttctcactgctaagagaatacttctcttgacatctgcatggcttacccctacttcattcaggtctcagatcaaatgtcacaactttggaaggctccctgctgatgactccatcacactcacgctatcattccccccaccttcctctgctttacagtcctttatttactgacattatggcaaatattaaacttgattatggtctatttttcctacctagaaggtaagcctatgagggcagggattctgtttcgtttaatactatatccttggtcccaagactaatgcaagcccttagtaaatatttatgtagacacgtatcaacatcaacttctacatagacagagaaaagtaagaaatcagagatagggttaaagcttccttctttctaatcttaacaaccataagcataacagtctcctagttgcaatcatgggcgttcaccacgttttatttttcttaataaatgagttaaaggaagaaacattctcaaacccctgactaataaagcagatgacactgacaatgaactacaaacaaatgcgtgaataataatggacttgctcatgctttcattcataagacaaacaaagtgaagatgactttaaaaataaagacatgattccaagagcaataaactttacacactccactgaaatctccatatggttagcccggcatgtgtatttgacaattaaaaaaaacaacaacagtcaagcgcttacccattcttctaaaatgcgtgacactgcttcactcgcccttgccatgttcctgcaggccaagatcacatgtgcaccatggagggcaaaagacttggcggtttcgaaccctatggtttaaaggaaagtcaatgttagaaaacataacatcaacacagtgagtcatgttgaatggcctttaccggagcaccacttaaattaccccaagttctcaaccaggggtgattttgatccccaggggacagaagcaaatgtctggagacattttcagtggccacggttgtggggtagagtcctactggcatctagtgggtaaacaccaggcattacaaaacatcttaccatgaacagggcagcccctgacaacatagaaccatctggcccggactgtcaacactgtgatggtgagaaaacttgtcctagggatgcagtgatttcaaagatgaagactgggacatagaagagttcacggcatgtccagccatttaaccatcaataatgaccagatcctgtgcccacgataaggactttatgctctactctatggtaagtgtcgccagcacctctgcttctaccagtgttacctaggtttcttagccccatttcctactgagaacaattagaaaagatggacaaaataacacacgtgcatacacacccatatctgtttgaaggcatcagaagggcactatgactaagaattttgggggccaagatctgcaaaaactgcaaggccagcatttggcagcttttttccttcaaggcatatttcatttccaaacatagtggttggaagcctgagaagatgggctgagcttttggcaattttataacaaggaaaaagacataaatttgagctcaggacccaccaggaaagggccacggtaaacacaccaaacctttggtcgggatcctaaagagttataccctcgctgtaataacaagagacagtccagccttcacaagagtggaaactcagcttcaggccatttcaattcctagtttgattaaagtgatcagtccctatctatccaatttccagaagcaagagaaaatgttctctggaggaagataccattatctagagtctcaaattaccactatgattatttcaaatactcatataaactctcagacattcaaacaaaatagctaagcatacaaaaagaaaaaacttcaccaaaagccagaggggaacaaatggaaataaatgcacaggagatctgtctaatcaagttattcagaaacagtgattaaaataagtctgactgacaaattcaaggaacaaaaaggcaagatggagaattttgccagggaattagaaacaataaaaaaattcaaatagatattctgaaacttaaacaaaataagagtaataagagtaaagaagaattcagcatatagtttaacagaatacaagacacagctgacgacaagattgaggaaactacaaaataagttaacaaaaaaatccaaagtgaagcataaaaagaaaaaaataacacaataaaacaaagcacaaaagagacatatgaaacacattctcccaggctcttacacatacatgtaatctgagttccaaaacaagtgaaatagactaagaaaagcaatatttaaagacagaatggctgataatgttacaaaatcaatgacgcatacacggccaaaaaaagaagtatcctgagccataagcagaaatatgtatgtgtatgtgttgacatgtatatgtataaatgtgtgtgtctacatgtatgtgtgtgtgtgtatatatatatgtgcaagctacaagcagaaatgtacgtttgtatatatatatatatatttatgtctgtgtgagccgcaaacagaaatatatatgtgagtgtgtatctgtatgtgtgtatgtgtgtgtagatacacatatatacacatacatgtcaaagcaaggcacatcagagtaaaactgctaaaaactgcagatagttttagaagtagttagagaccagtagctacaagactgatagttatacctctcaggaaaatgatggaagccacagctgaaaaaaaataaaactttcatcttagaattctatacctagtgaaaatatttttgaaaaataaaggcagagaacaaaaattttaagcaaacgaaagctgctttttgtttgtcacctacactacacctagtgtcacgtatagacccacactagaggaaacactaaaggatgctcttcaggcaggaggaaaatgaccttagctataaacccagagatgcagaaagtaacaaagagcaacataaagggtaacgacatgttaagacccaa

SEQ ID NO: 8863 - DNA, 17455 bp, Homo sapiens
caaagtgctgggattacaggcatgagccactgcgcccagccgacctcatcttaatttaactaattacatctgcaaagatcctctttccaaataaggtgacattcttttttttttgagatggagttttgctcttgttgcccaggctggagtgcaatggcgccatctcggctcactgcaacctccgcctcctggctcaaacaattcttctgctccaggctaccaagtagctgggattacaggcgtgcatcaccagacccagcaaattttttgtatttttagtagagatggggtttcaccatgttggtcaggctggtctcgaactcccgatctcaggtgatccaccctcctcagcctctcaaagtgctgggattataggcatgagccaccaaacgtggcccaaataaggtcacattctgaggtcccaggtgaacacgaatgttgagggagatgattctattgcaaaaggtcttttataaatttaaatcagggccaggcgcagtggctcatgcctataatcctagcacttcgggaggccaaggcaggaggatcgcttgagcccaggagttcaagaccagcctgggcaacataaggagaccccatctgaacaagtaaaaaaaatagcaggctgagacaggaggattccttgagcttggagttcgaggctgcagtgagctgtgatagcgccactgcacttcagtctgggcaacagagcaagaccctgttggctctaaataaataaatgcatgtgttcctttcctagaccttccctatggctcccattgcacatagaataaaattccaaccctggcccttggcccgcctctccaccccgctctgcctctactcaccccatatccattgcactccagacacatgaaccagcttcctcctgctcctcaaacacaccaagttcactccagcctcagggcctttgaacaccctatggcctctgcccagaacaccttcctctgggaacacctctttccagtctttttttttttttttttgagatggagtctcgctctgtagcacaggctggagtgcattggcgcgatcttggctcactgcaacctccgcctctgacgttcaagtgattctcctgcctcagcctcccaagtagctgggattacaggcgtgcgccatcattcccagctaacttttgtatttttagtagaggcggggttttgccatattggccacaccagggtggtctcgaactcccgacctcaagtgatccacccacctcagcctcccaaagtgctggaattataggcctgagccaccgcgcctggccctctttccagtcttaattccaacacgagtcacctccttgtgacttgtaggcctctccaactccccagaccaagttataccctcccagcaccagcttcctcacttttccctaatctgtgcgcttgtccaactcaaaggcagctattggtcaatgcagttgagtagctgaaggaaggaatgcctggatttaccatcaggatttttgtttttggagacaggatctcgctctgttgcataggctggagtcaagtagtataatcacagctcactgcagcctccatctcctgggattaagtgatcccccgcctcagcctcccgagtagctgggactgcagatggacaccaccacgtccagctaatttttgtattttttgtagagatagaatcttgctacattgcccaggcaggtcttgaattcctgggctcaagtgatccttgtgcctcggcctcccaaagtgctgggattataggcaaaagccaccgcacaccactgagttctttttaaagctaactttttctcttttttaattgaaaactaattgttatttagttgtttatttattttgacaggatctcgttctgtatcccaggctagagtgcagtggcaaaatcacagctcattgcagccttgactttttgggcttaggtgatcctcccacctcagcctcccaggtagcacaaccaaacccagctaatttattttttatttttattttttttgagacagagtcttgctctgtcgcccaggctggagccaggctgcagtattgtggcacaatcttggcttgctgcaacctccacctcccgggttcaagcgattctcctgcctcagcctcctgagtagctgggattacaggtgcccatcaccacacccagctaatttttgtatttttagtagagatagggttttatcatgttggccaggctggtctcgaactcctgacctcaggtgattcgcctgcctcggcctcccaaagtgctgggattacaggcatgagccaccgcgcctggcctaattttattttattttagtttttttgagactgcgtctagctttgtcacccaggctggagtgcagtggctcgatcttgttgcactgcagcctccatctcccgggtcaagtgattctcctgcctcagcctgcagagtagctgggattacaggcacccaccaccacacccagctaatttttgtatttttagtagagatggggtttcaccatgttgcccaggctggtgttgaacttctgagctcaagcaatatgcccaccttggcctcccaaggtgctagaattacaggtgtgagcctccgcacccagctcaattttctttctttttttttaaagacaagagtttcgctcttgttgcccaggctggagtgcaatggcagaatctcagctcaccgcaacctctgcctcccaggttcaagtgattctcctgcctcagcctcccaagtagctgggactacaggtgcctgccaccatgcccagaaaatttttgtatttttagttgagatgaggttttcagcatgttggccaggctggtcttgaactcctgacctcaggtgatccacccgccttggccttacaaagtgctgggattacaggcgtgagccaccgcgcccggccacccagcccaatttttttgtatttttggtagagacaaggtgttgcaatgttgcccaggctggtctcgaactcatggagtcaagggatcctcccacttcagcctcccaaagtgctgggactacaggtgtgagccaccatacccagcttccatcagtctctttataaaattaatttttaatcataggtaactctagaacatatcctcatatgtctaattgggaaaaattctcattccctctctttttccatagcggtccctctgataagtcagacacggaaaccatgaagctcctactgactgacacgtttccgtacatatatacatcacttggcctgctgctttatgattttatcttgttttgctttgcttttacgtggatggagtcacatggcgaaagtcacacttactgagaattctcatccttagttttcatttgtgagcgttcaacatgcatctggcgagttctccatttttttctggctgtaccacattccttgtaaacagattcataggattccatggtgtggataaaccagagtttactaagccactccctgtcagtgggctttaggttgctttctgttttcctgcttttatacataatacgatggggagcatccctgtttgtactttcttgtacccttgtgcagatggttcctgagggtagatctaaaaacgggaaataggccaggcgtggtggctcacgcctgtaatcccagcactttgggaggccgaggcaggcgaatcactcgaggtcaggcgttccagacctgcctagccaacatggtgaaaccccgtctctactaaaaacataaaaattagccggatgtgctggcaggcacctgtaattccagctactcgggaggctgaggcaggagaatcgcttgaacccgggaggcggaggttggagtgagccaagatctcaacactccactccaacctgggtgacagagtatgactccgtctcaaaaaaataaataaataaaaataaaaactggaaatagggccaggcacggtggctcacacctgtaatcccagcactttgggaggctgaggtaggcggatcactacaggtcaggagtttcagaacagcctggccagcatggtgaaaccctgtctctactaaaaatacaaaaattagccagacgtggtgtggcccacgcccgtaatcccagctactcgggaggctgaagcaggagaatcacttgagccgaggaggcagaagttgcactgagctgagattgtgccactgcactccaacctgagcaacagagcagactctgtctcaaaaaaaaaaaaaaaaaaaaaagccagtggtggtggtgcacacctgtagtcccagctactcaggagggtggggtaggaggatcgctggaggccaggttgcactccaaactgggtgacagagtgagaccctgtctcaataaacaaaaaatggaaataccaggttgtaaagtctgggtgattataattttactagcctgacaaattgccttccacacggggacaaccagcgtgccttcccaccagcaacagctcactctgcccatttccccacatgtgccacagcactgggagttatcaagttttttttgtttgtgtgtgtgtgtgtgtgtgtgtgtgtgtgtgtgttttaaagagacaggatctcactctctcacccaggctgagtgcagtggtgcaatcatggctcactgcagccttgacctcctgggctcaaacaatcctcccgcctcaacctcctgagtagctgggactacaggcacgtgccaccacctctggtgattttttttcatctttgccaacctggggagggaggagagtgttgttccatcttgtgggttgctggtaaggtcttcccttggatttggatgggtgctgtcaccttggtctacggattgcccctctgaccccgttttggtctctctcttacccgccacgccctgcggcttagatatctctgcgactttacctactacacctctttgtaccagagtcacggtcgatcagccttcgtccacgtgcccccactggggaagccgtacaacgcggaccagctgggcagggcactgagagccatcattgaggagatgttggacctcctggagcagtcagagggcaaaatcaactattgccacaaacactgagggacgctcaggtctcctaagacctcatcctgctggggaccccacgaggggacatccaccctctggggtgtggccaggaaaagacaagctcttcagcttggggatccgatctggaagagagattctgatctgcccacctcctcttcctccttctctacaaaagctccggttgattcgagggaagtggtgaaaaattttttttctcccattttcctccctgcatctggggacacagctgccgtgaccagggaggccagcctgggaggtccagatgcccagggagaatcttggtctggtgaatccatgagctgcgataccacggctggggccatatgttcacctgctttcctgtccgttggtgaaggaatttcagaattcattttatatccaagactggcttttaccaaatttaaaagcctctcaatgcgtcctcgaccttgaactgtgctcaacagcctggccctttctggggccaccctgggatatggctggcttgcttgcttttctttctttctttctttctttctttctttctttctttctttcttgctttctttctttcttgctttctttcttctctctctctctttttttttttttttaaatagtgctagtttgggcacagagtaatttatattccctttggttaaaatgcaggctttttagccaacaacaaaagtgttttccccccacccccactcgcccaccagggtgatgccacttttgcctcctgccctgaaaattggacttaagatgccatgtcttggccgggcgcagtggctcatgcctgtaatcccagcactttggaaggccagggtgggcggatcacctgagatcaggagttcaagatcagcctggccaacatggtgaaaccctgcctctactaaaaatacaaaaattagccgggcatggtgatgagtgcctgtagtccyagctactcgggaggctgaggctggagaatcgcttgaacttgggaggcagaggttgcagtgagctgagattgcacagctgcactccagcctgggtgacagagcgagactctgtctcaaaacaattggacttaagatggcatgtctttgttttagggccaaaaatgaggcccccttgcttaaggcatggggtccgtggccaggcaacggggtgggactgctgccccagatgtggccatgggggtcgtggtcctttcaacaccaagctatgagctgtcgccatggagaccagggccacctgtggaaaggcggattttgtctgcttttgacttttcttttttaatatgtaaaactccacatcagcggaaaaccccccctacttctggcctggagcttcagggttttggtgctgggacgagtttgttgttctccttagcggggtggcgcggggggctcaaaacgggggcgcgggggctggagttggcagagctctgcatgtcccggcatgtctgagcaggaggaattccgggcggccaaagggttttatgtagattgcttttggacactcgcccaggagtcaggagttgatttttatctcacttcctggtaaccttgaacttaccaggcagggatgagatgacgtaaacttcctcagatgatgtaagttcagccacatcttgctgcccattagggagagaggacgacccccacagtgaaagtaattgagtgaaatgcacgttctggaaatcagtttctattttggcctggaggaatgtggctatactgcttccctgagtgtgacacagttggaatctaatcttgttggtttcccaacatctaggtttttgtttgtttgtttgtttttatgatagggtcttgttctgttgaccaggctggagtacagtagtgtgatcatggatcactgcagcctctacctcctgggctcaagtgatcctcccatctcagcctcctgagtagctgggactacaggcatgcaccaccacacctggctaatttttaaattttttatacagacagggtttcaccatgttgcccaggctggtctcgaactcctggactcaaactgatcctcctttctcggcctcccaaagtgctgggattacaggcatgagccactgcacccagcccagttctttcttaaaacagctgagagttttgttttcttcagcgttcaccttccttgtctccagttccgatgctggcagtggttcctacctctgttgggtttctagatagtttgggaacggggttgatgggtttctgtgaaacacattttccaagtcttgggctttctctggaggggaaggtggatgctggcgggtgacttgcagtgggcgcctggcagtgggtgtggactgtaactgacaggtggaaatgagtagggacactattgttccctccatgccagcttttttttttgctggaaatgccccctccacacccctggtagctctgtgtcctgagaaatccagagtgtgggagacatcactgcatctgtccccccagcttctgtgaagggaagctgtggcctcttttgaatgtggggaacaactgaagactcaggggtcacccagaggtctggtggaaagcaacttcaggtttcatcttgctctattcctcaaaggtctggtctgtgggcctctgaggagaaaacaggtctagccaagacagggacaaaatggggaaggggrtgtgccaggcctgaactgagctaagcacctgccccgggctccacacttccatctttyttttgtyttcatttcacctctgtgtttaaagcactgtgtgacatagctccttagagatataacctattgtctgctcattgtcacgtgtgtgtgtgtcatctttgtattcttgcagtggtttcacatttccttacccagtcaagccagtatcccatccttcctcataatgcacaacatttggctcattttatttttctcattgttattttttatttttattttttgagatggattctcacactgttactcgggctagagtgcaatggcgtgatctcggctcactgcaacctccacctcctgggtttacacaattctcctgcctcagcctcccgagtagctgggattacaggcgcccgtcaccacacctggctaatttttgtatttttagtagagatgcagcttcaccatgttggccaggctggtcttgaaatcctgacctcaggtgatctgcctgccttggcctcccaaagtgctgggattacaggtgtgagctactgcgcctggccaagttttttacaaatatttttcttttggtggaactcatctgtgcactctctggtgtgtttttccacctttgttgggtcttggcttaaaatatcctcatgtgggctaggtgtggttactcacacctgtaatcctagcactttgggaggttgaggcaggagaatcccttgagccaggagttcaagaccagcctgggcaacatagcaagagatcccatatctaccaaaacatacaaraattagccagatgtggtggtgcatgcctgtggtcccagatactcaggaggctgaggcaggaggatcacctatgcctgggaggttgaagccccagtgagccatgatcacaccactgtagtccagccygggtgacacagcaagactctgtctcaaaaaaaaaaaaaaaaaaaatcctcatgcaagaagggaaggaccaagtcccattccctcttgcctcattttcagagcctggggtaggggctacaggtggcataggaagggtctgcaaggtgggtgggacttggcaggtgttgggaagaggaataggggtggcaagtgtcaatggtgaaaagacaggctgaggggtgtggtgggaaggctgggggagaaaggtgagaagtgattgggggggcttccctgatgagtcctcatggagggtgctgaggcagggaacaggggtgcagggacagtgatcagggcacctggtaccctgaccaacttgatgatggcatctcttttaagatgcccaagtctgcgcacttttattcctttattcggcccctagcaccccctccccaccccaaagaaggtcagtwgcatgcgtgtggggatgtagctcaaaaaagaaataagatggagtggaaaggaaagaaaggaagaagcaggaattcaaggtgggtgggctgagcttggggccacctagcccacctgctccaatcaagggctggaacaaacctgaggccacttggagaggcagggctgggcagggacagggggtgggggccgaaatcacagcttccccatcagagccagatgtgtgaaggaaatgtcccagatggcagtagtttctcggcaaggaggggaatcctggagatggttcatgtctgtgatcccagtgctttgggaggctgaggtgggaggattgcttgagcccgggagttcgagaccagccctgggcaacatggcgagaccccatctctacagaaattaaaaaaaaaaattagccagttgtggtgtcaagcacctgtagtcccagctacttgggaggctgagttgggaggcttatctgagcccaggaggtgaaggctgcaatgagccatgattacactactgtaccccagcctgggcaacagagcaagaccctgcctcaaaattaagaaaaaaaaaaggggggccaggcgcagtggcttatgcctgttatcccagcactttgggaggccaaggcagactgatcgcttgaggccaggagtttgsgaccagcctggccaacatagcaaaaccccatctctactaaaaatacaaaaattagtcaagagtggatggtgcgtgcctgtaatcccagctacctgggaggctgagacaggagaattgcttgaacctgggaggcagaggttgcagtggtgtgagatcacgccactgcattccagactgggcaacatagcaagactctgtcacaaaaaaaaaaaaaaaaaagaattccctgctctgcttttctgctcgttgctggcatagaaacatctagaacagaaagtatccactctggggcagatgggagagctggaaaagtagattcaagatgccttttagtcttggaagtttcttccaggaagcaagaccagctggtatgtttacacctgcactccagtgccctggggaggtgaccaggtggagggggatggctcatggaaatctgtcccgcacagctggcccccttttggctgccactgtctagactgttggcctttgacctctctgcctcttgtggcgtctgaacctagacgtcccttttggagacagctggacaaagccctattctccgcagccccagcctctatcctgaggcctctgggagcygcgtgacggccagcatggggtgctgatcatggtcaaggaggcaggtctttgccaggttgccccatgcagccacccatcctcagcatcctaacttgagggggcaggagagggctttgtttttataatccggattaaatttcccttccctgggcacaagtgcctcatgagggcccggggctgctggttgggagggaaagcatccccgtttttgcagtgaggaggcyggccgagggctggggttccacttagacccttggcagaatggctgttgaggggcaggcgctgcccagtgcccacgtctggaaagctaattcccgggtggacgctgaacatacctgctgagagactctgtcccctggtttccaggacagttgtcacaagctgagtggggggggactcccaggacttgagggacccagtcccaccccaaactgctccccctcccccaaattccctttctcctcctgctctttctccccgctgtgcctcccccagttacccacagaagtgcctgcctctccagygctcacagaacacacaaaaagggacaggaattggtcactgggtagtggccgtggctcctgacgatccagaccagcgtctggcccaagccattcagaggtggggtctggggcctgggggttttgtgtcgtgacactttgtctcaaggagattccacatagggatttgaattaggctttctgcttgccaaggcctgtggcatctgagcctggctgagggccgggcaagcctcccctgagcctttggaagccgagttcactctctgcctgcccaggggagcaccggcttggttctgggggctcctctaacatctcaggtttttatcttgtcttaaatttctttctaggaaaaaacccttccctgccaaaggtgactgtgttttctgccgccgaaggagggcccggtccctccaggctcagtgtggcttctccctgaccccygccctagaacttttgccagtgccttttytgaaactcctgtgtcccgggccccccaggcggagaaggatatgccggattctgcctggggctgggctytaggagaccccaaatttgacaccacagaaagcaaataaaacacttgaaatacgcawacatttcctgtgtgtccttttgtggggctggagttcagctgggtgcccggggatagaggggaccccgtgtcactgggtttctattctcggtggtgctgggcccagggcagctggtgaccatgtgctgagtgagcgagaggaggggaattctgcctccagtggtctccttcctcaaaatcagaggcctggcccagcgcagtggctcacacccggaatcccagcactttgggaggccgaggtgggtgaatcacctcaggtcaggagttccagaccagcctggccaacatggcgaaaccccgtctctactaaaaatacaaaaattagccaggtgtggtggcacgtgcctgtaatcccagctactcaggaggctgaggcaggagaatcgcttgaacccgggaggcggaggtcacagtgagccaagatcgcaccactgcactccagcctgggcaacagtgtgagactcagtctcaaaaaacaacaacaaaacccgcggacctttgttccaacacacagggaggttgaggaacttgcctgtggtaacacaggcactggggtttgagcgatgatctgcatcaacctccagggcatacaaaatccccatcatggctgggcacggaggctcacgcctgtaatcccagcactttgggaggctgaggccggtggatcacctgaggtcaggagttcaagaccaggctgaccaatatggtgaaaccctgtctccactaaaaatacaaaaattaggccaggcgcagtggctcacacctgtaatcccagcactttgggaggccgaggcgggcggatcacaaggtcaggagatcaagaccatcctggctaacacggtgaaacctcgtctctactaaaaaatacaaaaaattagccgggcacggtggcaggcacctgtaatcccagctacttgggaggctgaggcaggagaatggcgtgaacccaggaggcagagtttgcagtgaaccgagatcgcgccactgcactctggcctgggcaaaagagcgagactccacctcaaaaaaaaaaaaaaatacaaaaggtagctgggtgtggtggcaggcacctgtaatcccagctacttgggaggctgaggcagcagaatcacttgaacccggcgggtggaggtttccgtgagctgagatcacgccactgcactccagcctgggcgacagagcaaacaagactccacttcaaaaaaaacaaaaaatccccatcattctgacaggggatgccatgccattgccacctttacagacagggaaactgagtttccaccagttgaagccccttgtcccctatgtcacggccagggagagtaggggtgggaatgtgaacccaggcgggcttctctggagcggagggccttgaagaacacaaatggacatgttcattccctacgcctgtcctcagcaggaatgaagacaccctggtctctggctctctgagaataaacttttgacaccaaagggacttggacaacagttaggaagatgtcctggagcaagtggaccccgtgggttgggggaacttcttggactcacagaggactgagggttcttgcacccccagtggaggtattcatatctgggtggtctttcccatagggtcgactcttattattgttatttaatgtagagacagggtcttgccatattgcccaggctggtctcaaactcctgggcttaagttctctacctgcctcggcctcccaaagctctggaattccaggcatgagccaccatacccgtccctttgctgtcttgagccttagtttacccatttctcgtggggcttttgtggcaattcaatgagattctgcttttacagcccttaacttggagcctggtgccctgtcattgctcagtaaatacaatgatcagggtgtgggctctcgcttataatcccagcactttgggaggccaaggcgggtggatcacttgaggtcaggagttcgagaccagcctgggcaacatggtgagaccccccccccccatctctacaaaaaatacaaaaattagacaggtgcagtggcgcacacctgtagtcccagctactcaagaggctgaggtgggaggatcacctgagcctggggaggtcaaggctgcagtgagtggtgatcgtgccactgcactccagcctgagtgacagagtgagaccccatctcaaaaacaaaaacccggtcgggtgcggtggctcatgcctgtaatcccagcactttgggaggcaaaggcagatggatcatttgaggtcaggagtttgagaccagcctggccaacatggagaaaccccatgtctactaaaaatccaaaaattagccagccatggtggtaaacacctgtaatcccagctactcgggaggctgaggcaggagagtcgcttgaaccagggaggctgaggttgcagtgaactgagatcgcgccactgcactccagtctgggtgatagaatgagactccgtctcaaaaaaaaaaaaaccccacaaaataaatacagttaccatcacctcctcttccaggaagccctcctggctacctaggcatctcctctgactcctacagctgcctgggtgtccccattgtagcactctgggtggtaattgacagcctctgtgagagggtggatgggtatgtgtggggccccctctgtgtcttctgtgcccagcacagtgccagggacacagtagggaagcaataaactgctgggaggagaggtgagtgctgtgggtccactcctgaggccagccaggggctcagcaaggcaccaatgcctcctcccaggagtgaaagatgctggaatcaccaggctcctcctgcagtctggggtccccacctaaggaggcccctcaccccgtggctgtcccagtcattcaggaagtgtccactgtgggctgagccctggactggggacacagcaaggatcaggcagctgggagtacagcctggaggtccccccttgggatgagggctgcacaggcagttaaagggtccaaggatcatcccaggatatggctgagaggctgcaagaggctccatcccctagaggccccctccgccctcgcctgggtgctcccagccttactcaaaggagcaggtcggcccggtgcgttgtctcacacctgcaatcccagtgctttgggaggccgaggcaggcggatcacttgagcacaggagttccagaccagcctgggcaacatagcaagattctatctctacaaaagtaaaaataaatcttataaagtagctgtggactgggcacagtggctcacacctgtaatcccagcactttgggagaccaaggtgggcagatcacctgaagtcaggagtttgagaccagcctggccaacaaggtgaaaccccatctctactaaaaatacaaaaattagccaggcatggtggtacacatctgtaatcccagctactcaggaggctgaggcaggagaatcccttgaaactgggaagcagaagttgcagtgagctgagatcgtgccactgtactccagcctgggtgacagagtgagaccctgtatctaaaaaaataaaataaaaatgaaaagatgaggatcttggcctccattcttgcccttccactccattccaactgctgagcctctcacaccctctgtggctccctttcgcctacaggaaataggatttctgtactgggcatttgaaccccattcccttgtttctgctgacccccagcagtctcaatatcccctacttcctcttcccagaaccaccctccccaaagcccttatcgatgcttggaggattcctatgcatccctcaaaatccaaggtttgggaaagatgctgcagtggtctcaagacatcctcagtgtgatgacagcctggggtgggggtaagggggcaaagtacagcaccagaaatcccaactgagtccccccacacgtcttccaccttcccaccctctctttcgggttctggctccctgcctccaggcaatcaccagtttttaccaggagtgcctcagacctgcccggacatgtccaagtcccctagaagcagggaggggtgggtgaggctgtcacctctcccttccctgtatggtgctgataagggcgtggggaggcagagacaggcagagatagacatgatgagagacaggcagaaatggagggagagccagggagagagagacacaaagagaaaaagtggaaattctccagatattttgtttagggtgaggacacggagacacagagagggacttagccagctgaggatgacgatttgggatgttaggtcacccaggtgctgtgctgtgtaactcaggcacagagctgccctgttccgagcctcagtttacccctgtgactcagagcagatctccatacccccatcacagggctgtgtatccgagctcagccagagcctggcatgcagtaggtgcttcataaatacacactgtggacagtagaattatgatgggagcgagcgtgtgaactgggttgctaatgtggagcgtgaagagggaggcccagggttactcggccaatgggttccgggcagcaagcacgtgggggaagcctcagctgaccacttcctggccagtttatgcaggaactcgcacagccggtccctgaggctgagcccaccacttccgccccccatggtcccagccctgctgactcatactcagctgccacggtccgctttccctgctgagcacgggggtgggggcgggggggaagagggggagggaagggcacctgaccgaggccagaggcccagaaaggacagaaggtcatggctggggagaagcaggcaggagaaccgagtcttggccttaactggctggcaacgtaaaacctgccctccacaaggacaagatgaaaacttggggatttggaggggacaacaaattagactcaatcacaatttcaaacttttggatgtcaatatatccatcaagaaattgaaaagaggcctggcatggtggccgatgcctgtcatcccagcactttgggagaccaacgtcggaggatcacttgaggtcaggagttccagaccagcctgggcaacgtggtgagacccggtctctacaaaaaaatttaaaaattagctggacaggggccaggcgcagtggcttacgcctgcaatcccatcactttgggaggccgaggcctggatgacagtgagagactctgtctaaaaaaaaaaggacaggtgcggtgcttcgcgcctgtaatcccaacactttgggaggccaaggcagatggatcacctgaggtcaggagttcgaaaccagcctggccaacatggtgaaaccccatctctactaaaaatacaaaaattagccaggtgtggtggcgcatgcctgtcgtcccagctacttgggaggctgaggcaggagaatcacttgaacccgggaggcagaggttgcagtgagccgagatcgtgccattgcactccaggctaggtgacagacagaaaatcttgtctcaaaaaaaaaaaaaaaaaaaaacccaccagagataaaaatgggcagcagatgacattgtttacataatactgaccacaaacttgatgtcctaaaagaacagggacttctctcagagttctggaagccagaagtccgaaatcaaggtgtcacagcaggactggttccttctggaggctgtcaggactcagaatgtgatactccaaagtatggctccttggcaaaaactttgtggtttttgtttttagagacagggtcttgctctgtcacccaggctggggtgcagtggtacaatgatagctcactgcagcctctacctcctgggctcaagcaatcctcccacctcagcctcccaagtagctgggactacaggcatgcgccaccacacctggctaattacttttatttttgtagagatgaggtctcgccgtgttgcccaggctggtgtcaaacttcttcttcttcattttttgtttttgagatggaatctcgctctgttgcccaggctggagtgcaatggtgtgatcttggctca

SEQ ID NO: 8864 - DNA, 50125 bp, Homo sapiens
  misc_feature (1)...(50125): n = A,T,C or G, or insertion/deletion polymorphism (see Tables 1-2)
gtgagcttgtaatcccagctacttgggaggctgaggcaggagaatcgcttgaacctgggaggttggcagtgagctgagatcacgccactgcactccagcatgggcaacagagtacgactctgtctcaaacagacaaacaaaaaacacaaaaaaagagagaaggccgggcgcggtggctcatgcctgtaatcccagcactttgggaggccgaggagggtggatcacctgagatcaggagttcgagaccagcctgatcaacatggagaaaccccgtctctactaaaaatacaaaattagccgggcgtggtgatgcatgcccgtaatcccagctactcgggaggctgagacaggagaatcacttgaacctgggaggtggaggttgaggtgagccgagatcgcgccattgcactccagcctgggcaacagagcaagactccgtcacaaaaaaaaaaaaaaaaaaaaggctgggcgcggtggctcacgcctgtaatcccagcactttgggaggccgaggcaggcggatcacgaggtcaggagatcgagaccatcctggctaacacagcgaaaccctgtctctactaaaaatacaaaaaattagccgggcgaggtggcgggcgcctgtagtcccagctgctcgggaggctgaggcaggagaatggcgtgaacccggtgggcggagcctgcagtgagcagagattgcaccactgcactccagtctgggcgacagagcaaaactctgtctcaaaaaaaaaaggagagaaagagaaaagagacacagacacagagggaggccataggaagccatagccaaggaacgcctggagatgaagctgggagaagaaggacctccccagatcctcaacaaggagggtggccctgccagcctggatctctgactgctggcttccagactgagagaatgcctttctgttgtctaagggctctggtttgtggccgtttgatatgacagccctgggacacacagacacctgccttccctaggtagagaatgcagccctgcctgttccctcccccagctctgagagttttgactcctttgttctctccccacccacctcctccagccacccctgcccctgcctcccccaggcatccacctggctctggggctccctgctgctgggagtgggatgggtctcagcagggggcgatgactgggctcattgcccaccaagccctgtatgtgcacacggacctgatggtggggtggggggcaggggtgggaaggggctgggctaggccctccgggataagctggcctggcgggacagaagcaagggagctcccagcccagctccatcctcccgtgcacaccaggagcatgcacaccatgcttgcgtctgcaaggggcaggggcagcacacggcagtgtcgaccaggaatctggccggagcctcagagtacaggtctgtgtgaggctgtgtgggcaggatgcacatgtgtgcacactgacactagcaggtgatgggggttggggggtgacccgtcagtgtacgggggaggtgacagtactgatgagggggttgtatacaggaggtgtctgcctgctggtgtgtgaggcatctatccacgtgcgagcaggtaaggagtcattttatgtcaggtgtgtgggtagcggtgggggtgggagtcaggaggtattggtatgtgcccctgctctcatgctctcaagtaccacctatgcatagtttgggcctagtttggctctgggcagctgcctggagatacttctcacacctgagcctgagtgctgtctgacatacctgggttggttgtgcactgaccaaggattatgctcactgaggacgtccttcatgtctccatgtggatgtctgtgtttatttattttttatttttttgagacggagtctcgctgtcgcccaggttggagtgcagtggcgtgatctcggcactgcaggctccgccccctgggggttcacgccattctcctgcctcagcctcccgagtagctgggactacaggcgcccgccacctcgcccggctaattttttgtattttttttttttagtagagacagttagccaagatggtctcgatctcctgacctcgtgatccgcccgcctcggcctcccaaagtgctgggattacaggcgtgagccaccgcacctggcgtttatttattcatttatttatttttgagacagagtctcactctgttgcccaggctggagtgcagtggcgcgatcttggctcactgcagcatctgcctcccaggttcacgccattctcctgcctcagcctcccgagtagctgggactacaggcacgcgtaaccatgcccaggtaacttttgtagttttagtagagatggggtttcaccgtgttggccaggttggtctccaactcctgacctcaggtaaccctcctgcctcagcccaaagtgctggattacaggtgtgagccaccatgcccggctttattgtttttgagacatggtctcactctgtcacccaggctgcagtgcagtggtgccatcgcggttcactgcagcctcaacctcctggtctcaagcaatcctcccacctcagcctcccgagtagctgggactacaggtgtgcactaccatgtcaggctaattttttaaatttttttgtagaaaggaaatctcaccatgttgcccaggttggaactcctgggctcaagtgatcctcccgctgtggcctgccaaagtgctgggataacagggcaagtgccaccgtgcctggcctgggtgcatgtgtttattatgacaattaccagcagccccccaggcatcccgtcctccttcccaggagcctcggcgtgtctgtggatgcccctgcatctagtgtccagcaggcaggcacgtggcacatgtaaaggtaggggaggtgcctggtgcagggcagagggcggtcccgcagcccgctggctgatcacactggaccccacctgaggcgtacctatctcgtcctcacagtgacctaagaggtaggcctgagcacccacattcctgtttcacagccaaggacacagaggcacacagaggttgagaaacagactgaagtgcgtgagttcaggtggctggcctgggtgactgcagtgacacccagcccctctggcccaccgagaatagattgctccagagtcctcctcagtcgtcggcaccatccactcctccttcctgcaggggcattttcagaacccataagtgcctgttatttctcccattgcaaacagaaaactgtgggcgaaagattacctaggtgccgaagcaagagactgaaggcacaaactgtttcagtataataaagaaaatagaataagaatagtcctaatacgaattagatacagagatgatcatggaaaattatcaatcattattataaatattagtcattagcttttaatattactctttgtggcattactaatacaacctaggaataaccggcgggtatagggtcaggtgctgaagggacgttgtgagaagtgacctagaaggcaagaggtgagccctctgtcacgccaacataagggccgcttgagggctccttggtcaagcggtaacgccagtgcctgggaaggcacccgttacttagccgaccgtgaaagggagtctcctttccttggaggagtcagggaacactctgctccaccagcttcttgtgggaggctggatattctccaggcctggcctgcagtcatccggaggcctaaccccctccctgtggtgcttgaatgatcacactccttatccactttcatgctcctcccgtactcctggctcctctttgaagttcgtagtagatagcggtagaagaaatagtgaaagtcttaaagtctttgatcgttcttctaagtgcagagaagaaaatgctgacatatgctgccttctctctttgcttcggctgcctaagagggaagggccccctgtcctatgatcacgtgacttgcttcactttatcacttagaagattcaccctccttaccctgcccccttgtcttgtatgcaataaatatcagcgcacctaggcgctcagggccactaccggtctccacgtcttgatggtagtggtcccccggggcccagctgctctttatctcgtgtctttattacaatctctggtctctgcacacggggaggacacctgctaagcccccgtagggctggaccctacagaaaaccacacccctctcttgccctgctccttagttacctccacctttaccttcccctttgcagcaaattgacctgaaagagaagttggtgttcacagcccctgcgtgctctctgctcactctccaaactccagcccctggccccagcgccgctggccctcggtgagtcgcagtggcccaccctgctgcacccaggctccctcccccgcctgtgtgtgcacgccctctctggcttccagaagcccctctcctggtttgtcctccggcccccacccctagcacccccgtgccccttcctagtctcctttgcagattccaaacctcttcaagttggagtcccagagttcaggcactggtccccagtcacaccccacatgcgattcccacatagttctcttcatccagtgcagcctctgcccactgcatctcctctgacacgtcccattcccccaagggcgctagataaaggggcacctgcggacacacacgctgaggctcctgggaaggaggaccgaccgcctgtgttcagcttagagcccccgacctccatctgtcgctgctcctcgggggctgctggtagttgtcataataaacacagacacccacgatgagacgtgaacacgctcctcagtgagcattcttgggcagtgcacaacctccccagccatgccagcccgcgctcaggcctcccccgtcttccccgtctctccggcgtcggttctcaagctcgtccttccccgcctcatttctccaaaagtccgcagcaaatcctggcaactccgccttcagcatctaccgggagccggcacttcccacacctgcgcagacccacccgggccccagcccaggcagcccctgcacggggagcccgcgggtctctggcgcccgctcgggacgcctccccagcgctccccgcagagcggccagggggtctcgcgagtccgcgccagctcgggatccccggagcctcccctggtgcgctgcagccacgcaggcctgcgtcccgaggcccacacggcttctgcgcggcatcctcaggacgacctggagccaaatccacacgggacggcacagcagcgtcctgccgagcccgcctcgtccgccagcgcgcacgattcaccgcgcctgctgcgggacgggcggacgcggggctgggctggaatagccggctcacggagggctccggcagtgtttgttcagaggagcgcggcgctggtagcaggcgacgccaggactcttctccccaggtgctcccgccgcgcgcggggctagggaggagctgcgggcggggttgcggcgtgggggcggggctgcgagggtgggggcggggctgcggagcagcgggcgtgaggcggggctgcgagggagggggcggggccgtgggcggccgtcccgaggcagggcggggctgcagacgtgggggcggagctgcgggcgcgaggcggggcggggctgcgggggtgggggcggggctacgtgcgtgggggcggggtggggctgcgggcccgaggagggacggggctgcgggcgtgggggcggagctgacgtacaggaagcagctcccattcgctctgggcggtgggcggagatccgggcggtaccagctgtcccggccgcgggggggacggcctggaccagcccatggtcgcgggttaaacagtacgagctcttccaggatattggtctccccgggcggcagtcctgcattaaagagtgtttccaaggtggaagggaggccgtttgaacgcctcgagacccccggctgcaaggagtggcaccttcctcacttcagtcatttctttcccgctctggtctcagtggttccagtcagcgagcaggacagaggagcccggaagaggcgccgtgcacttccgggtcgaagagcgcacggcggcggcagaggcggcggcggccgggcctaggagcgactctcggtcgtgcagcggcggcgagcgctcgcgagcggctgcgggacgcgaggtttccgggtaagtgcggcggccgcgccggccctgggggccctgctcctccgggccgcgggccgcctgtgggcgccacgcgctttgtctgcggcctgcaccgcggggcgaggcctgcgccgcgctggccgcgggccgggagggcgggcgggcgcgcgcgcgctgggaggccccgccgagactgggaggccccgccgagactgggaggccccgccgagactgggaggccccgccgagactgggaggccccgccgagactgggaggccccgccgagactgggaggccccgccgagactgggaggccccgccgagactgggaggcccgtggcctgcgggcggacgtcctgggcttgcgaggacgcggcgagagcccactcgcctcgctctgtggcacccacgcccatgccccctgcgagtccgccctgccgcgtttgggagagagctgtgacttcgttgccttgtgtccggcccctgtgcatggttgccgtcgtgggcttctggccttgtctgcatgtccacaggcctgtgtggctggcggttttcctattccttaactcttgcagtcctcacaagagcctctcaggtgtaggtattgttcccgttttacagaggaggggattggagcccagaaaggctaagtaactggccagcgccggcagccggggatccgcgccagccccgactcctaccatsctccttttgacggggcttgtgttgccccttcttcggagtttatgtgctttacttgtttcgrcaacagcagaacagcagtcagctgggtgaaccacgttctggccagtggtcaatggacaggctctgaggccgagctgaggtttgacttcgggtttggcatagttgatctctctcctggaccatccggttttctttcttattggaagaatgttaagtcagagtgctagtggatggatgrcacctcagcatcatggccatgacaagcctggccttggccctcagcagggctgtgtttatctcaggcccgcggagacctttgtgcgtgcctgactttttgacttccattgcagttgacaattttgagttctcctagctgatacagcagatggtgaatacaagaataaaagtcggcctgagttgaggtgttggacttggctgcaggcttgttcagtgcctgggatgggcactcaggtgccgagactggcgtggaacggggttgcaggcaccccggayaccagaggcccttttcattccttagtaacagttgggactgccaatgcattggttcccctgaatttgaaaagagagagaaatagcctttccagtkttttsttttccyctttaatcccccaaatctggaggctaagcaggagagtcacagtggttcctccaccccagagctctgctagcccagccaaaggtggccagcagctgggaagggctgtggtcttttctgcagaaatggcttcctggcctgtggcctgggacatggcagaggtggktatggggaagggaagatttgttggagttggggctgctggtgcaaccaggaggtcctaagctaggggctcccattaacccagcatcctaactacaggtcctggtggtcccaaacaggtcttgtgcctggtgcttgtgccagagggtacctgcggaggcttcctgggttattttgtgttctctggcaaaatagcccctggttacttttgtgtgatatcgaggaaggatgttgttcagcctcacgtaacctgaacgttcctgctgctgtggtggaggagtgtaagaggcccgtggagtcttccctcaccagctgtggtaaagttcaaaggcctcaggacttagccccacaggtgcatggactcgcaaagttcagcctcattcctgagctggtatttctggccagctcctatgtgccaaaccccacacggcctcactgatctcttctggcagccctggggcaagccctgccattgcctgtcgccccacctaacccttggaggtggtccccaatctcagtgcatcaagggagaggccaggagctgtttgttcacatactacggctcactgcagcctcgaactcctgagctgaagtgatctttgcacctcagactcccgagcagctgggactacaggcggtttccaccacacctacctggtttttaacggttttgccatgttgcccrggctggtctcataacttgcaggctcaagtgatctgcctgcctcagcctcccaaagtgctgggattacaagcatgagccaccacgsccggctgattcacatttttttttttgagactgagtctcactctgtcgcccagtggcatgtagtggcgcgatctcagctcactgcaacctccgcctgccaggttcaagcaattctcctccggagtagctgggactacaggtgcacgccgccaygcccggctcattttttctattttagtagagatggggtttcactgtgttgcctaggctggtcttgaactacggagctcaggccgtctgcccaccttggtctcccaaagtgctaggatgacaggcgtgagccactgcacctggctaccaattcacattttttactttctatgtgaaattcatcatcaaatgaggatttgcactcgggacagttggaccctgggactcccccagccctgctcctccccccagccctgctcctccccccagccctgctctgttatctcttaggtggtctctttgaagtgttccttggtagattcatgtgagagagtctgcctccctctttcagatatgtttctccagggcagggactgcattcgccttgtgctgcacaaagtaggagcagggtaggtgttggagcaggcgtcctggaagatgtggggtctgttgtcagggtggtcacagctattgccagggagttaaggtcctcttatctgagagctgtggtcactgctaggtctcagtgcatgctgtgggagaggggtcaccctcctggatgggccgtggccctcgtgtgtctctcagagccagtgtctctaggattcaggtgcgggacgagcagggcgtctctgcggagttgctgggtccaccaagcaccaggggtgcagactgccttgagcggggatcatgaccaggtgttttcaccttagggtggcaggtagaagaaaggttaattactaatttggcaaaactacttctacaatcgctgtttccaggcagtagtaagatttggcagttgacagttggatggagttgacattcttcactgttttataaggcatcatcttagaatctagggttttgcactgtcttgtcagatgggaagtgaggccgtcctggtttctgagccccgttagggtttgttgtccaggggtttccagacagcagtggcgctgacagccactttcccccgttgctgtggtacatgtgcagcccacagtggtggtgggagctgagctccaatgcaaggaggccctgaactcgagggcagctctggccccctacttcctggcctcttgtgcgatgcgctttcctctgatcatggatggaggttggacttggtgggaaacagagtgctgcagggccggcttcactgcctcgctggattcctgactcactctcctaggacaggcctttcctccgagagtcgcctgggaaacaaggtcaatagcactgatgagaaatgaaccacgtgcacgtatctcctttcttatctgggaccaaagtttgaggccctggtgtggaaggaggagcgtgtccaactagatttcccaaggctttgtacgggatcctgtgtggtttcacagtgaccttgcagagtgggaagggcaggggtcccggctgacgggtcagggccttgagcaagtggtcttgggagccgaggggtgggcctggcctctgtgccttctgcctcctcagctctgggtaccactggggactcagcagcaccctggtggatggggttggggtgcggtcagaggagcctccaggcatcccaacagtggccagccttggcagggagagcaccctacgtgtcactgaggcccctcttgtgcccagctgataaagcccggctctgcctcagctcaggatgaggccgttttgttcgtatatggtgttgcgattcctcaggagcattgcagttttttgagatggagttttgctcttattgcgcrggctggagtgcagtggcgcgatctcggctcactgcaayctccgcctctcaggtgcaagcgattctcctgcctcagcttcccgagtagctgggattacaggcgcccgccaccacgcctggctaatttttgtatttttagtagagacggggtttcatcatgctggccaggctggtctcaaactcccgacctcaggtgatccgcctgcctcggcctctcaaagtgctggggttacaggcrtgagcagctatgcctggcctaattttatatttttagtagagatggggtttctccatgttggtcaggctggtctcaaactcccgacctcaggtgatccgcccgcctcagcctcccaaagtgctgggattacaggcgtgaccaattttttttttttttttagttaaaaacaaatttttattttctggccgggtacagtggccagctaggatctggctttatrggtagctctgtaaatgtgaatcatgtgtaaggcttactggtgagggttgttctgtgggtgatatcttagggctcacccttcacgtgctgtggcggtggatktgacactgggacactggggtgtggcctgtggggrtactgctgagagttgttctgtgggtgatatctcagggctcactcttcacgtgctgtggcggtggatgtgacacggggatgtggcctgtggggagaggtcataactcttcagagggttctttgcagcctgggacagtttggaagttgcttggctcttctttctttcagagctgagctcaatgtgcagcaatggatgacgacagcctggatgagcttgtggcccggagcccagggccggatggacacccacaggtcggccctgcrgacccggcaggtgactttggtgagctgcctagcgccgggtaggggcgtccccaggaggagcagggtgcctggtgtttccctttggaggtcgtctgtgtgtgtcacttgtcaactttcagtctaaaaaaattatgctttgattttaaattgcggaagtagtgtattgttttgttttatttttaatgcaaacaacacaaatgttgaacgaaaggatgttccctttccttgcttgtgcccccaccttgccggccctggggaagccgttagccgtttggcaggtgctcctgacgcctctatgcctgtgcaaagcaacctgctctctgctgcatggtcttgacgccgccctgcggcctgtgtctcaccctggtgtctagaagaaagcagcgtgggcagcagtggggactctggggacgacagtgacagcgagcatggagatggcacagacggagaagacgagggggcgtctgaggaggaagacctggaagacagatctggtgagacagctggtgttcacgccggctcctgtgtttcctcttgtcgtgatggggacagccttttataacacatcctccgtgagagtgctgtcaccacagctggccatgtccctgcggtcacctacggtgaggccttatattcagctgtggtgacggctcactttatttgtagtacttcatttcttttttttttttnnnnnnnnnnnnnnnnnnnncaaacaaacaaaacttgaggctgagcacagtgcttcatgcctgtaatcctggcacttcaggaggctgaggtgggaggagcacctgagcccaggaggtcgaggctattgtaagccatggtcgcaccactgcactccagcctgggcgacagagtgagaccctgtctcaaagaaaaaaagacaagtcaatctcttttcttggctgctccaactttttacctttatcttcatgccagtaactttattaggatatgtttcagtgccaataattcagtttgtttttcctttcagtcttttatttatgacaagttcctttgaaattttttaatttttaattttttttttgagatggagtctctgtcactcaggctggagtgcagtggcacgatcttggctcactgcaacctctgcctcccaggttcaagcaattctcctgcctcagcctcccgagtagctgtgattacaggtgcccgccaccacacccggctaatttttgtatttttagtagatacggggtttcaccatcttggccaggctggtcttgaactgctgacctcatgttccactcgccttggcctcccaaagtgctgggattacaggtgtgagccaccgcacctggcctgaatatattttttatacaatttatgacctagtcatttttcctttggaactattttgttttgttacaggtagtgcatcatatttaattttatagtaccttccactgctcttttatattttgtgtatttatgtgctttttatatttttttgttgttcttagagctaatttgttggtcttaacaatagaggcttctggccgggcgtggtggctcacgcctgtaatcccagcattttgggaggccgaggcgggcagatcatgaggtcaggagatcgagaccatcctggccaacgtggtgaaacctcgtctctactaaaaatacaaaaaattagccgggcgtggtggcaggcgcctgtaatcccagctactcgggaggctgaggcaggggaatggtgtgaacccgggaggtggaggttgcagtgagccgagattgtgccattgtactccagcctgagcgacagagcgagactccatctcaaaggaagaaaaagaaattctggctgtctgggcgcggtggctcacgcctgtaatcccagcactttgggaggccgaggcgggcggatcaggaggtcaggagatcgagaccattgtggctaacatggtgaaaccccgtctctactaaaaatagaaaaattagccagtcgtgttggcacgcgcctgtaatcccagctacttgggaggctgaggcaggagaattgctggaacccgggagtcggaggttgcagtgagccaagatcgccactgcactccagcctgggcaacagagcgagactctgtctcaaaaaaaacaaacaaaaaaaccccaccaaaattagccgggcgtggtggtgcgtgcctgtaatccccactactcaggaggctgaggttggaggatcgcttgagcccaagaggtcgaggctacagcgagctgagatcacgccaccacactccagcctgggccacagagcgagactctgtctcaaaaagataaaaaattctcagctcacttacaattggctgatggttgtgcccttgaacttcttttgagagaacaatgttccaaagggcaggtctgcgctgggtgtggtggcccaggcccatggtctcagctacgcaggaggctgaggtgggaggacccttgagcccaggaagttgaggctgcattccagcctgggtgttggagcgagacgttatctcaaacaaaacaaaggggagacaagtccgtggggtgygctggtggtacctccttccytgtcccctgttgccatcaccctcggtggtgcacagcctgtgaggccaccaaggaggtggccctgccccggccctgctgtggttgcttcctcagagggaggccgagctcaggctcagaactttgcctttccactactttccttctgacatcacccttgggctggaaaatccatggtcctcaagtggctactgtgatctgtgtgtagcagtctttctgcatagccctgtggttatcagggttagaatgttccagaaaggtaacactcctgtttgagactgttggtaagggaatggcactcatggcctgagccaatgtgtgttggccrtgtccttccagagttcgatgtttagctctgcacgtgctctgcgggtctgcttgggtctgcaggtcctgaggggcttccctgctccctcccagcatcaggttagggctctggttcatctgtagtaggtctcygcaccagttctggcgttgccagggctgaaagtgtgggccgtcagggccgccaggtgactctgtccttgagatcctgagggcacattggatgccagagactctgggttgggggctggagtgaaggtggcgggagcctcagcagggcccccaccgtgtctgcgctcaccttctagcagcaaacagtgcgccaagcagcagctgggggacagggtcatagacactgagagctgtgggcgtccaggggaggggcaggctccatggacctggggtggggagaggcttctggagaatccaagctgccacctgaggggcaggaggaggtggctgggcagaggcggcaggccaggrcgggggagctgtgaagagacaggtttatggagacctggagcccctgagggctgagcgccccgaaggaaggggatgggaaggcactggagaggtgttggtatagccactgtgaacacttctttttatttctccaggacctttttttttttttttttttttttttgagaccgagtttcactcttgttgcccaggctggagtgtagtggcgcaatctcggctcactgcagcctctgcctcccgggttcaagcgattctcctgcctcagcctctcgagtagctcggattacaggcgcgcaccaccatgcctgggtaatttttgtattgttattcgagatggggtttcaccatgttggccaggctggtcttgaactcctgacctcaggtgatccacccgccttggcctcccaaagtgctgggatgacaggcatgagccaccgcgcctggccaggactgttttttaaacatgaagaagtagccagtgggtccctaactggtgggaaacatgttgaggagggagttattccacgagcaacacccacgttgctggggcttgggagctttcgttctcattgcttttcccaccctggtgtttcctgctggaaatcacttgttacactgccctttccagcttgaggtagtagccctttccagcttgaggtagtagccctttccagcttgaggtagtagccctttccagcttgaggtagtagccctttccagcttgaggtagtagccctttccagcttgaggtagtagccctttccagcttgaggtagtagccctttccagcttgaggtagtagccctttccagcttgaggtagtagcccttaccagactgaggtagtagcccttccagnnnnnnnnnnnnnnnnnnnnnnnnnnnnnnnnnnnnnnnnnnnnnnnnnnnnnnnnnnnnnnnnnnnnnnnnnnnnnnnnnnnnnnnnnnnnnnnnnnnnnnnnnnnnnnnnnnnnnnnnnnnnnnnnnnnnnnnnnnnnnnnnnnnnnnnnnnnnnnnnnnnnnnnnnnnnnnnnnnnnnnnnnnnnnnnnnnnnnnnnnnnnnnnnnnnnnnnnnnnnnnnnnnnnnnnnnnnnnnnnnnnnnnnnnnnnnnnnnnnnnnnnnnnnnnnnnnnnnnnnnnnnnnnnnnnnnnnnnnnnnnnnnnnnnnnnnnnnnnnnnnnnnnnnnnnnnnnnnnnnnnnnnnnnnnnnnnnnnnnnnnnnnnnnnnnnnnnnnnnnnnnnnnnnnnnnnnnnnnnnnnnnnnnnnnnnnnnnnnnnnnnnnnnnnnnnnnnnnnnnnnnnnnnnnnnnnnnnnnnnnnnnnnnnnnnnnnnnnnnnnnnnnnnnnnnnnnnnnnnnnnnnnnnnnnnnnnnnnnnnnnnnnnnnnnnnnnnnnnnnnnnnnnnnnnnnnnnnnnnnnnnnnnnnnnnnnnnnnnnnnnnnnnnnnnnnnnnnnnnnnnnnnnnnnnnnnnnnnnnnnnnnnnnnnnnnnnnnnnnnnnnnnnnnnnnnnnnnnnnnnnnnnnnnnnnnnnnnnnnnnnnnnnnnnnnnnnnnnnnnnnnnnnnnnnnnnnnnnnnnnnnnnnnnnnnnnnnnnnnnnnnnnnnnnnnnnnnnnnnnnnnnnnnnnnnnnnnnnnnnnnnnnnnnnnnnnnnnnnnnnnnnnnnnnnnnnnnnnnnnnnnnnnnnnnnnnnnnnnnnnnnnnnnnnnnnnnnnnnnnnnnnnnnnnnnnnnnnnnnnnnnnnnnnnnnnnnnnnnnnnnnnnnnnnnnnnnnnnnnnnnnnnnnnnnnnnnnnnnnnnnnnnnnnnnnnnnnnnnnnnnnnnnnnnnnnnnnnnnnnnnnnnnnnnnnnnnnnnnnnnnnnnnnnnnnnnnnnnnnnnnnnnnnnnnnnnnnnnnnnnnnnnnnnnnnnnnnnnnnnnnnnnnnnnnnnnnnnnnnnnnnnnnnnnnnnnnnnnnnnnnnnnnnnnnnnnnnnnnnnnnnnnnnnnnnnnnnnnnnnnnnnnnnnnnnnnnnnnnnnnnnnnnnnnnnnnnnnnnnnnnnnnnnnnnnnnnnnnnnnnnnnnnnnnnnnnnnnnnnnnnnnnnnnnnnnnnnnnnnnnnnnnnnnnnnnnnnnnnnnnnnnnnnnnnnnnnnnnnnnnnnnnnnnnnnnnnnnnnnnnnnnnnnnnnnnnnnnnnnnnnnnnnnnnnnnnnnnnnnnnnnnnnnnnnnnnnnnnnnnnnnnnnnnnnnnnnnnnnnnnnnnnnnnnnnnnnnnnnnnnnnnnnnnnnnnnnnnnnnnnnnnnnnnnnnnnnnnnnnnnnnnnnnnnnnnnnnnnnnnnnnnnnnnnnnnnnnnnnnnnnnnnnnnnnnnnnnnnnnnnnnnnnnnnnnnnnnnnnnnnnnnnnnnnnnnnnnnnnnnnnnnnnnnnnnnnnnnnnnnnnnnnnnnnnnnnnnnnnnnnnnnnnnnnnnnnnnnnnnnnnnnnnnnnnnnnnnnnnnnnnnnnnnnnnnnnnnnnnnnnnnnnnnnnnnnnnnnnnnnnnnnnnnnnnnnnnnnnnnnnnnnnnnnnnnnnnnnnnnnnnnnnnnnnnnnnnnnnnnnnnnnnnnnnnnnnnnnnnnnnnnnnnnnnnnnnnnnnnnnnnnnnnnnnnnnnnnnnnnnnnnnnnnnnnnnnnnnnnnnnnnnnnnnnnnnnnnnnnnnnnnnnnnnnnnnnnnnnnnnnnnnnnnnnnnnnnnnnnnnnnnnnnnnnnnnnnnnnnnnnnnnnnnnnnnnnnnnnnnnnnnnnnnnnnnnnnnnnnnnnnnnnnnnnnnnnnnnnnnnnnnnnnnnnnnnnnnnnnnnnnnnnnnnnnnnnnnnnnnnnnnnnnnnnnnnnnnnnnnnnnnnnnnnnnnnnnnnnnnnnnnnnnnnnnnnnnnnnnnnnnnnnnnnnnnnnnnnnnnnnnnnnnnnnnnnnnnnnnnnnnnnnnnnnnnnnnnnnnnnnnnnnnnnnnnnnnnnnnnnnnnnnnnnnnnnnnnnnnnnnnnnnnnnnnnnnnnnnnnnnnnnnnnnnnnnnnnnnnnnnnnnnnnnnnnnnnnnnnnnnnnnnnnnnnnnnnnnnnnnnnnnnnnnnnnnnnnnnnnnnnnnnnnnnnnnnnnnnnnnnnnnnnnnnnnnnnnnnnnnnnnnnnnnnnnnnnnnnnnnnnnnnnnnnnnnnnnnnnnnnnnnnnnnnnnnnnnnnnnnnnnnnnnnnnnnnnnnnnnnnnnnnnnnnnnnnnnnnnnnnnnnnnnnnnnnnnnnnnnnnnnnnnnnnnnnnnnnnnnnnnnnnnnnnnnnnnnnnnnnnnnnnnnnnnnnnnnnnnnnnnnnnngctctgcgtcccaggttcacgccattctcctgcctcagcctcccaagtagctgggactataggcacctgccaccgcgtccagctaattttttgtatatttatttatttatttatttttgagacggagtcttgctctgttgcccaggctggagtgcaatcgtgcagtctaggctcactgcaacctctgcttcccaggttcaagcgattctcctgtctcagcctcccaagtagctgggattacaggcacacgccaccacacccggctatttttgtattttttgtagagacggggtttcaccatgttggccaggctggtctcaaacccctgacctcaggtgatccacctgcctcagcctcccaaagtactaggattacaggcttgagccaccacgcctggcaattttttgtacttttagtagagacggggtttcactgttagccaggatggtctctatctcctgacctcgtgatctgcccacctcagcctcccaaagatgccgggattacaggcgtgagccaccacgcccggccagtagctcttcaactcttaacatgaaagatgggaacttaaaactcttctgctgcctccctcgcagctctcacttctcccagcctctttaacagtgtaaatatttctgttctgggtgtgtctttccctttgccagataacagagggtcctggcagtgatgccccagtgctggcagggtcctgcccacatgcgtggaaccgggagggtttggagggtttcgggcctaggaggaacctgccacccacaccgagtctgctcctcttcccatgtgaacttgtgttctgtttactttagcgttgtttcattggagtttggtacaaagaagatagcagtgcacgtatggsctctgccgtgttgaactcggagcatctccctgctccctgctggtcaaggtgtagcctcagaaccactccgaattggccagaacggttgtggttagtggcccagttaggagtctgtgctctgcctcccacagggaggaggaacaggcaacctcagaaggaagtcccttccgcgggcagagggtttgtggtcctcatgctttgagaagggggcgttggaaatgggggctgctgtcagggggctgctgcactgaggggctcgcttggaggctctgaaatgaacctgatggtctctgggacctgtgctaggccccagggctgccctgcctctcgaggtctgcctcagccccaggctcagcttagaggagctggtctggcactyaggacgctcagcttcccgcccctcggtgcagggcacccgaggcttcaggttaggtgcagggcagggctcccagggttgtggatgtgctgagcgtggacgtggaggtaagtggcaggagcctgcggggaggtgggctgtgcattgccgacctggtgtcctgagcgcagcctgggcccgcttgcctccagtgccgcggttcacgctgcccatcctgcttgcaccakctggcatgtttcctctccaggttccgaggattctgaagacgacggggagacattgctggaggtagcgggtactcaggggaaactggaagccgctggctctttcaattctgatgatgatgcagagagctgcccaatctgtctcaacgcattcagagaccaggccgtggggacgccggagaactgtgcmcattacttctgcctggactgcattgtygaatggtccaaggtgagttcacctctggttgggtgcttcctcccttcaggatggcctccctgtttataggtgacccagcctgtgttcagcctcttgtgaggttctagttgtctgctctgcggctgaccctggggccacaggattgagtctggcttggtctttgctttgtgagcaccatggctcttgggggtgtgggtgagctcatgtgaggcgtttgtggtgtattggtcaggggcaggagagaggatggccgtgggtctcccaggaccagctgcagaaaccctggttgacataggggccatcttggcctgcaagccagaggcaggtgtgctgtggtgcgtggtcactttgctgccttgacatgtggttctctcagttgatacagaaaacaccggtacgatttggcattcattcacaataactggcatcaaaagagactgtccttaaaacaggtgaatagagtttaccgtaaacgtgcagtgtattttatatttcaaaatgaacttttagaagcagtcagctcccccctccctttctgaatattgtgaaaaatgtcagaaaaggagagcttgcagtctgaggatgactcatgagtccccgacctctgtactcagggctcagctccgacaccactacctcttgactccctcccctccctgcgattgcaccagcagcccgtgctgtccccggctctcttcaggaccgtgacctcacccagggttcctagtgactgggtcctcctgttctgtttcactgagtagctgaaaactgcctgtatgcttagtttgaagcaggacccagacattcctcatgctgctggtggtggcaggctgtgatgtcacccaaagtctggctctggtacttcctgttcctgttctgttgtggtgggtccacagcacacagtagattcagacttagacttttctttttttttttgtttttttgagacggagttttgttcttgttgcccaggctggagtgcaatggcgcgatcttggctcaccacaacctccaccttccgggttcaagcgattctcctgcctcagcctcccgcgtagctggaactgtaggtgcccaccaccacgccagggcaattttgtatttttagtagagacagggtttcaccatgttggtcaggctggtcttgaactcccaacctcaggtgatccacccgtctcggcctcccaaactgctgggattataggcgtgagccaccacgcccggccatttttatttttatttttttttgtagatttttcttttggcaagtgaagctttcatttaaattgaggaacaagatacagtgtttgctatgtattttctgtctggcatttattagataaatattgggcagaagagggcatttgcaaacaagtttgtcagtatagaaatcttacaaatggaaccgggtgcagtggctcacgcctgtaatctcagcacttcgggaggccaaggtgggtggatcatgaggtcaagagatcaagaccatcctggccaacatggtgaaaccctgtgtttactaaaaatacaaaaattatccgggcgtggtaccacgtacctgtagtcccagctactcgggaggctgaggcaggagaatcacttgaacctgggagttggaggttgcagtgagctgagattgcaccactgcactccagcccggcgacagagcaagacactgtctcaaaaaaaaaaaaaggagaactcttacagatgaactgttaaaatgctgcttagcgagattattggatacgaggttaataaagattaaaattgtgtttagaaataagtcataaggagacgtgtaagacatttaaagagcttttctaacacagccgtgactgaagcaaggccccttccctttcgagacatcttgctccatagagaggttgaggatgctgattccgtccttcccagcaggagttcagggtgcttgatgtgttgtgaagtcaacacaggaggacaggaaggcaccaagaattgccaagatagctttgaaaaggggagaaattgcctactggatattatgatttataaaactacagggattgaactggaaccggtccaggaatggaaaccagtcccaggggttttgcaggggcttagaagaggccyggacacactcgggggggcaggaggygcctgwgrggcaggtcagctgggggctgctcacagcacacacacgatgccggacggaktcaagatctcggactagaaagcaaagctgaacctttgaaaagaaagcatgggtagctctgtgataagaaaagagaaggatttcctaaacagtctgagagagtgtctgcaaacgggcacggagcatgtcaggctcagcctgagagggtgtctgcaaacgggcacagagcgtgyggggctcagcctgagagagagtctgcaaacgggcacggagcgtgcggggctcagcctgagaatgtctgcaaacgggcatggagcgtgcagggttcagcctgagagggtgtctgcaaacgggcacggagcgtgcggggctcagcctgagagtctgcaaacgggcacggagcgtgtggggctcagcctcagagagtgtctgcaaacgggcatggagcgtgcggggctcagcctgagaatgtctgcaaacgggcatggagcgtgcggggctcagcctgagaatgtgtgcaaacgggcacggagcgtgcagggttcagcagcagggctcctctgggaaccccagtcccaccatggggggtgctgccgcacacccctggagctggtcggtaggagggcaccccagactccagaggtgggggtgtcacacgtacaacctcaaaggccatgtattcctgggtgtttacccaagagaaacaggagtgcgcccacacgaagacacgtccatcgatgttcaccacgggggaatggacacgtggaccatttgtgtggcagtgtctcttcagtgctagggagggcagaatgccatgagcagagtccatgctgcggctccaatcctgagaaaccccagggaagacgtacctaaccacacccctgagacaacaggaagaaacagtcaggtgggagagggaagggcccgaagaccagggtgggtactccacaggttgtatatttgtcagagccgattgaattattcagttaaaatcagtgttttcttgtgtatggtgtaccttaataaagccaacataaagatcttatgtgggtcagaacactattaataaaggcaaaaataaatttgcaacgtatacctgactgttatccatactatgaaagtaaatttttttttgagatggagtttggctcttgtcacccaagctggagtgcagtggcgccatctcggctcaccgcaacctcagcctctcgggttcaaacgattctcctgcctcagcctcccgagtagctggggttacaggtatgcgccaccacacctagctaattttgtatttttagtagaggcggggtttctctgtgtcagtcaggctggtctcgaactcccgacctcaggtaatctgcctgcctcggcctcccaaagtgctgggattacaggtatgagcccctgctcccrgcctatgaaaagaaattctaaaaatttactagtgaatgtccaacaatcttttggaaaagttagcagaagacttgaacaggctcrccgcagaggggcctgtgcacaatgccgcccccacgcctgtccttcctccctttattgttcttacttgtcactgagatgctacgcgttcatggagctgctctttcctccccgctagggctggcagctctgcagggaggcaaggctcgctgtgctccctccactgccgtgttgccagcagcttagtggagggcctggcgcatggaggcatttagcagatacttgattttcagtgtaaaagaatttttgatctctaagtgaaagtgattgacaagattctgatcctgtttttatttctcacagaatgccaattcctgtccagttgatcgaactctatttaagtgcatttgtattcgagctcaatttggtggtaaaatcttaagaaaggtgagtgtggacgctgccgtggaggccccagccgtgcttctatcccggccctgtgggacagagcatgctttccaaagtgggcttgctctcctgaaatgagggttggttaaatgcttcatagaaatcaactcaagtgccccttgtggccatgagccctgtctggggggtttggggtctgggttgggggttagaggcagagatattgccagctcctgggatatcccttcgaccccacccctgtacccatcacatctgggagcagtgctctggcccgtctgctcggagctctttatttttgagacaccatcttgctctttcacccaggctggagtgcagtagcacaatcacagcttactacagcctcaatctcctgggctcaagcaatcctcatgcctcagcctcctgagtagctgggtccacaggcatgagctaccacacccggctgtttttttttttttttttcccgagacaagagtctcgctcttttgcccaggctggagtgcagtggcacaatctcggctcactgcaagctctgcctcctgggttcacgccattctcctgcctcagcctcccgagtagctgggactacaggcacccgccaccacgcccggctaattttttgtatttttagtagagacggggtttcactgtgttagccaggatggtctcgatctcctgacctcgtgatccacccacctcggcctcccaaagtgctgggattacaggcgtgagccaacgtgcccagccttttttttttttttttttaagaggcagatcttgctcttccgtggcagtccagcacctgctgcctcgccctactgcggcccactttggggccgcagggcttacccgctcctttccgtgcatcatactttgttttctgttgaatactttcctcttagatcaccaccctgagatggtagaaaacataaaaatccctgtgtacacgtggagggagaccctctgggcctgtggagcccaaatatgaatctaaggcaatgggtggattctggattaactgcgtttcacgctgggaagtgacygcggggagtttgggtcctgtgtggtggtgaccgacgattctgtcctagatcccagtggagaacaccaaagcgagcgaggaggaggaggacccgaccttctgtgaggtgtgcggcaggagcgaccgwgaggacaggcttttgctctgcgacggctgcgatgcggggtaagggacggttgggactggcacacgtgccctgctgcgtgcaaggcgggccaggcgcaggagggatgcagagcctcttcgctctgtgaagtctgagtcccagcacctggagctgtgctcaccaccctcagcagcgcggttcagtcctgcrggccttcctgttacactcatttacacttcagtctttccccaaaaaacattctgaggctgcccacagaagtgcaggtaatacatcaagacaaaaaagaaaacagccggacaggaggctgtggggctggtcagccagagggtgggacgtgtcctggtcccggcctttgtgggggaggggtggctatgcctgcgtccatcattctggctgccttggtccctcacctttcaccctgctcctccttcaccctctggtgcatgtccagttatgctgcayctgctgctctccctggcacagctgagagcgcctgctctggccctgcgtggccctggcttcccgggagcctgtgacacttgtctcctcatccctgctttgtgtcgttggctgtaagcagatgcccccttccccgttagcctcctgcgaggggctttccctgttgatttgaataatttttctgctgtgaaattatggagagaggattctggaaatctttcccttgttgaaagaaccagtgaggctgctcgatctggggccttctcttgggtgggaagtagctgggtcagggtttggactacggaacagccggagccaggaggccttgacgtgccgcggctggagccgcaccgaggaygggctcctggtgaaggcctttgctctgtggcgggtggtcccggtcgtcccagctttgactcgtccttgagcacagccgcttgtgcccccacctgtcacctcgttgttagccacatacccaggcctctgctccactcacgctgttgttggtgcaggaatcgctggctgtccttttgcagacactgcaggggcctccttgggggtcctgcaggcggccaccacgtttgtctcatcgtcagttcgccctcctcctcatggcctgtgggagtacaggggccttgcagtgcgctccgccggcccttccaggtccccagcccctgcttggtcctgccctctgctcccagcagccgggagatagccacgcctctgctcacattcgcagacacctcgccgtccctcctttctcacgagtctgagcctaaatccatgttttgtgagtttcctgagtgctctgccctgacggtcctcacctcctcagggttcctgggagcgtctgctgccagttgccccggcaggcactgagttggttgctgtgagtctgaagggcagggctgctgccttgactatcccagcagcctggtcattgcagccctgggcacagtgcttattggctgttgattactgacttacaccgtgaatatatgcagaatgcttaaaaagaaaaaaaaaggtggaggggtggctcagcactccatgcccatgtgtaggactggtcctcttttgtcctctttacctgtggctgcggccactctgggcatgtgaaggaagggcctgggctggcctggaatcgctggacacggcctgagagaccrtggcatgatagacctggtcctggtcgccacaggcaccgtcttgggcaaggccctcatcgcaggccagggccgtgagccttctagtggctcgagggcagctggtaggccagttttcacgcacaaagcctggttttcctgttagcttttattttactcatttacttatttttttcaaggcagagtcttggtccgtcatccaggctggagtgcagtggcgccatcttggctcactgcaacctctgcagcgagtcactgcaacctctgcagcgagtcactgcaacctcggttcaaggttcaagtgactgtcctgcctcagcctcctcagtagctgggattacaggcacatgccaccacacctggctaatttttgtattttatggagaaacggggtttcaccatgttggccagactggtgtggaactcctgggctcaattgatccgcccacctcggcctcccaaagtgctgagattaaaggcgtgagccactatgcccaacctagttgtagtaccttctaacaaggctcttgggaatgtttacagcttaattaaaattttttattataaattacatttacaaacttgatatattgattttctttctacctacactacttgaattacttggcagataaaacaacgcaagtacataaaaaccctggtggatctaaaacattaaaactgatcaatataacgattctcatacttctaaacatttccatactgttacaatttgcagtctgccaaattttcagttaagtctgacttaaaaatcacacgtctaaaattactcagttcctcatgtcaaaatggaatcacagtaggccgaggcgggtggatcacctgagctcaggagttcgagaccagcctggccaacatggcgaaaccccgtctctactaaaaatataaaaattggccgggcgtggtggttcacacctgtaacccccgatccttgggaggctgaggcacgcgaataccttgaacctgggaggcggaggttgcagtgagccgagattgcgccactgcactccagagagactaaaaacaaaaaacaaaaaaacactatctgtagatacactgacattacatgaaataagatacagtttctgatttttttcttttttaagttacaatctaatttaaaagtgtgtgttcaccagggaggcagtgcaggggctcactgaggcctgttaggtgtggccctcccctccctgggcaggtcagatctgagcaccttcagctgcagggccaccaagctccctgtgcaggtggagccatgggtgcctgcaccgtagctgggcaggtctcggcagccctccttgtccccgtgctcgtatttaaacttgcagccaatctcctcttctcggggatgagtgtgggggacacaggcctggcctggctgtggatgggcgcctgccaggcgcagaggggccttctgctcgggcctcaggtgagccgcagcctcctccaaggctgctggagctcagtggtgggaaagtgggttggacgttttcagactttggaattctttgaaagaaggtactgctcrtccttgcctttgtccccagagaacttgtataagaacagatgttaggggacctagttaggctcttggagtgcccccacccrccgcccccctctgctggcctggcagggcgtgtcgtgtgcccggggcagtcggcttctcttcctgcatgcctgtctcctgtctttcttgtatggccctagcaagggccacacagcrgacaccttctcataggtgcaggactcttgggagaatgggtttactcttgtttaactcgtatcttagatcctagaacagttcagcccgtggtaagtggtagttaagttcagttgaattcaggctcaattttcagggaaatcatcagcttgactcccttcccttgattgtttttgccttactcagggctgwctggggtctttgggatgaagtttcaaggatctttgcatagactcccgagcctcggctgcttggaggggcacatatacctcataccagtggcagcacttcccaaactaccttcccrgaaggctcgatagaaacaattaaaacatagtttcctttcagcaaagaaaccttcgccttcttcagtggcttggtgtgaggtgcaatgtttgaaaacccgggagtgagggtgggggagacaagctctctgggaagggggccccacaggcagcacctaccgcaggagctcagtgtgagccactgtcggcctgtgggtgtgtgtcgtgtgtcgcagccagctcagttgctgtcaggataccacaggctgggcagcgtaaaccgcaggtcttccttttcttggttttggaaactagacatctgagataccagcaggcctggttcctggggaggcccccttcctgacttacagacggccgcctcccckctgtgacctcacctggccttccctcatctaaggacaccaatcctataaccttaaaggttccatgtctatctgctgtcacattgggggttagggcttcttatgaattttggagggatgtgggtcagcccataacagaatgcatcgcagacttgggtgccatcggaggcctgctttgtggtcccctcacttgaggmggtttgggaaagctgtgagcagcacccggatgctttggccctgctctctcctgtaggtaccacatggaatgcttggacccccctctccaggaggtgccggtggacgagtggttctgcccggaatgtgctgcgcctggtgttgtccttgccgctggtaaggacactgctcccgtcccaaggcgcacatgggccttctcactgtccactctgcggtccccggggttaggtttggctgctgtgtggggaggacatctagggctgtctcatgggggttagggttggctgcggtgtcgggaggacatctagggctgtctcgggctcgtcttctcggggatgtgtgtggggtccattggctggggggttccggtcctcagtgttaggagcaccaggctccatgagcagccctgggtcctgtgcacaggtcagcccgagccagggctgctacttggccrgcagccacagggggagccgttgggggaggcgtgtggcctgtgagtgtggcacatcagccctggtggttcttcccagatgcgggtcccgtgagtgaggaggaggtctccctgctcttggctgatgtggtgcccaccaccagcaggcttcggcctcgagcaggtaggacccgggcgatagccaggacacggcagagtgagagagtgagagcaaccgtgaaccggaaccggatctccacggccaggagggtccaggtgggtggcccagccctgacgccagtcgtagaaccccagctgcccagagtgatctcggcagtctgggtgggtgggaggggcgtcgtcggcactgtggggtccgcccggccccggtggctcatgttgttcggcctgctgaggggagcagatgagtgcaccccagggtgaccccagcggcccaaggtggggctgcctctgagcacctggagccaggtattgaggggcaggtgaagcctggccctggcggggtgggggctctaggaaaccccccttgttccccaggccccatgccagcaccgctccctctaggcacctgtgagcaccttcctcttgcactggacctggtgctcggtttcaggtgctccctgcagcctccgtcctgacagcagcctttccctgggcattggacaagcaggagggtctgggctgtgggcatgtggtgtgtgcccttggcaagcctaaygctgaatttggagtggactgagaaggctgggtggggagggggctgtccctgtccagtgccctgcccagtacctgcgccacccccgccacagtgactggtgccctctcgtgtgcccctgggatgctgtctgtcccccacccgccttgcccccgtgggagtgcttggcagcctstggcaggggagaggaaggccgggccgtggctgctgcagtggcgggtggggaggctgtcctgcttctctggctgccattgtgggctgtgttctgggctccatttggggtctgtgctggaccggctgaggccccaagggcatctgacggcaccacccctttgcctgtagcacacaccagggcgcctcgggtcttccctgctggatgaagccatcgaggctgtggcgactggcctgagcactgccgtgtatcagcgccccctgacgccgcgcactcccgcccgacggaagaggaagacaagtaagcctgaagggatggactctcccgccagccacaggctgggacccacgcccgaggtccactcactgcttccctcaaggctgtgggcatttccatttcttctttctgcaagttaatcttctctgctgaaaacactacacagaagccgcgccgggcccgggaggtgtgggtctgatgtgccgatctgcgaccacgctgcctctggcattgtgtcagggtgmtgccggccttcccgcattgttcccctctgctttctggaaggattgcatcctgaagtttatggaagcagtcttgttatttttgctgtaaacatttgtcagaatacgccctgaagccatctgggcctgggcttttctgtgggggccgagttgagatcagtgatttcgcatcttgtcttgcttctgccctgttcaggttttcagtccttttctctgtgagttttggtaattttgtcccagtgctggttaactttgatgacttggttctcagaggtccactgtgaagtgactaattctcccttaaaattaacgggccgctcctggggagagccgtggactgcaccttgtcagacacccccggcgctggtgcgcgtgcacatttggctctcagaagagcattccctttccctcgtggggatttaagtcactgtagacgcatggactcctgctttactcagtgcgttctaatctgtgatcttttagaaattaactgtattgaagcatgcatactttttctttttttttttcttttctttttttttttttttttttgagacagagtctcgctctcccaggctggagtgcagtggcaygatcttggctcactgcatcctccaccttccgggttcaagtgtttctcctgcctcagcctcccaagtagctggaattacaggcacccgccaccacacccacctagtttttgtatttttagtagagatggggcttcaccatgttggccaggctggtcttgaactcccgacctcaggtgatccgaccacctcagcctcccaaagtgctgggattacaggcctctgagccactgcgcctggcctgaagcgtacgtgctttttattaagtgaatgcactcgctttagtgtgtagtcctaggtttgacagacgtaacttccattccagccagcacagaaatagttatgagaccacacttcagccccaccagcagccctgtggccatgtgcatcactgtgtgtcggtcgtgctggtcctggggctccaggggactcagtgtctgtgggtctggtgcagggtcctgggtctccagaggactcggcgtctgtgggtctggtgcagggtcctggggctccgggggtctcggcgtctgtgggtctggtgcaggggcccaacttgctccttttgttcagcacagtactctgggaatctctgtaattacctgtgtctgtggctgattttttattattgagaaatattccattgtatgaatataccacagtttgtcctgttgatgggcgtttggctgggtgttttttgcagttaaaattgttttaatctttatgtcactacagatgtgcagtgagctcatttgtgttaaagtctcaagcagtccacctgcctcggcctcccaaagtgctggggttacaggtgtgagccatggtgcctggccctgatgagaactatgtaagatatctaatggtgcactcagggatgtcaggctctgttcttcggtgcagctcattttctgtgtctctccccgataggaacacattatttttattccttttttttttttttgagacaggatctcatcttgcccaggctggagtgcaatggcgcaatctcagctcactgcaacctctgcctcccaggctcaagcaattgtggtgcctcagcctcctgagtagcttgtaatcccagcactttgggaggctggggcaggtggatagcttgaggccaggagtttgagatggcgccactgcagtccagcctgggtgacagagtgagactctgtctccaaaaatatatatatatatatatatatatatggtttatttctccgtttaaaaatctttgacgccgggcacagtggctcgcacctgtaatcccagcactttgggaggctgaggcgggtgtgtcacctgagatcaggagttcaagaccagcctggccaacttaacaaaactctgtctctattaaaaatacaaaaattaggccaggcatggtggcttacacctgtaatcccagcactttgggaggccgaggtgggcggatcacgaggtcaggagatcgagaccatcctggctaacacggtgaaaccccgtctctactaaaaatacaaaaaattagccgggcatggtggcgggcgcctgtagtcccagctacacgggaggctgaggcaggagaatggcgtgaacctgggaggcagagattgcagtgagctgagatcacgccactgcattccagcctgggtgacagagcgagactccgtctcaaaaaaacaaaacaaaataatacaaaaatacaaaaattagctgggtgtggtggcacatgcctgtaatcccagctacttgggaggctgaggcaggagaatcgcttgaacccaggaggcggaggttgcagtgaggtaagatcgcaccagtgcacttcagccttcgtgacagagcaagactccgtctcagaaaaaaatttgggcaggcgtggtggctcacacctgtaatcctagctctttaggaggctgaggcaggaggatcgcttgagcccagaggccagcctgggcaacatgataagccctatctataaaaaaaattagctgggcacggtggtgcctacctgtagttccagctgcttgggaggctgaggcaggagaatcacgtgagcccaggagttggaggctgctgtgagctgagattgtgccactgcactccagcttgggtgacagggcaagatcctgtctcaaaaaaaaaaaaaaaaaattgcaagccggtgcgtgtggtcccgctgtaccggctccttgggctccgtccactgggctggactcacaggaatggggcagggagggcccagcacagagaagcacagacttcaacctcttttccttaggaagacggaagaaagtgccgggaagaaagaaaaccccgtccggaccatccgcaaaaagtaagagctcagcgacaagatctaagaaacgccaacatcgagtgaagaagagaagagggaagaaggtaaaggtgagcattgggtggcagggcctgagtctcctgctggccacagcaccctcgcgtggttacggagcagggcctaagcctcccgcyggccttggcaccctcgcgcggttatggagcagggatcatcatcgtctttgcttttctgtatttactcagtgatttgctgatggaaatgaacatttctgtagcacagactgaagatggggttgaggccagctgtttcctgaggcacactgaggggttgaggggtggtcatgtgcccccaaggaaccttcctgaagccatcagctggtcggggagccaggtgtgagccaggccagtgcaagccctctggcagaggcccccaggagcagctgtgggtttcaggcaggcctggccagcctggctctgaggagtgacacaagccgtgtctgacaggccctgtccacctcttctgacccatgttcgctgggccctgggagcggcctccttggtatacgtcgtggcgtttgttgtcctaggccctttccatccaaaatcatggaccagacatttaatattcatttttagttgatccctaattattgtctgtgttgatggggtggagggtggtgtgtcattcgtgtgcatgtttgtgatgctcaaaccgggactaaatgtatcaccttgtccactcggactgcacatttaaaacaccttaatatgtaaaaacttgaattacggccgagcgcggtggctcacacctgtgatcccaccactttggggggctgaggcggacggatcacctgaggtcaggagttcaaggccagcctggccaacatggtgaaaccccatctctactaaaaagactaaaaattagctgggtgtggtggcaggcacctgcagtcccagcctcaggaggctgaggcaggagaatcacttgaaccctgggaggcagaggttgcagtgagccgagattgcaccactgcactccagcctgggagacgagagcaaaactctgcctcaaaaacaaaacaaaacaaaacaaaactgagttgcagccattgttcaagtgtttgctgaatcttttttggttttgtttttgttttttttgtttttttttttgagatggagtctcactctgtccccacgctggagtgtagtggtgcgatctcggctcactgcaccctccacctcccgggttcaagtgattctcctccctcagcctcctgagtcgctgggattataggcgtgtgccaccacgcccagctaatttttgtatttttattagagatagggtttcaccatgttgatcaggctggtcttgaactcctgacctcgtgatctgcccacctcggcccccaaagtgctgggattacaggagtgagccaccgtgcccagcctttgttttgttttttgagatggtatcactctgtggcccaggctgaagtgcaatggctcaatcccagctcactgcagccttgacctccccaggcccaggtgatcctcccacctcagcttcctgagtagctgggactacaggcatagcccaccgtgcccggctagtttttgtatttttcgtagacacaagcgttcgccatgttgcccaggctggtcttagactcccgggcttaagcagtttgtcatctaagcctcacaaagtgttgtttgtttgtttgttttaggttggggcgggaacaaagtctggttctgttacccgggctggagtgcagtgacatgatcctggctcactgcamccgccttgacctcccaggctaaggtgatcctcccacgtcagcctctcaagtagctgggaccacaggctcacgccacctcacctagctaattttctttttttggtggagacggggtctcactgcgttccccaagctggtcttgaactcctaggctcaaatgatcctcctgcctcaacctcccaaagtgctgggattacaggtgtgagcgccaagtctgctgcatctttatgtgaatttatactcaagattattgtttatttcctagtaaatataaactcatataatacatatttatctaaaaccatatttaagtttgtttttttttttttttttttttgagatggagtttcgctcttgttgcygaggctggagtgcagtagtatgatctcagctcactgcaacctcggcctcccaaatagctgggatcataggtgtgtgctaccacgcccggctaagttttgtatttttagtagagatggggttttgccatgttggtcaggctggtcttgaactcccgacctcaagtgatccacccaccttggcctcccaaactgctgggattccaggtgtgagccaccatgcctggccctcttattttagttttaaatgcattattcgaacatccgatctgtttattcattcagacaaaattcctggagtagaagctaaagccatgaccaggtgttggataaggacctgctatttcccagttctcaggtcccctgggctctccctttgctttgcggggtgccctgagcctgggttggaacctcgtctcccatccctgtgcccagaacactcctgggcgtcgtcctgagctttttgtcctgcatgctgtttctgtggttcctttcttctgcagacagtgttctgggaccacagcctgggggcccgatggcacgtgagggtgttcacccttgggaggggcgacgcctgccttcaggcgatgaagtcccagccacagcgggaggctgccctgtccgctctgcctagaatcagaaggaaacagctagtaactcttagggtttttaggaatttaggaataatgacagcgcttaaaatctaaatttgtgtcatcttctcaaggcttttttggtgttcttgtttgtttgtttttgagacagagtctcgctctgtcccccaggctggagttacagtggtgcaatcttggttcactgcaacctctgcctcccgggttcaagcagttctcttgcctcagcctcctgagtagctgggattacaggcgtccgccaccaggcccagctaatttttgtatttttagtagagatggggtttcaccatgttggccaggctggtctcaagctggcctcaaatgatctgtctgccttgggctcccagaatgctgggattacagatgtgagccatcaaggggttttactgtcagtcatcagttgaattttttgtttccctctttgtgagttttcacttaatgctactacgacgtgatggtgacactgcaatgcccgagagcctctggtagcctgcaggagcttcacggccgatgtgtgcggcattgttcctgcttgtcggtcatcatgcctgmgaagcccattgactttggcttagtattttccggctctagtgttcactgttgctgatgaaggcttcacgtggcatttacagagccctcgtagatgccatccccgtctctctgttcatctttttctttgttactggattcagagtgaagccaccactcgctctcgaatcgcgcggacgctgggcctgcgcaggcctgttcacagcagctgcatcccgtcagtgttgaagccagtggagccctctttggggctgctgagagcggatattggagctgcctctctgtctctgtttggagatccytatgagctggatcccttcgacaggtgagtgaactggtgatggtcctgcctgggcacccgctcctctccctgggggctgtgggcacggggccccgaggtgcatgcggaggcgttaggttttgtgtttgagagtgagggtggccattcctcccaccgccatacggtgcaggtgggtggcgtggaactcagaggtctggttcggggcccgaatcacacgtgccgccacatggccagtgctcggccatcctcctccgtgccgtctccctgggctggggtttctgggagctgggagtcactkgttccctttggcctgtgtcctcccctctagcagtgaagagctttctgcaaaccctctttcccctctgagtgccaagagacgggctctgtcccggtcagccctgcagtcccaccagcccgtggccaggcccgtctccgtggggctttccaggtgtgtgagggcagaggcttctggggaggtgggggcagcagttgggcatcggatgggagttctagggtggggccgtgatagcctggctctctgtggccctgggtggcgtcagcacctcccctcagctgtcayrctcatcagtcggcccttggcgtgaggcagtgctgcagcccatcctgtgtcagaggccacggcctgcctgtgagcgtggactgggagttgctgcagctccacgaggtggcccctctgccccccaccccggcctgagagccaccagcacagggacaccgcctcgggcaggagcagtggccctggtgaataaggctgtcatcagaggtcaccttttggccagttcttttgtttcgccacaagaacaaaaaattaaccaaaaccaacaaaacaggtaaaggtgcttgtctgccccctcccacytgttggtggagttgggggtggcaaaggcaccagaggtgacttctcccaaaaacgcctggtttccctgsggccagagctgcgaggtggggctccctccctccctccctctgggaggccccggtgagcacctcttagaacagcagccggagccagggctgtgggggaggcgcaggcccggcccagccccactctccctggctcccgcctgctgcggggctctgcctgggtgcgggccctcaggcygtgggaggcagtgacggcagggccttgggtctgtgcccacaggaggcgcctccctgccgcggtgccagagccagacttggaggaggagccagtgcctgacctgctgggcagcatcctgtcgggccagagcctcctgatgctgggcagcagtgatgtcatcatccaccgcgacggctccctcagcgccaagagggcgggtgagtgccttccctgccacggccccttcctctgtgggctgctggtcctcaggctgttcscaagcactcagcccatgtctcagtcacggaagatgtagctgaagttggggggaccattcctcagccatttttctgcattgatttcccttcttragcagtttctcagttagctccgagttcttacccagccccacagcttcatgttcataagaacatgtcctgatggggtactgcccccgcccctggttaatatcgtgtcctgatggcctcaggcactgtactttgtcatccacagagtggctgttgaagcagctctccgggtgtggaaaggcgaggtgtccacctcaacaggcagacaggagtttaaagcgcacgacstcacagaaaaccagttgtgataaaaattaaaccactgacatttaagaagagtgggtgggaaatgattgccattgamttttttgttttttagctccagtttcttttcagcgaaactcaggcagtctgtccagaggggaagaaggattcaagggctgcctgcagccccgagcactgccctccgggagcccggcccaaggcccrtcaggaaacaggccacagagcacagggctcagctgtcaaggcaggtcccgcacccccgcccgcaccgcgggggcgcctgtgaggctggacttgccagcagcccctggggcggttcaggctcggaacttgtcaaatgggagtgtgcctggcttcagacagagccacagcccctggttcaacggcaccaacaagcacaccttgccccttgcctctgccgcgtctaagatctcaagcagagattctaagcccccatgtcgcagtgtggtgccggggcctcccctgaagccagcgcccagaagaacagacatctctgagctacccaggataccaaagatcaggagagatgacggtggtggcagacgggatgcggccccggcccacgggcagagcattgagatccccagtgcctgcatcagccgactgactggcagggagggcaccgggcagccagggcgaggcacacgggcagagagcgaggccagcagcagggtgccccgggagcccggggtgcacacgggcagctcccggcccccagcccccagctcccatggcagtttggccccactgggaccatcaagagggaaaggggtcgggtcgacctttgagagcttccggatcaatattcctggaaacatggcacattccagccagctctccagccctggcttctgtaacacgttccggcctgtggacgataaggagcagaggaaggagaacccctcacccctcttctccatcaagaagacgaagcagctgcggagcgaggtctacgacccatccgaccccaccggctccgactccagcgcccctggcagcagccccgagaggtctggccccggcctcctgccctctgagatcacacgaaccatctccatcaacagcccgaaggcccagacggtgcaggctgtgcgctgcgtcacctcctacacggtggagagcatctttggtacagagcccgaaccccctctcggaccgkcctccgccatgtccaagctccggggtgcagtggctgccgagggggcctctgacacggagcgagaggagcccacagagagccagggcctggctgcccggctgcggaggccatcccccccagagccctgggatgaggaggatggggcgtcttgcagcaccttctttggctctgaggagcggacggtgacctgtgtgactgtcgtggagccggaagccccacccagcccggacgtgctgcaggctgccacccacagagtcgtggagctcaggcccccttcccggtcccgctccacatccagctcccgcagcaggaagaaggccaagaggaagagggtgtccagggagcacggacggacgcgctctgggacgcgctctgaatccagggacaggagctcgaggtcagcgtcaccatcagtgggtgaggagcgccccaggaggcagcggtccaaggccaagagccggcggtcctccagtgaccgctccagcagccgagagcgagctaagaggaagaaagccaaggacaagagcagggagcacaggcggggcccctggggccacagccggaggacgtcccggtcgcggtcggggagccctggcagctcttcctatgagcactatgagagtaggaagaagaagaaaaggagatcagcgtccagacctcggggaagggagtgctcccccaccagcagcctggagaggctctgcaggcacaagcatcagcgggaacgcagccacgagcggccagacaggaaggagagtgtggcgtggccccgagaccggaggaagcggaggtcccggtccccaagctcggagcacagggcacgggagcacaggcggcctcggtcccgtgagaagtggccgcagacccggtcccattccccagagaggaagggggctgtgagggaggcttccccagcrccccttgcacagggggagccagggcgggaagacctccccaccaggttgccagccttgggggaagcacatgtctcgccggmggtggctacggccgacaaggcccccctgcaggctccccctgtcctggaggtggcagctgagtgtgagccggacgacctggacctggattatggcgactccgtggaggccggacacgtctttgatgatttctcaagcgacgccgttttcatccagctcgatgacatgagctcgccaccttctcccgaaagcacagactcttccccrgagcgagacttcccactgaagcctgcgttgcccccagccagcctggccgtggccgccatccagagggaggtgtcattgatgcacgatgaagacccttcgcagcccccacccctgccagagggcacccaggagccacatttgctcaggccggacgcggctgagaaggctgaggcacccagttccccggatgtggcgcctgcggggaaggaagacagcccctctgygagtgggagggtacaggaggcagcccggcctgaggaggtggtttcgcagacccccctgctgcggtccagagccctggtgaagcgggtcacctggaacctgcaggagtcggagagcagcgcccccgccgaggacagagccccccgtgagtagtgccccggcccccaccgaggacagagcccccagtgagtaaggccctggcccccgccgaggacagagccccccgtgagtaaggccccggcctccaccgaggacagagccccccgtgagtagggccctggcctccgctgagaacagagccccctgtgaatcygactcctgtcaaggacagggcccctgagtgagtagggccccggccaccacagggagcttctggagccagggaacactgggatagtgggtgtgggggtctcctgcaggtgggcagaacaggtcatggtcggggatcagtggctaggagctggcacacctcgcaacctccccttggtgctgggggtggatctgagggctgctctgtggtccttgctcctggtgcttttctggatttttccagccatgaaacagcattctgggcaggggtgggcacagagcacccacctccctgtctgtcgggcccccaggggcaccacttcacaggccacagaagccccgagaaggagcctgggacatggaggatgtggcccccacaggggtcaggcaggtgttctccgagctgccctttcccagtcacgtgcttccggaacccgggttcccagacacagacccctctcaggtgggtgtctgggctggagggctgtgggccgtgggcagtggcctggcacccgtgccacacacaccacactaggctggggctgaggcctcacagctcctgggcacagagctgctagctgtagggcccagtgctcagcaggggtgtccctcccaggtttacagccccggcctgccgcctgccccggcccagccctcaagcatcccaccctgcgcactggtcagccagcccacggtccagttcatccttcaggggagcctgccgctagtgggctgtggggcagcacagaccctggccccagtgcccgctgccctgaccccagcctcagagccagccagtcaagccactgcagccagcaactcggaggagaagaccccggyccccaggctagctgcggagaaaaccaagaaggaggaggtgagtcctgcctcctcccactttccccatgttcccatcttactttgaaactaaagttgttggggctgagtttatgggcggaagctggtygctgtgcctctggaactgcaagggtgtccagaaccacagtgcctctggccagagggactcccggctcccttcctggccgcatcacacacatgtcccctctagtacatgaagaagctgcacatgcaggagcgtgctgtggaggaggtgaagctggccatcaagcccttctaccagaagagggaggtgaccaaggaggagtacaaggacatcctgcgcaaggccgtgcagaaggtgggctgtgtgcgagcctgtgtgtggggctcggggtcacgggcggtacgtcgctgctgtctcgtcagcatggactttggggtggccatgagtgcaggcccgaggtcagccagccaggttaggggtcagggggctgtattgccacatcctgtaggcctggggtcaagcctgttcgcctgtggctgcccctggcagatgcttaggaaggagggtgcctcagtgcaccctgggtaatttaaaactacccagcccacgcccagcttacaggtgggagaacgacccccagaggtgagcagttgcctggtgacgtctcagcccatgctccccccgcccaccgacaccgtgggaccctcagtggccttgtgagcggcatagcgaacaggacgggggtctcacataggtggggcggcctctgccgccrtctgtctgcgtgctgcacctagggcctrctcctgagcagggcaggcgagggagcccagctttggccctgggctctggcccggaacatctggatgtgaaagggcatttggtgatygcacctctttctccagatctgccacagcaagagtggagagatcaaccccgtgaaggtggccaacctggtgaaggcgtacgtggacaagtacaggcacatgcgcaggcacaagaaaccagaggccggggaggagccgcccacgcagggggccgagggctgaggccaggcaatcacgggctatgccsggggagctgtcgggagtggcgggaatcggggccatgcccggggagctgtcgggagtggcgggaatyggggccatgccyggggagctgtcgggagtggcgggaaatggggggcatcascatgcctgccgtcgggttcctgcgctgacacctggtctgtgcacctgtgttgctcacagttgaaaactggacacttttgtatgtatattatagagacactgtttccattctaatttatcaaaaatggattatctttagaaacctcttgattgacttactacttggaagataaagcacttggtgatcaagaggggctcctggtggggtggcgcgtccttgataaatctctaggtggcctcccgccaacagctgctgtgtacctttggctctgaattaggaatatctttactttctcttttccaattatgttgtgctcttgtaaataattgctcgagtttgcactcaacaccgttgcctcctggaggcagggtgcagcagtggcagcctgagggctggcgacaggtgtcctgcatggggaaatgctgtccctgcccttggcacagctggtgggagtggctttggcggccactggcctgtcaagggtcttgttctttgagtcaaagcttggctgtgatgtgtgtggtgaagacagaagtgagttggtgtgcagggaggccgtggaggtcccctccctccctgggcctcacccgtgttcagcctggacccaattccccaccagccaagatgccagtacgtgttctggagttctttttattagactgggcggccgcggccagctctaggtgggctgctccagctttctggagttctcattagactgggttctaggcgggctgctccagctccataaggaagcactcgatgtcgtcatagaggctgttggcgctggacaggcagaggctgaggctgctgctatccagggaagacacaccctcacgctgcgtgccctctaggtgcactcggcacagccagggttccagctgccaggagggatcgggcgtcttgtcagtgacccggcgtgtgtcctcccctccccctccccaggctctgagggcgtcgggcgtctgtcagtgacccggtgtatggcctcccctccccctctccgaggctctgagggcatcaggcgtctgtcagtgggcctgagcacatggcctcccctccttgaggctctggtctcaccttcaccaggaccaggctcttctccttgggcctcccagctgacaggtcctgcccgaagcccaggtagatggtatagcgtggggagccacggcgctgccgtgcccggaattccaccagctctgaagaaggggactctgctgagtacctggcaggcaggtgctcccaacgacccctggagacagccccccaggcaggggcctcactgaccttggaagaagactctgaagtcgaagatgggggtgtcacagttccgaggcagcaggcaggctggggtggaggggctggcggagcctgggggtccgcccacctcccagtacaccttgcacttgcccatgcgccgggcccacagctgtggcccccgaagctccaggtgcaacccaggggccacgtgccgcagcagttcctccgtgtagcgcagctgcttctggtccgggagctcggcagggctggggaatgctacctgctgggggtctgtggcccggacagctgggtctggggggccgtataggaacgtgcagctcgggtgtcccaccaccttctgcagcaccgtgcggcccttgtacatgatggtcacgtccagcgcccctgggctgggctctgtgtggagaccaagctgtgagtgacgggggtgggcggggacaggctgtgagtgacgggggtgggcggggacaggatgtgagtgacgggggtgggcggggacaggatgtgagtgatgggtgggcggggacaagccgtgagtgacgggggtgggcggggacaggctgccccttcctgggatgcactcaccttgcaccgcggtgcaggcgcttggggagggtgacaggtacggctctgcctggtgcggggactctggggccgcggcctcgcctgcatccggaagggaatcctgtgctggcacctcatccctagcctctccctgtgccccaggcctcccaacccctacccctctcacctgtcgttagtgccgcgggctggggcccggggctgggggtcgtctctactgcccacccgtacagctccccagcagggagccctgggcctgaggaggggaggacagtgggaacggtggtcccctcctaattctccagctccccaatccccagcccccttctaaagtgtccgtccaggtgcactggcccctcccgcgctccccccctccccgggcacgcccacacctccagcacaggccccagtcaggggaagcccttcttgtccctctccaggagccttggttgggactggatctgccccccatgacgctgtcagcagatggtctgccaggcagctctgttgcactgcctggagcaggaggtcccccttgtcaccagctggggcagggagggggcctggggcttggagtccagcatgtgtgtgtgccaggaatggccctgggggcccaccctgcagggaaaagtcagggtgaacgtaagcagctccgcggcctggcaggaggagaggcaggcagagagaagggtacctgtggtggtgggacagctgcgggggcctctgcctcagtctggtccgtgcctgggccttctgagagagaatggggcaggcgttaggccccgacaccagagtgagagatacaaggagagcctggtgtagcccccaccagcttcctggctgtgaacccttaggctgtggcctgaggaggtggggatgtggctctccacctgtcctgggcctgctggcagcctctcccagaacagcttctaaaaccacaaatctgacccagagaatgttcccctttgcccaagcaggacgaatgccaacgcccttggcagccggcgtcgctcacctcgccagcacagctcccggctgagcgcgtacaccttgtgcgggtcggccgggtcccccgagttatctcgcagcatcacgaagcgacgcgtgctgcgcagtgcgcagcggaagttggttttccagccggcgcgctccgcagtctcagcctcggggggcgggccacctcccctgctgctaggcggccacctgccgcgggccacagcccaggcctgaagagggggacagaacacgtgtgccgggcccgcggggtcctaggcgggctctcccacccggggcggggcggggctggggtccccaccttgaagatgcgcgcgtcggcctcgctcaggtccttgcgcgcgaagtgcttccagggcacgcggaaacaggtgcgggcctcgtccagccactgcagcccctcatagcagccgctgctgatctctccaaggagccactctccgaacagcacgcgtggggctgccctgcgggtgcccggccgcggagagtcagggccggctgcagggcgctcggggactggcatctggagagggtgggccgggctcttacctctcaggagccaaggccattgctccttctgcaggggcagttaggtggcggtcaggtgttataacaggggaggtaagggctcctgtcgcagcagacgccaggccgcggccacaggtcgtgtggccaggtgtcacaggtgtccacaggtgtggactgagggcttgtagccaccgacgctgcctcggtatggatctcttggcagagggggctacaggtgtgactgcaggtgtggccggcgcgcacacatgaagtcacaggtgttgaaccagtgtccaggcctggcgggaaggcgcaggccggaccctgcggagacgggaaaggcgacgtcaggggcgggtcaggctcccgggaaagcgaaacctaaacagtggcgcttcgcaccctcctcgatcccaccccgtccggttctcagctccgcggaaccccgcctccgcctccgcctccctccccgcccgaccctcatctctcaggctcccccagctcttggctctacccctccggggtcacggagcccccacggaggctctcgctcccggcctgcaccgcgtgggtctggggtccccagtacctgggtgccagagccgccgggacgggaagtttcgtctcgcggggaagcggagggccggcgcttttatggtggccaggcgggagtttccgggaagggcgcgcgccgcctgttcttattattggatgcgaccagcggaaccccgccccggccagcgcggagtagggaggagtggagggcgttgggagtggctgcagtgagccgagatggagccactccactacagcccaggggacagagcaagactcagtctcaaaaaaaaaaggaagtgggtaatgggaggtggacgtgcctcgaaaaaggggcagctgcaccgtttgcgtttctttttttgagatggagtttcgcttttgttacccaggctggagtgcggtggcacaatcttggcccaccacaacctccgcctcccgggttcaagtgattctcctacctaagcctcccgagtagctgggattacaggcatgaaccaccacgcccggctaattttgtatttttagtagagacggggtttctctatgttggtcaggctggtgtcgaactcccgacctcaggtgatctgcccacctcggcctcccaaagtgctgggatttaggcgagagccgccgtgcgcagccccctttgggttttttacattgttcagtcaagaatatcagatactctcacaattaaaacatttggaaaggaattaatggtgtatttccattagggaaagtgctgacaagccgcaagggatcccttgatggttctgggcatgggcgcccagcctgggctctggctttgggagcagcgaggggaatgtgtctctcacccctaggcctcctggtctggctcctgctcaggccacacggcgcacccacccccagcgcgcctcagtccaggtcactgggcagggtgtttactgctgcgctccaacccaagcatgtagatttcagaaggggactaggacccccggcaggtgtttgagaccaccggctcccaagtgcgtcgccttgggggtttgcatcggctcctcagcctccccaggcaatctctgtgtagggtcgggagcgggaggtctgagttgagccgggtgcctgagatctccggtgcaggtcgggggaggggagcccccctcgggctgtggttagagcgggagaggaacttcccagactagctggcacagagcctcgggaaggcggcgggcactgcaggtggtttacgggaagtgctgcagccttggggtggggacagcgtggccagacccaccgcctcatctgcacacctgggctcaagcgctaatgacgacaggggactgagtgaatgggacccccatggacccgcgcgcctgccccacgccatggcctgggtttcgggagccttgctttattctgcctcgggtcggaggctgggggagcgagacctccagtgcccgtgcggctgggggagagggtggaggggccacttagatgtaggagtcatcaccaccgggcgcatcgtagggacccccacccctccccgcgccctcgccctcatcgccgctgccggagtcactggcgccatccacgtccagggtgggcgcgttgagaacgaccacgtctgcctccgtcccgatgtcctcgccaaaccagacagccttgtacccgccctccggccgccgctccttggtcaggatggacctcaccgccgtggggcttccgccagctcgggccgctgcggggggctcaggggcaccgcctggggaggcagggccggggggtgcgggctctgcgggcatcggtgcctccgcgggcttggggtcgtgcgtggggctggggacgggcgcccagttggccttgtggtcagggaggaacgcctggttgtcaaagccttggggctggggctcctgcaggcgggagtcgaggcgtcagcggggtccctgggtctctgcagccttggccctgcacaccctcattccacgctggacacccctccgtctccacatctgtccctctgccctcccctctcctgtcccccgtcccccacttcctgcctggtcgcctgccctgttctccatcctgggcctcaccggagctttgccagagcagcacttgagccgggggccatagtgcttgtggacaaggacggcgaggccaaggagagccagcagcagcagcgcacccagcaccccgcc

SEQ ID NO: 8865 - DNA, 14062 bp, Homo sapiens
gcctcactcacgcagcttccgattctgtacctcatcctccacgtgcacactgagcaccagctgcacgccaggcactgctctaggctcgaggaggcagcagccgccaggagatggcatctgtgccctcatggtgataagacagcagggctggtctctgtccccggtgccaggcagagccaccgcctcgtctccaggatggtctgcccagaggcagcctccagcacagcagtcaaatgtgtccacgcgggcccaggtccccttgggtggctgtgctgctgtcacctgagtgcccttgggcaagacccctcaccacccacccccaaacccaggctcccttagcctgacctggtgctggtgactgtcagccgtaggcttttggccgtagtgctgggggctggaccaccttgtaggcctgcgatgcagtttgctgagttcctgtgctggagagacccggatgagcctggctatagtccatgcaggaaagggcgactcagccccacacacttctcttcccacctcgggctgtccccaaggcagttgtgtccagcggctcctgcagttctcttgcgggtctgcctgggccttccagcaagccccaccagcccagggtcctcggggtcctgagcaggaaggggtcagcagaggagggagcaggggccactgttgcggggctccatgggcaggcggctctggactactcactcctggttggagagtggtgacagccccggagtctctcactgcgtcccttcgtgagcaccagggtccaggagccgtcttggtttgtttggctcctcccaggagcccgaatgtttgactttcacgagcacaacatcctgctggagaccctgagcaggaccgaagggaaacggcctgtgcctgcgtctggacctggctgaacttgcaggtgcccccacccgaggtcctggcagcctctgcacacaggccacgtccatcctctgcctcctgcttcagaggcagccagggcgggctgtggcgcttcccaggctctgatggaggcaggtgtttctggacacaaaggagaagcagttgtttggccaaggggacagagaagccacatttcagcgaggtcatgtgagctactgacctctctgtgccccataagccccatgtgagctactgagcagatgccctctgtgccccataagactttgagtgcacgcacccgtgtttcacacacatgcaggtcgcgcctgcaaaccctcataggctccacgcacactcagcgtggttgccgcggggctggctgtggtgtgcaccccgggtgctgctgaggccactcttgctcctcccctgcagagttcgaggagcccagggtgattgacctgtgggacctggcgcagtccgccaacctcacggacaaggagctggaggcgttccgggtaaggaaacacggccctctccttctagctctctcctgtggtgaagattctcttgcagtttccgggtaaggaaatgcagccctctcctccaagctctctctctcaagattctcgcagtttcttccttaaccactcggtgaacctgcttgcgttttccttctcatctgcgtgggaactcgtgtttcaggggcggggccaggctctggagggaggggctttggttcttttgtccgtgttcacgtctgagcgtggccttggtgcgggtcctgtggatggtcaacagttggtcgggacccagccacagcctggggggaggggaccaaggacactaccgggatcgtttaggggtgtcaccacttcctgagatggaggcccagggagggaaggagaccacctcaggtggcaggggctcctggggcgtgtggagtgccagatcattctgagggtggagaattcatcagctcggtgagcacccagcagggctgtgaggagtggggagtccagcgggggtcctgggtgggcagccttgagtatggtatccggccatgagttcacccagggtccctatagctggtgtctgttgggagggaggtgggtgtggtcctgccctcataggacttgggactttcctggccccaggaagggcccttagcacctcccccagaaaggggtcaggagcttccctctggggctggggcaccttagctggccgcaggcacgtgcatggggcttggcaggtggggccacatggagggccctgggtctggagcgtggggtcaaggcagggcagggcacctacaggagcagggacagagctgcagtccagcagcagtggagcccaggcaggctgggggcagggtgcagaggcagccaccacagaagcacagcccctggacatggggtctggctgggaacgagctggaggccccctagattcggggggcgggggtgccatttgcagagacagggaaggggtcggcttagggctgccaaggaggcgcgggctgggacccgttgctagtgtgatggcctcccagctgccgccccctcattgcccatgtcaccgcaaggcctgtcctgccccgggtatggcgccgtcccttggcgtccttgcagttcacccgggaccacaagatggcgtggcgagcacggggagggaacactcacctatggaaaccttgttccaggaggagctcaagcacttcgaagccaaaatcgagaagcacaaccactaccagaagcagctggagattgcgcacgagaagctgaggcacgcagagagcgtgggcgacggcgagcgtgtgagccgcagccgcgagaagcacgccctgctggaggggcggaccaaggagctgggctacacggtgcgcacgggttccaggaccggggaggccacagttcccctgcaggaaagatgaggccgcccacatgcagctcagggcttcctgtagatggggtgtgggccccacgctgttgtcttccctgtccgagttgaaccccagggccacaagtgtgtggggcactgaaggccacagcagccatgctaggggagccccccgggcttgtagtgcagtcccccgaccctcaggtgagagcgcaggccccggcgggccactgcctcgtcctcctgtgaccaggatggggcgtgacctggatacccacagccagcccatgagtcagggcactctccagcctttgagacaggcgagcctccttccccacagcccctgggatgtgaggggaggaggggcagagcccaggagaagctgaagccagcgcacagccttgccacagaggcacagaaaaccctggaagctcatgccaagttctttctggagggagctggggctcaggagccccatctgtgccttttaaactttgaactgcaggcatgtgttaccgattcaaaaataggaaaggcctaaaaaataaatgaaggtagaagttctgataggagagggtggtgcgggtctgcctggcagaatgtgcaggagagcagcctgtggcccttgcccgtgggcaggagctcaggtccagggtgagcaccaccatgtggggtttgcagggcgctcccgcgagacgcggggatggaatgctagcgtgcacctagcttcacctgaccacggcaaagctcggtgttggttaagaaagccgtgtggcactgcctgaggcacccgcaccgttggggcagaggtcagggccgctgagagaagggaccttcggtgagttattcaccctgagccacgggcttctatgtggagagggaggtggcgcccacgagcagggttttgtgagaatctggggagagctacagtgaccccagcccaggctgggctgacgcagcacctgctgccactggggtggtatctgtggggatgctctgggctgttgtgatgtgaggagctggaggtccctctccttccctcccaggccctgaggaggaaggcgcctttcccagagctctgtcccagtctctctggtcattgcttttaaaaataacactgtggggctgggcacagtggctcacacctgtaatcccagcactttgggaggctgaggtgggtggatcatctgagctcaggagttcgagaccagcctgggcaacatggtagaaccccatctctaccaaaagtagaaaaaattagccgggcgtggcggtgggcacctgtagtcctaagtacatgggaggctgaggtgggaggatcacttgagcctgggaggcagaggttgcagtgagctgagatcatgccactgcactccagcctgggtgacagagcgagaccctttcagtaagtaaataaataacaccatgggcctatcacagagaccctgagctttccacttcagcatgaactgctcctggctggtggctcttagcgttctttggtgggattttctagttagcactgagctgcttttgtgatttgagcatttctggatgggtgtggaattggaaagtcagatgtgcagggcttgcgccttttccttttggatcgcgcgtctcctgacatgaggctgagctcacagagctggcctcgaggcgcgctgtccccagctgatgagacgtttctgtccacaggtgaagaagcatctgcaggacctgtccggcaggatctccagagctcggcacaacgaactctgaaggcattggggagcccagcccggcagggaagaggccagcgtgaaggacctgggctcttggccgtggcatttccgtggacagcccgccgtcagggtggctggggctggcacgggtgtcgaggcaggaaggattgtttctggtgactgcagccgctgccgtcgcgacacagggcttggtggtggtagcatttgggtctgagatcggcccagctctgactgaaggggcttggcttccactcagcatcagcgtggcagtcaccaccccagtgaggacctcgatgtccagctgctgtcaggtctgatagtcctctgctaaaacaacacgatttacataaaaaatcttacacatctgccaccggaaataccatgcacagagtccttaaaaaatagagtgcagtatttaaaccacccgcttgttggctggtcactaagtgtcctggtggctggggccggagccagtgctcgtgaagggatcgcgtcatagccagcttcccctctgggccctgtgggtctttgcagccaacctccttttcccgtgagacggcccggcctgatttaaagccaagagcgcttgagttgagtttgaggggaagatgtggagcgtgtggttctgtggacagtcagagactgtggcctgggggcagcgtctttcaactctcacctctgcagctcagggacctcgggagacctcaccaaacctgcagggcctccgtgtccctaagtgtgctgtgtaaatgccccatctcatgggggagagacagccacggaggccttcctctgaccatagctgatggactggcggttgctcaggtccggctccgagaatgttcctgtgtctgagcctggaagaggctcgggtctggctccgggcgtggttcccttcccgtgtctgagcctggaagaggctcgggtccggctccgagcgtggttcccttcccgtgtctgagtctggaagaggctcgggtccggctccgagcgtggttcccttcccgtgtctgagcctggaagaggctcgggtccggctccgagcgtggttcccttcccgtgtctgagcctggaagaggctcgggtccggctctgggcgtggttcccttcccgtgtctgagcctggaagaggctcgggtccggctctgggcgtggttcccgtgtctgagcctggaagaggctcgggtccgggtccagctccgagcgtggttcccgtgtttgaacctggaagaggctccaccaggcgtattgtgttttgactgcagctggatcttggcttgactgttgagatctgccaaacatccgctaagctatcatttctgagaaaggtcaaggctagaggcagcatgtcgggagttggcgcatcagggttggaagggccccagggtacagcatgtgggtgcctgttcctttgtggacttgtgtgtgtgtggctggtggggcggggggtggattctggttcttttttttcccattatcctgagagccttaaggtactcagtgtgttggtgagactcagccctgtcatctagcagaagygtgttccttttcattgctgtatagtattccattgcatgactgtcctgtgctctgattttaatgcactttattgtgggtggatatttgagttgcttcctttctggggtaataacactcacttggaaatagctgtggtgaacactcgtgtgggggtgggggtgggggccaactctaggagcacctaatggatcttacgaagcgtgttgtccaagtatagagatgattccaaagtggttggactgtgtttctttctcccagctgggtggaaggagaacactagtggattgctgagacttggtgctcggtatttttaattatggacagcctggctggcgttttgtggtgtctaattgcggagtagcgtgtcttactgtataatggcctcttttgtatgtgggagaccatggtgttgaggggaggcagttacacaaaaarcccagataccgagtgttagttccatgggtgtggctggtcatggtgcgcactcacgaaggatgtaggtgatgccctccactccgcagagccagtcccacaggggtacccattctgactcctaccaccrcagctccctacctcccgcctgccatgggttccamgtgcatggctctgggcagtctgtgtctttgcgtgcgtctstgtatgtctgcgtgtatctgcttacattcgctcagcatctgagattcacccaggcttttgcgtggatcagcggcagactcctgattgccgcgtggcggcctgttgtgtgggtgtgtgccgcgtgtgtatccagtccctactcaggagtgtacgtttccagtgtgggttgcagtcaggatccatttctcccttaactttcagattatttgctgcataggcttttttctcctaatttggcgcctttgtcagaaatcaactgacctacctgtgtgggtctgtttctgtttgtccttacgctcttgccattgccacactttagacaaggtcttgctctgtccctcaggctggagtgcagtagcgtgatctcagctcactgcacccttgacctcccatactccagcaatcccctcgcctcagtctcctgagtagtagctgcgaccacaggcgtgtgtcaccacacccggctgattttattttttttatttttattttttttgtagagacggggttttactatgttgcccaggcaggtcttgatctgggctcaagtgatgctcctgtctcagcctcccaaactactgggattacaggttgtaggtgtgagccatggtgcccggccgccacactgtcttggctacagttgggtttataataaaccctgaatcgaggtgatgtgcattttccaactcttctttttaaagattcttgtggctgtttatgtccttggtgtttccatatatgttttacaatcagtgtctcaatttctaccaaaaaaacatgccttctggaatttcaatagcaattcccttgaacgcatttttgaataccttttctgaatgtcttgaatacatgttgggaagaatcggtgtcttaacagtctccagtgtccacgcgttgactgccgtgtgtgactccagtcggcgtctcaacagtctccagtgtccacgcgttgactgccgtgtgtgactccagtcggcgtctcagcagtctccagtgtccacgcgttgactgccgtgtgtgactccagtcggcgtctcagcagtctccrgtgtccacgcgttgactgccgtgtgtgactccagtcggcgtctcarcagtctccggtgtccacgcgttgactgccgtgtgtgactccagtcggcgtctcarcagtctccggtgtccacgcgttgactgccgtgtgtgactccagtcggcgtctcarcagtctccggtgtccacgcgttgactgccgtgtgtgactccagtcggcgtctcarcagtctccggtgtccacgcgttgactgccgtgtgtgactccagtcggcgtctcaayagtctccggtgtccatgcgttgactgccatgtatgactccaggtattgagttcatcttcaacttctcccaacaatgaactggagttttctgtgcatgtgtctggcatgttttcctttagatctagtcctaggtgttcgatatgctattgaggactgtgtatttttatttcatttgtcacctgtgcgtggtgctttaatcctgtgccctaaactcccgccttggccatggcggtgtttctgtggactcgtggggtttccgtgtgcacacgcgtgtcctctgtctgacagtggctttgcttccccttgtcagtctgtgcctcggcttctcactgcactggcgaggtgagccggcgctcgctaatcttattcccagtctcggtgaacatgggctcagtctctcccggctcagtgttgggtttgcactggtgcacttacaggcggaagagcttcctcatttgctgagggcttttcctgaatccgtgttgaatgtggtcagctgcctttcctgcacctagtgagatgctcatgaggtcacttccttaccgcattactgtagtgaattacgctgactttcatatgccaagatgacctggcatttccaggtaagtccctgtggccatggtgcattggccttttctctgcatggccagatgagatttgctcataccgggctaaggacctcctgtgtaggaatgctcttgagggacactgggcttggatgttcattgtcttgtcatgtgatgtgtctgtcatggtttgatattgcattaagtgggcctcctgaaacaagttctgccatagtttgtataggattggcattatttgtttcatagagatgtgatgggtgaggccatctatgcctgccattttctttttgcttaggtttttcattaagaacttgatttttaaaaatagacatgaggcctggcatggtggctcacgcttgtaatcccagcactttgggaggccaacgtggatggatcacctgaggtcaggagtttgagaccaacctagtcaacatggtgaaaccccgtctccattaaaaatataaaaattagcagggtgtggtggtgcatgcctgtaatcccagctactctggaggctgaggcaggagaatcacttgaactcaggaggtggaggttgcagtgagctgagatcacaccactgcactccagcctgggcaacagagcgaggctctgtctcaaaaaaaaagacatgaggcttttggattttctgtttcttcctttgtcatttttttaaagataggtttgtcgcagaatttcatctaagttatcaaaacaatttacataaatcattcacagtatcctctgtgcagtgatgtccattctcattcctgctctgggccatttgtgttttcttttccccctgatcagactagctaagagtttatcatttttacagatattttccccaaagaaacctacttttgggtccattgattttttttttctattgttttctttttcattgacttttgctcttttcttatgaatttcctttcttctacctattttgtgttcaatttgctgtccttgttttaggttcttttgatagaggcttagatcattgatgaagaatatgaaagaatgggataatacagttaaaaacttggtctacttatgcccattagagaaaacattcttaagcacgcatggaatcttttaaaaatggacgaggtactaggacccaaagcaaatgtcagtaattcgcagatgataatgtaatgtataaatatatgatatgtaggtaaataatacaaatcacattctttggccagagtgcaattgaggaggaaatcagtaacaaaaagacaattaaatccatttgattcttttgttttcgttttgtagtaacttgcacttccctggtgccagaggcatgacacctttttgtctgctcttggccatttgggtggcgtctttgggaagggcctacttaattcttttgcctatttaaaaaactgggtcttggaaatcttgtctttttttttgagtcaggatctttctcgcacaggcttggagtgcagtggtgcgatcatagctcactgcaacctcaaactcctgggctcaagcgagcctcccacctcggtcttctgagtagctgggactacaggcatgcatcactatgctctgctaatttaaagaaaaggttttttttatagagactgggtctcgctgtgttgcccaggctggtctcggagtcctggtctcaagtgattcacctgcctccacctcgcggagtgccaggattacaggtggcgggagccgccacacccagcctggtcttagcgttattcccaggtctaggtgtgagtccttcctcagatatgtgttgtgaataatttccgatcctctggcttgctattttactttcttaatggttatcttttggaaagcaaaggtttccagtttgatgaaatctaatttttattttttatttttccgttctagtggtctttctattttctcatcaaattgagactttggggaaactacacagcagcaaaccaggatatatcctcttaaaaacagctcgagccggccgggtgcggtggctcatgcctggaatcccagcactttgggaggtggaggtgggcggatcacgtgaggtcaggagtttgagaccagcctggccaacatggtgaaaccccatctctactaaaaataaaaaattagccaggcatggtggcaggcacctgtaatcccagctacttgggaggctgaggcaggagaatggcttgaacctgggaggcagaggttgcagtgagccgagatcgcgccattgcactccggcctggggacaagagcaagacttcgcctcaaaaaaaaaaaaaaacccagcttgagccaagtgtgggtggctcccgcctggaatcccagcactttgggaggctgaggcgggcagatcacttgaggccaggagtttgagaccagcctggccaacatcacaaaatcccatctctactaaaaatacaaaaattaaccaggagtggtggcagcatctgcctataatcccagctactcgggagcctaaggcacgagaatcacttgaagctgggagacagagtttgcagtgagccaaaatcgtgccattgctctccagcatggataacagagcaagactctgtctcaaaaaaaaaaagcttgaaaatttaaaaatatctcaataattatgagatgcagtgattttttttttacttccctaagctgggtttccaggtatctctaggttcagctcctccggggctggaagtacatgaagggcagcattgcccaccttgaccagagcaggctcggagcagggcagtggaagagctggtcccagctcagcccagcctgctgggtcagcatccatctgaaaggtcatctctacccaggaacttgatggcttccagctccaccctaacagaaacctccccagcatcttgccgagttgtaatccagggtggtggtatagacggtcttggggtagctggtatagacggtcttggcgtagctggtatagacggtcttggggtagctggtatagacggtcttggggtagctggtatagacggtcttggggtagctggtatagacgggcttggggtagctggtagtggtgctcaggaggcgtgtgggctgctggtgcagctggaagcgcacctcagccatggtgttgtgccaggtgtggttggggatgcaggggaccttccggccgcaggaggcccctgccaggcacaggcagctgcgcggtgtggaagaagtgccgctcggagtcatgcttgacaaggaagtacaccttactcctctcagtggtgaggggtcaaaccactccttcccagcgatggggccagcagcctggcgagggctaggcaccggggagggatgctggatttggagctggggggaaggggtcaccctgcattgggctccagtgctccgggtgccatgcctgctcccccaccactgccaccgcagccgctgcgggacaccaggggctggggctgaagagcagcctcgagccgggctgtccaggacacggtcgcccttcttcctcgtgtccgtgagctcaggcacaacctgcagcttagccagcccactatggctgcgtgcgtggcaggacccgggccaccatggctgcgtgcgtggtagggcacatgattattttagcctctggtatcactaaccatccctaaagtctccaatggtctgttcctgtctttccctctggttcacttgtggggtcatgttgtcttctgttctttgttatttcttatttttttcttgagacggagtcttgctctgtcgcccaggctggagtgcgttggtgcgatctcggctcactgcaacctctgcctcccaggttcatgcgattcccctgcctcagcctcccaagtagctgggattatgggcacctgccaccatacccagctaatttttctgtgtgtgtgtgtgttttgttttttggttttttttttttttttttgagatggaatctcactcaattgctcaggctgcagtggaatggcgcaatcttggctcactgcaacctccacctcctgggttcaagaaattctcctgcctcagcctcgcaagtagctgggattacaggcccctaccaccacagtgggctaatgtttgtatttttagtagagacagggtttcaccatgttggccaggctggtctcgaactcctgacctcaggcaatccgcccacctcggcctcccaaagtgctgggattgtaggcatgagccaccatgcctggcctaatttttctgtttttagtagagacaggacttcaccatgttggccaggctggtctcaaattcctgacctcaagtgatgtgcccacctcggctgcccaaagtgctgggattacaggcatgagcttctgtgcccggcctgaactgttaagtgtttgtgaagaattatttgggggcctatttgagagctgttatatggatcatcctcctggagagggttcttaagcctctgagaccgggtttggggctgaggctttctgacccacacaagtcatgctgacccctgaagggccgcaggccagatcttgccaggtgagcactttccccgctcacattcaggatagggcgagggggttggtaccgattcaccctcagggcctagatttgggggcttcagcttgctgcagataggtgctcccttcactctcacctgaggctgggctggagcctggtgtctgccccaccctgctggtcagccccctaggacctgagccccgtaagcctggactggccacgccctggggcagcagcactgggtgcttggcgctcacgaccttcctgggcccctgggtccctcacttctcccttgtttctaccttcctggcttgtcagattcccacagctcttaaggagaaattcagtatttactgcagcatgtgttttcagtgtgatggttcatctaggtaccctagcctgtcattgctggagttggaaatctctgttgtctgctgttgttttgtgaaacaagcgcgtgaggttataagtttccctcaacgtaccacactaaccacatttccctaagttttgatgtgtagtgttttcactgccattcagttcaaaatattttctcatttcaagtatgatgtcttctttgatccatgtgtatttttaagttgctaagtgtacttactttggccgggcatggtggcttacgcatgtaatcccaacactttaggaaactgcgggggggaaggatcacttgaacgcaggaggctgaggctgcacgtcacagggagagacgggccgcggtgatgtacgagcttcctgttgataggcagttaagttggttcgggataacgtggcctgcctggcacgggtattcccagagtcacagatgctcacccgtgccagcgttggctgcttgggacatggggacggcgaggtccccacaccccacatgtgagctgctggtagctgggctgagcccaggtcccatccgtgtgtggggcgtgagtgtgcggtgccatcgggtctgcacgggcctcgcctcgtcccgg

SEQ ID NO: 8866 - DNA, 20036 bp, Homo sapiens
tgggtgttcagggtcagccaagaccagcacagatggaatgcagtgagcaggggagtggccccgaaagggtgcaagggcaaaacaacaccgtagccccacaccagctgccaggtacgatctcagcactctgcgagaactgcctcatatgatccccagaacatcccataagaggaaggtgcagtgaccatctgtttacaggcgaggaggcagtgcctacggtcacacagacctcatgacaccaggagaccccacaggccatccagctccagagcccatcagcccctagaccctgtgcccagcaactcaccgaggcaggagtccaaacacggcccagcagggacaggacagtcagtgggcagcctgacgtcacccatcccagcgtcgccctgggccttacctgcccctgcacgatggccttcagcagagccagcaccgcgtgccgggcctccagcggccgctccggctgcaacagatccgcgaccgccttccagagtgcttccactgcgtgctgtcaccagcagaggggacagcggtgaggatgtgctctccaagaaccctggccccggcaactggagcagtgccgtgagcggaggacagggaggaacaacgggggcttgtgactgagagccccacctccaaagctcgtatctcctgtgtctcctgcagcctgagatgaccacaggcttcgtacagggaacggctcagagcttcctcaaaccccagcaggtccctttaactcccaccaggtgacagactgggggctgagaggacagcagcaagccagggcagcaatggtggcctcacctggaccaggagggagtcccactagagctgccggaatgctggcaggaagtcatgggacagtctcagaaccacaagtgcacactaagccctaggcctgcacctgacccagaatccctgcttgtggctctcctctagtgaacacaccagcatcgggccctcgaccccatgcccctgcccgacctctgctgcctgcctgacctgctgagaaagagcgctgcgtggccttctgaaatctgcctcctctaactaccacccagcctgtgaggggctcatccctgctccctaaagctgccagaatcagtctcactcggcaggggtttgggctggctctcaccaccttcccttctccacattaaccaacagccacggctttcagaccacaggctcattcctggccttactcctctaaggaggggaactaaaatggccgtgttccggccaagtgcggtggctcacacctgtaatctcagcacttcgggtggcagaggggagagggtcacgtcagcccaggagtttcagactagcctgggcaacacagtgagaccctgtcacgacaaaaaatacaaaacttagccaggcgtggtgctgcatgcctgtagtcccagctacttgagaggctaaagtaggaggatcacgtgagcctggcaggttgaggctgtagtgagccatgattgtgacactgcaccccggcctgggtgacagagtgagaccttgtctctaaccaaataataacaaaatggccgtgttcttttagatgtcatctgaccaacatcccaaccaattcagacaactggcactctcacctcctttgtctcattgacaatactcttaccgttgcaacctgagctgcaaagatccgtggacacagggcccgggaccatcccagcctcggaggcctatttatccactcacaggctgccccgtacccacacaaacaactttcagaacaggatgcaggacgcttgttcttttttttgttttctgagacagtcttgctctgttgcccaggctgcagtgcaatggcacaatctcagctcaccacaacctctgcctcctgagtttaagcgattctcctccctcagcctcccaagtagctgggattacaggtgcccgacaccatgcccagctaatttttgtatctttagtagaaacagggttttgccacattggccaggcgggtctcgaactcctcacctcaggtgatccatccaccttggcctcccaaagtgctgggattacaggcgtgaaccactgcgcccggctaaggacacctgttctttacacctatctttggtagcgtacggccagcacgtttcagatgagctgctgcagaggtagcaatcactctcctcttagcagatctgagcatgagaggtccaggtctcactgctctcccacacacaaatgctgggcaaggcaagggcagagccctcaggtgctctaccagcaacctgcactcccaaaatgaccacttcctgtcctgtccacaagtcatcaggaaagtctggcaatgtttgcccaaaataaatatttctatgtccgtgaggtcgcccaataccaccgaccagtcaccctcccaaaatggcaccaagaccagcgtgcctaggattgttctctgtggaacaaaccctttcttgatttttcttggcctgaacttgtaacaggagagagcgagtgagcatgcgtttctatcagccactacaaactcttccttttttttttttttgagacagagtcttgctccgtcacccagactggagtgcagtggggcgatctcggctcactgcaacctgtgcctcccgggttcaagcgattctcctgcctcagcctcccaagtagctgggattacaggcatgtgccaccatgcccggctcatcatcttttagtacagacggggtttcgccatgttggccagagtggtcttgaactcctgacctcgtgatccacccacctcggcctcccaaagtcctaggattacaggcataagcccccgcacccccgctcggcatagaaatcctttctggtgttgctagaaaagcctaatccctttgctccccatttccacgcttgattggtccctcaaggttgtattcggggcatttccagtagcttccccatcactacgatgaaagctaaattcccctaaaacagtgcaaactggctgggcgcagtggctcacgcctgtaatcccagcactttgggaggctgaggcatatggttcacgaggtcaggagttcaagaccagcctggccaacatggcgaaaccccgtctctactaaaaatacaaaaagccgggtgtggtggcgcgtgcctgtaatcccagctactcaggaggctgaggcaggagaactgcttgaacccaggaggcagaggctgcagtgagccaagattgtgccagcctgggcgacagagcaagactccatctcaaaaaaaaaaaaaaaaaaaaagtgcaaaccagatcatcggcagtcagctgtcaaccatgttcctaaaaaaagcaaactcaggctctgaatagtctacgtgcctctctctagtagctcaactggataaacctacctcttcaaatttcttggtttttgcgacttcacaaatctgccctatcatccggatgcgattgttgaggccacattccatgctcagttcctggagagagatgaaagaagaaaaaggggccagtgctcaggccacggtctccttaactgcaagtcacaaaccacctaaagactcccactgcattttccagactagagacttaaaacagatctttctggaatcaagattcacttgacgagccgcggtggctcaggcctgtaatccctgcactttggggggccaaggcaggtggatcaccagaggtcaggagtttgagaccagcctgcccaacatgatgaaaccctgtctctactaaaaatacaaaaaatttgctgggcgtggtggtgggcgtctataatcccagctactcgggagagtgaggcaggagaatcccttgaacccaggaggcggagattgcagtgagccgagatcgcgcccctgcgctccagcctgggtgacaagagcgaaactcggtctcaaaaaaaaaaaaaaaaaaagatttactgaggggctttactgctccatcccgaggagttgagaatgtgcaattttttttcacaactgcaaatgttgtattgagataaaacataacatgaaatacaatttcaaactgcacaatttttttttagacggagttttgctcttcttccccaggatggagtgcagtggcgcgatcacggctcactgaaacctccgcctcccgggttcaagcaattctcgtctcagccccccgagtagctggaattacaggcgcccaccactatgaccggctaatttttggtatttttagtagagacggggtttcgccatgttggccaggctggtctcaaactcctgacctcaggtgatccacccgcctcggcctcccaaagtgctgggatgacaggcgtgagccaccgcacccagccaggatggactatattttattcatcagttgatgaacgttttagttgtttctaagtagaaaactttacaagtgcaaaaattcagcatttactcatgggcaaaacacaatgccaggcatgtgtgacaaagacacaaacacacataaaagataacgacctagcccatgtgcgatggctcatgcctgtaatcccagcactttgggaggccaaagcgggcagatcacctgaggtcagcagttcaagaccagcctggccaagatagtgaaactccatctctactaaaaatacaaaaattaaatgggtgtggtggcacgtgtctgtagtcccagctactcaggaggctgaggcaggagaaccacttgaaactgggaggcagaggtagcagcgagcagagattgtgccactgcactccagcctaggcaacagagcaagactcagtctcaaaaaaaaaataaaataaagaacctacttctcccaggaactcacatcttatcatgtaacacctggacatatccttacctgtgaagatgatgatactcaggcctcatctataagatgggctttctttcatcaacatctgaatagtaactcaagtgtgcctgaaccaggtcaccaagatcctgactttcgaagtctcctgaggaaggacatgtcggcctccaagtactggagacagcattcctgtgtagacagttgccagcaacccgtctcccacagaacctggtgcaagaccaaacccagccttctctgcatttccctctagcctagcaaagacacaggtagctcactcactctcagtatttccgcggtgatgataaactccgtctgtttaccctctgcagacctgggatttggcctcggtgttcccagtcccaacagaatcttaaacttctccttcaagcctgaatctttgcttgttggtttggccatggtggaccaggacgcaccagaaaacccctctgtgcaaacgaaacaggaatggggacatctgagcaacacctctgcccaccttccccactgcggacctccagccgtcaggaccctgggtctctggtgggcataacctttcctcccacactccctgggagaactcaactacagcccagctgaccagctcgcaaacaggcacctaggaaagcccgggagacaccaggcctggtctagagagctctctactcagacgctgccgcccgccccgcccgactcagtgcacgggttaggactgccgccgcgaagtcctgggagccccgacgtttgccgtctctcctctacccatgtgaagcaggagctgtcacggagccgcctgcagcagagacccgttcgcacccgccatgacttaaaactaagggatgctcggagctccggagtcgggttgcagtgggcgcgggtgagggcccgggacccggacactgcggggtccgcctctctaggccgctgccccgtggggaccgccacttgccccgtggggaccgccacttaccccgcgccgcgccaccgcgctccgggccgccccgacgcggagaaaggcgcacccccctggccccgggacgccgccggaagcgcgacccgcacttccggtagcggcattgcgcggagggccgccttgggagcttgctgggagttgtagttctgtgccgccctctggcggaaaggccggcgatccttgcatcacgtgacggggccgcatgggccgccgggatgtgtagtccgcaggagtccggcatgaccgccttgagcgcgaggatgctgacccggagcyggagcctgggacccggggctgggccgcgggggtgtarggaggagcccgggcctctccggagaagagaggctgcagcaggtagcgccgcgccgtggctggagcgtgggaggaggcgggataggggctgcaggctggagtcccgggccgcctcctgcggctcccagctgcgcgggcaggggctgcaaacccggcagccgcgaacggttcccacgtgcggccctgcgttcccaccttgcgcctttttcccaaagattgcggtccgcaggggctgggtttcgggcgctccgctccgctgccccctttcgccccaagcaagaaaacgcttcctttcccaccactctgtccgggactctccactccaggctctgtgggtcccatccccgccctcctgcagtgaacttgctgtcctcggagaggctgggtgccaaggacacacgcagccagaagcctgctcccccagctcgggggagggtgcctctgagggaaaacaggaaagggcatggcacttattatatttatcctgcagccgttgaggacctgctgggggccaagcactgcagtgagcagtgagggacacggacagggcctctgcgctagtcccgctgggacttctgcagaattggccaragytggattcccataggcacccagggaccccaggggtagtccaractatgkcaggaggaactggtgcagctgggagcaggcaggtggtgatgccagccagggtggcaggagctttgatgccaggatagagtttggagtttattatgacagtaaacggaagtcaattaggaggttttgttgtttgttttgagatcgggtcttgctctgtcacccaggctgtagtggagtgttgtgatctcagctcactgcaacctccgccccccaggttcaagcagttctcctgcctcagcctcccaagtagctgagactataggcccctgccaccacacccggctaacttttgtatttttagtagagatggggttttgccatattggccaggctggtcttgaactcctgacctcaagtgatccacccacctcggcctcccaaagtgctgggattacaggcttgatccaccgcgcccggccggccaggattttttaaaagggagtgacacaacctgatgtgggtgttagcagactgtctctggtgcagtatagaagatgtattgggggcaccttggtacaggctgttgctagagtcctcatgagctaacatggaccttgtcagggtcgctggcataaggagggcccacataccccagactgcagagggcagagcaccccaagtgtattagatgatggacagttgtggcatgaacgagtgaggggtgagctagcaggcgggatggcacccctaccctaccttcacctgyggccccaccagagggactgygtggtgctttttgcagaagcgaggaaaagccacagccccgtgaagcgtccgcggaaagcacagagactgcgtgtggcctatgagggctcggacagtgagaaaggtgagggggctgagcccctcaaggtgccagtctgggagccccaggactggcagcaacagctggtcaacatccgtgccatgaggaacaaaaaggatgcacctgtggaccatctggggactgagcactgctatgactccagtgcccccccaaaggtaggcaggggccccatctgcccaratgaccccccatcttagcaaggtccttgttttctttctaccyggtggcttttggctggcaccctcccctgcagacagcaccttgggaggatggacacccggtgccccagagcatcgcctgcatcactgtagccactcagcaggtcaggacaccagtggtttagggcctcgtgctcgaacttctgcccagtgcaggcgtgacctgggctttgtgtgatatcaggaaggaagagttccttttgcttcacggtcccagggcctgaaacccttagaccaagctgagttctaatccctattctgctaccaggtggcttggatacaggcctctctgagcctcagtttgcttgtctgtaaaatgggtagtatgggccaggcatggtggttcaggcctgtaatcccagcacttcgggaggccaaggcgggtggatcacctgaggtcaggagttcgagaccagcctggccaatgtggcgaaaccacgtctctactaaaaatacaaaaattagccaggtgtggtggcaggcacctgtaaccccagctacttaggagggcgaggcaggaaaatcgcttgaaccccggaggcggaggttgcagtgagccaagatggcaccaccacacttcagcctgggtgaaagagtgatactgcatctcaaaaaaaaaaatttgttttaaaggrtagtgtgatgattcacgaagcaatcataatagtagtggccaatggctgttcagtagtgatgggccagatacgatcgtgttgggtttttttttgagaccaagtcttgctcttgttgcccaggctggagtgcagtggtgaaatcttagctcactgcaaccttcgcctccgaggttcaaattattctcctgcctcggcctcccgagtagctgggattacaggcatgcaccaccgcacccagctaatgtttgtatttttagtagagacggggtttcaccacgttgatcaggctggtctcaaactcctgacttcaggtgatccgcctgccttggcctcccgaagtgctgggatgacgggtgcgagccaccrcgcccggccacatacgattctaagcactgagataattcatttaagcttcacattactccagtgagtcaggtactattattgtcctggtgttgtagatgaccaaacatacccaaaccagacctccccaccccacagggggaggctgatgcctcaagtgtggcccagggcaacaaaccagggtgtgtcgagggcggggggcggagcctggccagggaatcacccaggayccgccgccaccccggtccctgtcastgcacaagcaggtacgcaggtaccaggtgctgctgtcactgatgctctccagccaaaccaaagaccaggtgacggcgggcgccatgcagcgactgcgggcgcggggcctgacggtggacagcatcctgcagacagatgatgccacgctgggcaagctcayctaccccgtcggtttctggagggtgagccctgcctgtggcaacgggggccgggtggcagtggcctgagagagacctcagaaggctgaggggggtggcgacggtgcaggaagtgagggtcaagcatctcaggctcggggggtccccctgaagcyccccccaggccgtggggccctgaggcctgacgcccagtcccagcagctccttggccttcctgttcgcatcctcccttccttcctctgcttccccgcctcgccgcctgcccacccttcctcaccgccaaggctgcctgcccacccgcctttccctttgtttactgctagcctctcccggtgtgtcaccccctcctgtccagagcccctcaccctccaggagccctggggaggctgctccccaaccccgccgagcactggatggtggtgggcggatctgttgaaagcagcttggtgggtggggccgcttccccttggcacccgygtgggccgcagtttctcagatgggttttaaatagccctctccactcaggcacaggatgggaaccacccggcaggcctggcagctggtggggaagccccagctccagccctccttcctgaaggcgcaggtgcagccaagccccactcctgggagcggctggcctgcttggcctggcctgggtgctggcagggaatgacgggcaggggaaccccagccagagcctacacgtgcatcattggcccacacgggtgggaggagggggtcaggcctaccttgggcctccctgctgccctccgcttgttcccgcctcctggggggcgggggctgagcttgcacacgtcctcagcaggtgcaggtagctctggccacctgtgggtctcctgggggctgcatcctcccaggttggsctgtgcccttgcctccaaggctgaacccacccctgtctttcagagcaaggtgaaatacatcaagcagaccagcgccatcctgcagcagcactacggtggggacatcccagcctctgtggccgagctggtggcgctgccgggtgttgggcccaagatggcacacctggctatggctgtggcctggggcactgtgtcaggcattggtgagtagaggagggcggggctggctccagcccactggctgctcttgggattccccacatccttgtgacctgtgactccacttccagcatgctggtcctccacccagcccatagagtcagaaaggtgctcccagggtggagccaggccagccccactcagagacaggtgctggggcaggaggtcacatgggctgagcacctgctccgtgcagggctctgagagaggccccggagctggactccatctgcgttgtattcgggagaaatgtggagcgaggaattccccactcgtggagtggaaaccctgatggttgtgcagggtgctcttggggcctggcttgggcccagggcctctgggaaggcccccaaggtcatccttcacctgagagctgcagagcaaggtggggtgagccaggccaagaggaggaagtgtgttcccagcagaaggaacagcatctgtaaaaccatgatgcgagagagagggccaggagcaggaagttctggaatgagatgagggcagagtggggaggtaaggactgaggagggaggaggaagagtatcccctcagcaggtggggtggggagggaggtgctggggggakaaagggggagggtggggagggaggctctgcggggacaggaggggaatggtagggagggaggcgctgggggaatgggggargagggtggggagggaggcgctgggaggatggggggagggtggagagggaggtgctgcggggagaagaggggagggttgagagggagaagaggggagggtggggakggaggcactggggggagggccctccttgaatccttttcccaggtcctggtgtctcttcctagcaccggaggcttcttggcagttgggtgcagacagacccctgggtttggggtggggctgcctcctcctcggctttgtccagaggatttggggctcctaaggccacacgcagccgggcccagccagtccagaaaccagggcttggccctgccctctgtgtgcccccatcccaggcccctttgggactcctgcagggggcctgtgccggaggcggggggcttgcagcactttctggtgggcaagagggccaccaagggccgggggcctctattctgagccggggccacctggtgaggctgaacagccacagcagccccaaagagccagagccaggccaggtgcgccggggcagggcctcctcccgactgagactcccagcgtcaccacctgccagcctctcagtggacacttgagcttatctgggcggctgtcctcagctgcccgtgtccctggggtgctgcatcgtggttgggcagggctgtgggggaaggtccctgcccgcagccaggcagggaacgggctttgggagcagcgggcacaagagacagccatgtggaaatacctccctctccaggtgtctgtgggcctgaccacctgcaaggagaccccagggctgcctcctaggggttccccgaaagagaaacgctctcagttaaaatgtcagagctggctgggtacaagggctcaagcctgtaatcccagcactttggaaggccgaggtatgtggatcacctgaggtcaggagttcaagatcagcctggccaacgtggtgaaacccgctctctactaaaaatacaaaaattagccgggtgtggccaggcgtggtggctcacgcctgtaatcccagcactttgggaggccgaggcaggcagatcacgaggtcaggagatcaagaccatccaggctaagatggtgaaaccccgtctctactaaaaaacacaaaaaattagccaggcattgtgtcaggcgcctgttgtcccagctactcgggaggctgaggcaggagaatagtgtgaacctgggaggtggggcttgcagtgagctgagatcgcgccagtgtactccagcctgggcgacaaagcgtgactccgtctcaccaaaaaaaaaaaaattagccgggcrtggtggcaggagcctgtaattccagctcctcgggaggctgaggcaggagaatcgcttgaaacccagaggcgaaagttgcastgagtggagatcgcaccattgtctgtatccagcctgggtgacagagcaagactccgtttaaaaaaaaaaaaaaatgccacagccatarattgctggctccggtcccagctctgcacctcctggctgggtgactctgggccaggcccttggcttctctaagctctggccacaaagtgggtgaggcagtcctcgtcattcactgtccaggtgggcaggaggctcacacaacgtgacgtggcctgactcagccttgaagcatggccacttccgtgttacagaggaggaaactgaggctcagagccccaggggtgtgacccctcaggccttgtggtctccccacaccctcggacacctttttctaggcagcagcgaaggagctggtgcaggcctcggctttctctttgggaaacacgggaggaggaggcagggctggggctgcagctggccggggccaccgggtgggagaagggagccccagtgagcagacgcctggggtggccagctgaggggagcaggagccagaacccaggtggacagcagctgcggccggccagggcatgctcccgctgtgtccctgaccgctgcagtggcaggtgctaggtctgcaggcagtgacctcatgccggcctgccaggcagagctgttgccacccagcctggtgcccakagccagtgcttatgccgagaggagcctcakgccacaggagacagacagagggaagcctggatggacccttccggggacagggccacgttyctggggaggctgagggctgaraggtgcttcggagtcrggatcctgccgggcctcggtttcagcatccgtargacctyatgaggactcactgagctggccaatctctctggcagggtctggcccccagcaagcgtttgtccaagcgagctgtcgctgttattgtggggaatagagctccaagcagagccgagtcatcacccccaggccctgcccaaagcagagaccccaccacccacacatccaactagcaccagtgttgggagtgggcagcccagaacagagccccccaggctggctcaggtgatgggagagaggcctgcaccccaacagagggctcagcccctgccccagcacctcakgggcagccaagatggtcacatgtaggcttgcagccagggctttgcggttccaatgtctaactggagggccacgggggtggtggcagactcgcctctgggcggggaggggcacgggctaggctggtggagtgtgcccctgttcaccccgcttggcctcccagcagcagtgkacacgcatgtgcacagaatcgccaacaggctgaggtggaccaagaaggcaaccaagtccccagaggagacccgcrccgccctggaggartggctgcctaggtatgagtatgtggggggcttcctagggagaagagctcaccccgcccgccctctgtcagcactgacccagcccccacccccayagggagctgtggcacgagatcaatggactcttggtgggcttcggccagcagacctgtctgcctgtgcaccctcgctgccacgcctgcctcaaccaagccctctgcccggccgcccagggtctytgatggccgcatggctctggccgaggtgccgctgtggccaccgtctgtgaagtggctttacgcttcaggaagccacgcctgttgaataaagctttggtgtgtttgcagatgggatctggctgatgtctgtccctgagggggcagagagcctgggaatcgcatacaaggatgtgttcgtacacacccgtgctcgcgtgtctggagcagggctgcctgggaggccggctggggacgtgacaatctttgctatgtactcagggagggggagggggtgtgcatgaacctgggagggaggaagtggggagagccagctgcagccagctgttggaagtccgctggggaagcaagcagcccccgggcagctggctggggaccctggcccctcatgctatccaccgccggccccccagcttcccagcccggacaccgccagctcctgaactttcatgccctcaaagcccagcctctgccagggtcccacccctgtttacagagctacccggccttgaaagggacactggggacccaggcagggcgccacagggtacaaagcttgacctgtgactgctagaggtcgcagggtgaattgggcaaagggtggcccgtgtgggtgttgtgtggggccggatggcttcacagggaaggtgaaggtgggaggctgagtctgccaaataagagagatgggcatgggcccaggatgtgccacacagcagggggtcccatgggggtcagcgggggagatggagcagggctgggagcagatggatgcagggcacgggctcaggaacgagaccgtttccagctgctgagactcggggagggggctccctgaaacagcctcatccctccacccctctcaccccacggggaggaggctcagaaaagacagaggcgtgtgggtcccaggcagggcctgtttatcctgagagcgcgcatgcgctatggcttacgaggcaacagcggtgccggtcgatcggtggtcggttcgggggtgcggggcccgggagggaagtgcaaagtcaacagggtgtccacgggggagcccgccaagcagggctgagccagaggccaggcgtccttcccgggtgccgctctcacacacctacgttccccaggcctgggagctgccgcgcggaatgaggggcctgtccagaggccgccctcctcggggacgtggggcctccatcctcaggcccctcggagagcccaggcccccagcagggcacaggcgcacagggtagctgggtggggagcagggtgtggcctagggacccccacaccagggcaggtgggcaggggcagctcctacggccacatcaggcctccctggccttacccaaggtccccacgaagaggctgggcgccccaacttggccactgggaagtcccagggactcccactcaggacggccgctgctgaggggagggggcggggaggaaatggtttgcagagaaaggtttgttttattgcaattatttagagcgcgtcccaagggggaggggaagggggaggggaaggggggggggtctctggtattaagtggaaacatgtgtggagctggagatctttttggaaaaaaagcaaaaacacaaattcctttcagtcagcaggccccggcagagcagcaaaggccctcgccccgcggctgccgcgcgctcgctcgctctctctctgtctctctctgtgtctctctctctctctctctgtctctgtctctgactctctctcacatctctgggtctctctccccctatcttgctgccacaggcccccagtacctggtgggcaggggcaggatgggggctcaccggggctggggctgatttctgggcaatggcaggaccaccctccagtccactgaggctgggggagctcggggcaggctgaggcccaaggtccgtgcgggaggggtcccagggtcccgagacaggcaggaaggggctcagaagttgctgaagatttcacgcttcctgttccagtccatctgtggcgcgcgcttgttgactcgcatggctcgagccttctccttggcctcggccgccgtggggctcaggtggaggccgctctcctggaagggatcttgcttccaggcactgccatcctggggtgagcacggtgggtggggtgtctggagtgagccctagtcccacaccccagacggtggcccctcctagggagcaaccaacagaggctgcctgctggggctggggctcacgaggacttcctgaacagagaccccactgcccgggctgacatctccacagacgcctaccccaaggcctctagcaaccccacgtgtgagctcaggagtggagaacatccatacctcagtgtccttgtcggaaccaggcaggtcacttcgggacgagcacgcagagccaccattgagctgggaaaccaagggcagattgtggtttcacagacacacacaacacctgcacacgcacacatgtgcacagaggcacacccccccccagtgtgtgctcctccactcggcagggggcctcgggcctctggtggactccagatgcggcggggcaggcaccgggcgcctggcagtgacaggcaggtggcctggccggctcatggtgcagagggggttcaggtgcaggaatggccggcgtgagcaacgcctggggtgaggccaccgccagctccctgaggaggcagagactggagggcaactccttaccaggtggtgcccaggagaggacagaaggcagtggccccgaccccaggggccccacgtggcttgtgtgtggcacgacccaggatgagacccacaggggcattaaagggaggtgacagggctaaaatcgggtgtcactagcacacctcgaggacggatctccagggagaagggggcctctgtcgggcctgggtacccccagaggcaccctgtgtctcatgggcaccccaccctcttacctgggcagggctggttccattggtgacgggtgacggcagaggacctgtggggacagcgtgtcagtggctgctcagccaccacaccgcacccaccctgtgccctgggccgtggcccaccttccacgtgctcctcggtgggtgtgacccgaagccgcttgaagtgttcatctgtctcggggtccacgaccagcagccgggcctcgtcctcccgtgccttgatgctggccaccacctcagcatggcgcagtccctccacattctgcccgttcacctgccgccaccagcatgtatcagccccgccatgggcccagacagcccccaacgccgcgtggccaggtgtggcatcaaatattcatcacagccaccgcccaccgaggcagcaggaggcgcaccagctcaggttcccagcgtctccctcctccctgcaaggacccagggccccagtgtggacaggtgcggggcactcggcaccccgcagccctggtgggccggtacctcaatgagccggtcctgggcgcggaggccagagcgggcggcaggtgagcccgggtccacagagcggatgtactggccgggccgggacttgtcactatgcaggttgaacccatagccctgaggtccctttcgcaggtggcagagccgagggcgcagctccctcaggggcccactgacatcctgcaggcccaacggacagggtcagtctcttgctccagcctcccgcctccagaggccactccccggtggtgccgccactgcccaaactcggtaccgtgccccccacgggcaggcccaggtctcagtggcaaacactccgggcacccaggctgcctgtgacagagctttagctgtgggaacttgggcaaagcctgttttcaaacccagaagcctccccgacgggcccagccgccttcccgggttgctgggagaattcctttggctcgaggccagcgtggcgcacaggcagggtgggaggaagcaccaggtgggatgaactgtcgccgttggcctcctggggcggttgtccctgagggctctgcctgtgcgtccccctgccccgggctctcctccagagcgtggggcaggcgctcctaggccagcagttttgttttctctccagaggcctccgtggggctggctgcggtggcggctctgtttgctttcacattccaggaaaatgagccgccccacccccgtgggcccagcaagcaggggctggggcaggagcttagtgtggacagggcacagagggcctcctggtgcccggaaggaccccccgctaccatcccaggccctgccccatgttacctctggcatcctgcagtagggctctgggccaggggaccatgcaggcaaggccaggcccaatgaccacctcccagccagggggtgggccagggtgcggcggcggtggccagcggctgcccgtgctcagttaaacatggcggtggccggagcaggcaggaggcagctcaggtttccagggagcgccaagcttgagggcgtgcgcaggggagactgtgcaggcgggctgggggctgccagggcccttccctcacctcctacctccctgtgtgtccctgagggaccacaggccaggccaggccagggctggggcggcatggcaagggggcgctcagacctcaggagggcaggtctccaggcctcagacacccccaacccctccagccacccaccttcaagctcgctccaaaccccaatggaccagaaacggccatgtcagcgggggggaccgccccgccaagggagcaagggggtccttctccacacagctagtgctctgtcccctgggctcaggacctgcccttggtctggaacacccttctcctgtccagcctgccagatgcctcatctgaagcctcctgcccaccctctgaaccctctctgcatggccaccacccagcccgtcacaccagaaactccagggacaagcctgtggctccctggccccacaggggctcagctgggccacatgggctgaattggagggtgcaagacccccaaaatctccagggccccaccacatagactcactcctcccccagacacacctggtggcacaggcgtggggcttcaaggctgaccctgacacctgcccaccaaagtgcccctcagggatgcagtcacagcacggcccccaggctggcctgggacgcagggaaggcgtggggacaggagtccagttcgggaggggaagtggagcacagcccccaggctggcctgggacggagggaaggcgtggggacaggagcccagttcgggaggggaggtggagcacggcccccaggctggcctgggacggagggaaggcgtggggacaggagtccagttcgggaggggaggtggagcacggcccccaggctggcctgggacggagggaaggcgtggggacaggagcccagttcgggaggggaggtggagcacggcccccaggctggcctgggacggagggaaggcgtggggacaggagtccagttcgggaggggaggtggagcacggcccccaggctggcctgggacggagggaaggcgtggggacaggagtccagttcgggaggggaggtggagcacggcccccaggctggcctgggacgcagggaaggcgtggggacaggagcccaattcagtggaggaggtgggagcgtgatatgggcccagtccgcaaagacacatcacacagccacagacacaagacgtccacacacacctgcaaacacgcacagcagcccacacatgcggccagccccacagtgctggcccggcagcccttcccacgcctgcacagcggcctgcggggcagggtttctcagggcaccagacaggaagcaggatctggtgggtgtctggggccctgaggccaggccaaggacccctcagtgttctcagggtcattctggccacccctctgcctctgtccagaagcagccgtctttcactctacaaggcaagaagttctgcctatcaaacctaaaccccttcattgtcagcagggtcccagtggcgccaggcacagcactaaaacctcaggtggaggggctgcaatggaggggccagggtgggctgctggcagcacatgggctcgtggggaaggggggcccagagagccgaggagctcgggcggcgttcatagctcacattcctcctccctgccctggctcagcacacac

SEQ ID NO: 8867 - DNA, 103339 bp, Homo sapiens
  misc_feature (1)...(103339): n = A,T,C or G, or insertion/deletion polymorphism (see Tables 1-2)
tgaggtggtggccagcatcaaggcacgggaggacgaggcccggctgctggtcgtggaccccgagacagatgaacacttcaagcggcttcgggtcacacccaccgaggagcacgtggaaggtgggccacggcccagggcacagggtgggtgcggtgtggtggctgagcagccactgacacgctgtccccacaggtcctctgccgtcacccgtcaccaatggaaccagccctgcccaggtaagagggtggggtgcccatgagacacagggtgcctctgggggtacccaggcccgacagaggcccccttctccctggagatccgtcctcgaggtgtgctagtgacacccgattttagccctgtcacctccctttaatgcccctgtgggtctcatcctgggtcgtgccacacacaagccacgtggggcccctggggtcggggccactgccttctgtcctctcctgggcaccacctggtaaggagttgccctccagtctctgcctcctcagggagctggcggtggcctcaccccaggcgttgctcacgccggccattcctgcacctgaaccccctctgcaccatgagccggccaggccacctgcctgtcactgccaggcgcccggtgcctgccccgccgcatctggagtccaccagaggcccgaggccccctgccgagtggaggagcacacactgggggggggtgtgcctctgtgcacatgtgtgcgtgtgcaggtgttgtgtgtgtctgtgaaaccacaatctgcccttggtttcccagctcaatggtggctctgcgtgctcgtcccgaagtgacctgcctggttccgacaaggacactgaggtatggatgttctccactcctgagctcacacgtggggttgctagaggccttggggtaggcgtctgtggagatgtcagcccgggcagtggggtctctgttcaggaagtcctcgtgagccccagccccagcaggcagcctctgttggttgctccctaggaggggccaccgtctggggtgtgggactagggctcactccagacaccccacccaccgtgctcaccccaggatggcagtgcctggaagcaagatcccttccaggagagcggcctccacctgagccccacggcggccgaggccaaggagaaggctcgagccatgcgagtcaacaagcgcgcgccacagatggactggaacaggaagcgtgaaatcttcagcaacttctgagccccttcctgcctgtctcgggaccctgggacccctcccgcacggaccttgggcctcagcctgccccgagctcccccagcctcagtggactggagggtggtcctgccattgcccagaaatcagccccagccccggtgagcccccatcctgcccctgcccaccaggtactgggggcctgtggcagcaagatagggggagagagacccagagatgtgagagagagtcagagacagagacagagagagagagagagagacacagagagagacagagagagagcgagcgagcgcgcggcagccgcggggcgagggcctttgctgctctgccggggcctgctgactgaaaggaatttgtgtttttgctttttttccaaaaagatctccagctccacacatgtttccacttaataccagagaccccccccccttcccctcccccttcccctcccccttgggacgcgctctaaataattgcaataaaacaaacctttctctgcaaaccatttcctccccgccccctcccctcagcagcggccgtcctgagtgggagtccctgggacttcccagtggccaagttggggcgcccagcctcttcgtggggaccttgggtaaggccagggaggcctgatgtggccgtaggagctgcccctgcccacctgccctggtgtgggggtccctaggccacaccctgctccccacccagctaccctgtgcgcctgtgccctgctgggggcctgggctctccgaggggcctgaggatggaggccccacgtccccgaggagggcggcctctggacaggcccctcattccgcgcggcagctcccaggcctggggaacgtaggtgtgtgagagcggcacccgggaaggacgcctggcctctggctcagccctgcttggcgggctcccccgtggacaccctgttgactttgcacttccctcccgggccccgcacccccgaaccgaccaccgatcgaccggcaccgctgttgcctcgtaagccatagcgcatgcgcgctctcaggataaacaggccctgcctgggacccacacgcctctgtcttttctgagcctcctccccgtggggtgagaggggtggagggatgaggctgtttcagggagccccctccccgagtctcagcagctggaaacggtctcgttcctgagcccgtgccctgcatccatctgctcccagccctgctccatctcccccgctgacccccatgggaccccctgctgtgtggcacatcctgggcccatgcccatctctcttatttggcagactcagcctcccaccttcaccttccctgtgaagccatccggccccacacaacacccacacgggccaccctttgcccaattcaccctgcgacctctagcagtcacaggtcaagctttgtaccctgtggcgccctgcctgggtccccagtgtccctttcaaggccgggtagctctgtaaacaggggtgggaccctggcagaggctgggctttgagggcatgaaagttcaggagctggcggtgtccgggctgggaagctggggggccggcggtggatagcatgaggggccagggtccccagccagctgcccgggggctgcttgcttccccagcggacttccaacagctggctgcagctggctctccccacttcctccctcccaggttcatgcacaccccctccccctccctgagtacatagcaaagattgtcacgtccccagccggcctcccaggcagccctgctccagacacgcgagcacgggtgtgtacgaacacatccttgtatgcgattcccaggctctctgccccctcagggacagacatcagccagatcccatctgcaaacacaccaaagctttattcaacaggcgtggcttcctgaagcgtaaagccacttcacagacggtggccacagcggcacctcggccagagccatgcggccatcagagaccctgggcggccgggcagagggcttggttgaggcaggcgtggcagcgagggtgcacaggcagacaggtctgctggccgaagcccaccaagagtccattgatctcgtgccacagctccctgtgggggtgggggctgggtcagtgctgacagagggcgggcggggtgagctcttctccctaggaagccccccacatactcatacctaggcagccactcctccagggcggcgcgggtctcctctggggacttggttgccttcttggtccacctcagcctgttggcgattctgtgcacatgcgtgtccactgctgctgggaggccaagcggggtgaacaggggcacactccaccagcctagcccgtgcccctccccgcccagaggcgagtctgccaccacccccgtggccctccagttagacattggaaccgcaaagccctggctgcaagcctacatgtgaccatcttggctgcccctgaggtgctggggcaggggctgagccctctgttggggtgcaggcctctctcccatcacctgagccagcctggggggctctgttctgggctgcccactcccaacactggtgctagttggatgtgtgggtggtggggtctctgctttgggcagggcctgggggtgatgactcggctctgcttggagctctattccccacaataacagcgacagctcgcttggacaaacgcttgctgggggccagaccctgccagagagattggccagctcagtgagtcctcatgaggtcctacggatgctgaaaccgaggcccggcaggatcccgactccgaagcacctctcagccctcagcctccccaggaacgtggccctgtccccggaagggtccatccaggcttccctctgtctgtctcctgtggcctgaggctcctctcggcataagcactggctctgggcaccaggctgggtggcaacagctctgcctggcaggccggcatgaggtcactgcctgcagacctagcacctgccactgcagcggtcagggacacagcgggagcatgccctggccggccgcagctgctgtccacctgggttctggctcctgctcccctcagctggccaccccaggcgtctgctcactggggctcccttctcccacccggtggccccggccagctgcagccccagccctgcctcctcctcccgtgtttcccaaagagaaagccgaggcctgcaccagctccttcgctgctgcctagaaaaaggtgtccgagggtgtggggagaccacaaggcctgaggggtcacacccctggggctctgagcctcagtttcctcctctgtaacacggaagtggccatgcttcaaggctgagtcaggccacgtcacgttgtgtgagcctcctgcccacctggacagtgaatgacgaggactgcctcacccactttgtggccagagcttagagaagccaagggcctggcccagagtcacccagccaggaggtgcagagctgggaccggagccagcaatctatggctgtggcatttttttttttttttaaacggagtcttgctctgtcacccaggctggatacagacaatggtgcgatctccactcactgcaactttcgcctctgggtttcaagcgattctcctgcctcagcctcccgaggagctggaattacaggctcctgccaccacgcccggctaatttttttttttttggtgagacggagtcacgctttgtcgcccaggctggagtacactggcgcgatctcagctcactgcaagccccacctcccaggttcacactattctcctgcctcagcctcccgagtagctgggacaacaggcgcctgacacaatgcctggctaattttttgtgttttttagtagagacggggtttcaccatcttagcctggatggtcttgatctcctgacctcgtgatctgcctgcctcggcctcccaaagtgctgggattacaggcgtgagccaccacgcctggccacacccggctaatttttgtatttttagtagagagcgggtttcaccacgttggccaggctgatcttgaactcctgacctcaggtgatccacatacctcggccttccaaagtgctgggattacaggcttgagcccttgtacccagccagctctgacattttaactgagagcgtttctctttcggggaacccctaggaggcagccctggggtctccttgcaggtggtcaggcccacagacacctggagagggaggtatttccacatggctgtctcttgtgcccgctgctcccaaagcccgttccctgcctggctgcgggcagggaccttcccccacagccctgcccaaccacgatgcagcaccccagggacacgggcagctgaggacagccgcccagataagctcaagtgtccactgagaggctggcaggtggtgacgctgggagtctcagtcgggaggaggccctgccccggcgcacctggcctggctctggctctttggggctgctgtggctgttcagcctcaccaggtggccccggctcagaatagaggcccccggcccttggtggccctcttgcccaccagaaagtgctgcaagccccccgcctccggcacaggccccctgcaggagtcccaaaggggcctgggatgggggcacacagagggcagggccaagccctggtttctggactggctgggcccggctgcgtgtggccttaggagccccaaatcctctggacaaagccgaggaggaggcagccccaccccaaacccaggggtctgtctgcacccaactgccaagaagcctccggtgctaggaagagacaccaggacctgggaaaaggattcaaggagggccctccccccagtgcctccmtccccaccctcccctcttctccctctcaaccctcccctcttctccccgcagcacctccctctccaccctccccccatcctcccagcgcctccctccccaccctcytcccccattcccccagcgcctccctccctaccattcccctcctgtccccgcagagcctccctccccaccctccccctttmtccccccagcacctccctccccaccccacctgctgaggggatactcttcctcctccctcctcagtccttacctccccactctgccctcatctcattccagaacttcctgctcctggccctctctctcgcatcatggttttacagatgctgttccttctgctgggaacacacttcctcctcttggcctggctcaccccaccttgctctgcagctctcaggtgaaggatgaccttgggggccttcccagaggccctgggcccaagccaggccccaagagcaccctgcacaaccatcagggtttccactccacgagtggggaattcctcgctccacatttctcccgaatacaacgcagatggagtccagctccggggcctctctcagagccctgcacggagcaggtgctcagcccatgtgacctcctgccccagcacctgtctctgagtggggctggcctggctccaccctgggagcacctttctgactctatgggctgggtggaggaccagcatgctggaagtggagtcacaggtcacaaggatgtggggaatcccaagagcagccagtgggctggagccagccccgccctcctctactcaccaatgcctgacacagtgccccaggccacagccatagccaggtgtgccatcttgggcccaacacccggcagcgccaccagctcggccacagaggctgggatgtccccaccgtagtgctgctgcaggatggcgctggtctgcttgatgtatttcaccttgctctgaaagacaggggtgggttcagccttggaggcaagggcacagsccaacctgggaggatgcagcccccaggagacccacaggtggccagagctacctgcacctgctgaggacgtgtgcaagctcagcccccgccccccaggaggcgggaacaagcggagggcagcagggaggcccaaggtaggcctgaccccctcctcccacccgtgtgggccaatgatgcacgtgtaggctctggctggggttcccctgcccgtcattccctgccagcacccaggccaggccaagcaggccagccgctcccaggagtggggcttggctgcacctgcgccttcaggaaggagggctggagctggggcttccccaccagctgccaggcctgccgggtggttcccatcctgtgcctgagtggagagggctatttaaaacccatctgagaaactgcggcccacrcgggtgccaaggggaagcggccccacccaccaagctgctttcaacagatccgcccaccaccatccagtgctcggcggggttggggagcagcctccccagggctcctggagggtgaggggctctggacaggagggggtgacacaccgggagaggctagcagtaaacaaagggaaaggcgggtgggcaggcagccttggcggtgaggaagggtgggcaggcggcgaggcggggaagcagaggaaggaagggaggatgcgaacaggaaggccaaggagctgctgggactgggcgtcaggcctcagggccccacggcctggggggrgcttcagggggaccccccgagcctgagatgcttgaccctcacttcctgcaccgtcgccacccccctcagccttctgaggtctctctcaggccactgccacccggcccccgttgccacaggcagggctcaccctccagaaaccgacggggtagrtgagcttgcccagcgtggcatcatctgtctgcaggatgctgtccaccgtcaggccccgcgcccgcagtcgctgcatggcgcccgccgtcacctggtctttggtttggctggagagcatcagtgacagcagcacctggtacctgcgtacctgcttgtgcastgacagggaccggggtggcggcggrtcctgggtgattccctggccaggctccgccccccgccctcgacacaccctggtttgttgccctgggccacacttgaggcatcagcctccccctgtggggtggggaggtctggtttgggtatgtttggtcatctacaacaccaggacaataatagtacctgactcactggagtaatgtgaagcttaaatgaattatctcagtgcttagaatcgtatgtggccgggcgyggtggctcgcacccgtcatcccagcacttcgggaggccaaggcaggcggatcacctgaagtcaggagtttgagaccagcctgatcaacgtggtgaaaccccgtctctactaaaaatacaaacattagctgggtgcggtggtgcatgcctgtaatcccagctactcgggaggccgaggcaggagaataatttgaacctcggaggcgaaggttgcagtgagctaagatttcaccactgcactccagcctgggcaacaagagcaagacttggtctcaaaaaaaaacccaacacgatcgtatctggcccatcactactgaacagccattggccactactattatgattgcttcgtgaatcatcacactaycctttaaaacaaatttttttttttgagatgcagtatcactctttcacccaggctgaagtgtggtggtgccatcttggctcactgcaacctccgcctccggggttcaagcgattttcctgcctcgccctcctaagtagctggggttacaggtgcctgccaccacacctggctaatttttgtatttttagtagagacgtggtttcgccacattggccaggctggtctcgaactcctgacctcaggtgatccacccgccttggcctcccgaagtgctgggattacaggcctgaaccaccatgcctggcccatactacccattttacagacaagcaaactgaggctcagagaggcctgtatccaagccacctggtagcagaatagggattagaactcagcttggtctaagggtttcaggccctgggaccgtgaagcaaaaggaactcttccttcctgatatcacacaaagcccaggtcacgcctgcactgggcagaagttcgagcacgaggccctaaaccactggtgtcctgacctgctgagtggctacagtgatgcaggcgatgctctggggcaccgggtgtccatcctcccaaggtgctgtctgcaggggagggtgccagccaaaagccaccrggtagaaagaaaacaaggaccttgctaagatggggggtcatytgggcagatggggcccctgcctacctttgggggggcactggagtcatagcagtgctcagtccccagatggtccacaggtgcatcctttttgttcctcatggcacggatgttgaccagctgttgctgccagtcctggggctcccagactggcaccttgaggggctcagccccctcacctttctcactgtccgagccctcataggccacacgcagtctctgtgctttccgcggacgcttcacggggctgtggcttttcctcgcttctgcaaaaagcaccacrcagtccctctggtggggccrcaggtgaaggtagggtaggggtgccatcccgcctgctagctcacccctcactcgttcatgccacaactgtccatcatctaatacacttggggtgctctgccctctgcagtctggggtatgtgggccctccttatgccagcgaccctgacaaggtccatgttagctcatgaggactctagcaacagcctgtaccaaggtgcccccaatacatcttctatactgcaccagagacagtctgctaacacccacatcaggttgtgtcactcccttttaaaaaatcctggccggccgggcgcggtggatcaagcctgtaatcccagcactttgggaggccgaggtgggtggatcacttgaggtcaggagttcaagaccagcctggccaatatggcaaaaccccatctctactaaaaatacaaaagttagccgggtgtggtggcaggggcctatagtctcagctacttgggaggctgaggcaggagaactgcttgaacctggggggcggaggttgcagtgagctgagatcacaacactccactacagcctgggtgacagagcaagacccgatctcaaaacaaacaacaaaacctcctaattgacttccgtttactgtcataataaactccaaactctatcctggcatcaaagctcctgccaccctggctggcatcaccacctgcctgctcccagctgcaccagttcctcctgmcatagtytggactacccctggggtccctgggtgcctatgggaatccarctytggccaattctgcagaagtcccagcgggactagcgcagaggccctgtccgtgtccctcactgctcactgcagtgcttggcccccagcaggtcctcaacggctgcaggataaatataataagtgccatgccctttcctgttttccctcagaggcaccctcccccgagctgggggagcaggcttctggctgcgtgtgtccttggcacccagcctctccgaggacagcaagttcactgcaggagggcggggatgggacccacagagcctggagtggagagtcccggacagagtggtgggaaaggaagcgttttcttgcttggggcgaaagggggcagcggagcggagcgcccgaaacccagcccctgcggaccgcaatctttgggaaaaaggcgcaaggtgggaacgcagggccgcacgtgggaaccgttcgcggctgccgggtttgcagcccctgcccgcgcagctgggagccgcaggaggcggcccgggactccagcctgcagcccctatcccgcctcctcccacgctccagccacggcgcggcgctacctgctgcagcctctcttctccggagaggcccgggctcctccytacacccccgcggcccagccccgggtcccaggctccrgctccgggtcagcatcctcgcgctcaaggcggtcatgccggactcctgcggactacacatcccggcggcccatgcggccccgtcacgtgatgcaaggatcgccggcctttccgccagagggcggcacagaactacaactcccagcaagctcccaaggcggccctccgcgcaatgccgctaccggaagtgcgggtcgcgcttccggcggcgtcccggggccaggggggtgcgcctttctccgcgtcggggcggcccggagcgcggtggcgcggcgcggggtaagtggcggtccccacggggcaagtggcggtccccacggggcagcggcctagagaggcggaccccgcagtgtccgggtccygggccctcacccgcgcccactgcaacccgactccggagctccgagcatcccttagktttaagtcatggcgggtgcgaacgggtctctgctgcaggcggctccgtgacagctcctgcttcacatgggtagaggagagacggcaaacgtcggggctcccaggacttcgcggcggcagtcctaacccgtgcactgagtcgggyggggcgggcggcagcgtctgagtagagagctctctagaccaggcctggtgtctcccgggctttcctaggtgcctgtttgcgagctggtcagctgggctgtagttgagttctcccagggagtgtgggaggaaaggttatgcccaccagagacccagggtcctgacggctggaggtccgcagtggggaaggtgggcagaggtgttgctcagatgtccccattcctgtttcstttgcacagaggggttttctggtgcgtcctggtccaccatggccaaaccaacaagcaaagattcaggcttgwaggagaagtttaagattctgttgggactgggaacaccgaggccaaatcccaggtctgcagagggtaaacagacggagtttatcatcaccgcggaaatactgagagtgagtgagctacctgtgtctttgctaggctagagggaaatgcagagaaggctgggtttggtcttgcaccaggttctgtgggagacgggttgctggcaactgtctacacaggaatgctgtctccagtacttggaggccgacatgtccttcctcaggagacttcgaaagtcaggatcttggtgacctggttcaggcacacttgagttactattcagatgttgatgaaagaaagcccatcttatagatgaggcctgagtatcatcatcttcacaggtaaggatatgtccaggtgttacatgataagatgtgagttcctgggagaagtaggttctttattttattttttttttgagactgagtcttgctctgttgcctaggctggagtgcagtggcacaatctctgctcgctgctacctctgcctcccagtttcaagtggttctcctgcctcagcctcctgagtagctgggactacagacrcgtgccaccacacccatttaatttttgtatttttagtagagatggagtttcactatcttggccaggctggtcttgaactgctgacctcaggtgatctgcccgctttggcctcccaaagtgctgggattacaggcatgagccatcgcacatgggctaggtcgttatcttttatgtgtgtttgtgtctttgtcacrcatgcctggcattgtgttttgcccatgagtaaatgctgaatttttgcacttgtaaagttttctacttagaaacaactaaaacgttcatcaactgatgaataaaatatagtccatcctggctgggtgcggtggctcacgcctgtcatcccagcactttgggaggccgaggcgggtggatcacctgaggtcaggagtttgagaccagcctggccaacatggcgaaaccccgtctctactaaaaataccaaaaattagccggtcatagtggtgggcgcctgtaattccagctactcggggggctgagacgagaattgcttgaacccgggaggcggaggtttcagtgagccgtgatcgcgccactgcactccatcctggggaagaagagcaaaactccgtctaaaaaaaaattgtgcagtttgaaattgtatttcatgttatgttttatctcaatacaacatttgcagttgtgaaaaaaaattgcacattctcaactcctcgggatggagcagtaaagcccctcagtaaatctttttttttttttttttttgagaccgagtttcgctcttgtcacccaggctggagcgcaggggcgcgatctcggctcactgcaatctccgcctcctgggttcaagggattctcctgcctcactctcccgagtagctgggattatagacgcccaccaccacgcccagcaaattttttgtatttttagtagagacagggtttcatcatgttgggcaggctggtctcaaactcctgacctctggtgatccacctgccttggccccccaaagtgcagggattacaggcctgagccaccgcggctcgtcaagtgaatcttgattccagaaagatctgttttaagtctctagtctggaaaatgcagtgggagtctttaggtggtttgtgacttgcagttaaggagaccgtggcctgagcactggcccctttttcttctttcatctctctccaggaactgagcatggaatgtggcctcaacaatcgcatccggatgatagggcagatttgtgaagtcgcaaaaaccaagaaatttgaagaggtaggtttatccagttgagctactagagagaggcacgtagactattcagagcctgagtttgctttttttaggaacatggttgacagctgactgccgatgatctggtttgcactttttttttttttttttttttgagatggagtcttgctctgtcgcccaggctggcacaatcttggctcactgcagcctctgcctcctgggttcaagcagttctcctgcctcagcctcctgagtagctgggattacaggcacgcgccaccacacccggctttttgtatttttagtagagacggggtttcgccatgttggccaggctggtcttgaactcctgacctcgtgaaccatatgcctcagcctcccaaagtgctgggattacaggcgtgagccactgcgcccagccagtttgcactgttttaggggaatttagctttcatcgtagtgatggggaagctactggaaatgccccgaatacaaccttgagggaccaatcaagcgtggaaatggggagcaaagggattaggcttttctagcaacaccagaaaggatttctatgccgagcgggggtgcgggggcttatgcctgtaatcctaggactttgggaggccgaggtgggtggatcacgaggtcaggagttcaagaccactctggccaacatggcgaaaccccgtctgtactaaaagatgatgagccgggcatggtggcacatgcctgtaatcccagctacttgggaggctgaggcaggagaatcgcttgaacccgggaggcacaggttgcagtgagccgagatcgccccactgcactccagtctgggtgacggagcaagactctgtctcaaaaaaaaaaaaaaggaagagtttgtagtggctgatagaaacgcatgctcactcgctctctcctgttacaagttcaggccaagaaaaatcaagaaagggtttgttccacagagaacaatcctaggcacgctggtcttggtgccattttgggagggtgactggtcggtggtattgggcgacctcacggacatagaaatatttattttgggcaaacattgccagactttcctgatgacttgtggacaggacaggaagtggtcattttgggagygcaggttgctggtagagcacctgagggctctgcccttgccttgcccagcatttgtgtgtgggagagcagtgagacctggacctctcatgctcagatctgctaagaggagagtgattgctacctctgcagcagctcatctgaaacgtgctggccgtacrctaccaaagataggtgtaaagaacaggtgtccttagccgggcgcagtggttcacgcctgtaatcccagcactttgggaggccaaggtggatggatcacctgaggtgaggagttcgagacccgcctggccaatgtggcaaaaccctgtttctactaaagatacaaaaattagctgggcatggtgtcgggcacctgtaatcccagctacttgggaggctgagggaggagaatcgcttaaactcaggaggcagaggttgtggtgagctgagattgtgccattgcactgcagcctgggcaacagagcaagactgtctcagaaaacaaaaaaaagaacaagcgtcctgcatcctgttctgaaagttgtttgtgtgggtacggggcagcctgtgagtggataaataggcctccgaggctgggatggtcccgggccctgtgtccacggatctttgcagctcaggttgcaacggtaagagtattgtcaatgagacaaaggaggtgagagtgccagttgtctgaattggttgggatgttggtcagatgacatctaaaagaacacggccattttgttattatttggttagagacaaggtctcactctgtcacccaggccggggtgcagtgtcacaatcatggctcactacagcctcaacctgccaggctcacgtgatcctcctactttagcctctcaagtagctgggactacaggcatgcagcaccacgcctggctaagttttgtawtttttgtcgtgacagggtctcactgtgttgcccaggctagtctgaaactcctgggctgacgtgaccctctcccctctgccacccgaagtgctgagattacaggtgtgagccaccgcacttggccrgaacacggccattttagttcccctccttagaggagtaaggccaggaatgagcctgtggtctgaaagccgtggctgttggttaatgtggagaagggaaggtggtgagagccagcccaaacccctgccgagtgagactgattctggcagctttagggagcagggatgagcccctcacaggctgggtggtagttagaggaggcagatttcagaaggccacgcagcgctctttctcagcaggtcaggcaggcagcagaggtcgggcaggggcatggggtcgagggcccgatgctggtgtgttcactagaggagagccacaagcagggattctgggtcaggtgcaggcctagggcttagtgtgcacttgtggttctgagactgtcccatgacttcctgycagcattccggcagctctagtgggactccctcctggtccaggtgaggccaccattgctgccctggcttgctgctgtcctctcagcccccagtctgtcacctggtgggagttaaagggacctgctggggtttgaggaagctctgagccgttccctgtacgaagcctgtggycatctcaggctgcaggagacacaggagatacgagctttggaggtggggctctcagtcacaagccccygttgttcctccctgtcctycgctcacggcactgctccagttgccggggccagggttcttggagagcacatcctcaccgctgtcccctctgctggtgacagcacgcagtggaagcactctggaaggyggtcgcggatctgttgyagccggagcggmcgctggaggcccggcacgcggtgctggctctgctgaaggccatcgtgcaggggcaggtaaggcccagggcgacgctgggatgggtgayktcaggctgcccactgactgtcctgtccctgctgggccgtgtttggactcctgcctcggtgagttgctgggcacagggtctaggggctgatgggctctggagctggatggcctgtggggtctcctggtgtcatgaggtctgtgtgaccgtaggcactgcctcctcgcctgtaaacagatggtcactgcaccttcctcttatgggatgttctggggatcatatgaggcagttstcgcagagtgctgagatcgtacctggcagctggtgtggggctacggtgttgttttgcccttgcaccctttcggggccactcccctgctcactgcattccatctgtgctggtcttggctgaccctgaacacccaggcctcttggtgttcctgcctcccctggtcggccacttctactccttcatgtcccagctgctcagaagggccgtccactctcacaggctctcctgggtttcccccactcaggccttgtcctcastctctgakcacaasgctgtctgccctgcaccgaktgcaggggtcgggcaggagctgtgtcatcccctgctctgcgccacccgctgtgccaggtcccgacacacagcagttgctccccatacgccgctctgcggtcggccggtgcatccggccccctgccctgtacaatgctgatgctgcagacctgtctcttgcagggcgcctctgtgggaaggagaggggtccagggctggagtccgggtgcccctgcacttcagggacttcttggcagccgtgtgggcgacgctggcaggctctgctgatcctgtggcttttgtctttagggcgagcgtttgggggtcctcagagccctcttctttaaggtcatcaaggattacccttccaacgaagaccttcrcgaaaggctggaggttttcaaggccctcacagacaatgggagacacatcacctasttggaggaagagctgggtgggtgccaccttgggttggaggtttctctggccttgacgatcaagtgtaacctggatgggaaggacctggggctggggaggggctgccgttctcagggatggcctgcagcgggtatgcccaccctgcttcatgcacctgggctcacctgcgtggccggagtgcccctgaggcacgtgttaaaaatgcagagtcctggccttcaccccagacctgctgactgtgagtctctggggcttggggcctccgaacacctctgcaacggcaggagctgggcgagttctgtcactgggaggtggtgctgctgacttggtctcaaccggagcgtactggtcccgtcttcctcctcctttctccactttgtggaccttcctcctgccatcctgtggtgggaggtttccattagtcttgggtctctgtgtcatgattctgggaagtagagaaagaggaggaagagatcggtctgactctggctttgctgttctgtcgcccagaaaagggcctcagtggctgggctgcctgcaggacaggtgccggccaggtgcctaccgtcaggtttcctgtctgaggtgacgtggccggcagccaagtgtgcacacgtctcctccgagccrctctctgctgggggtggggaacgcccaggagtctggtgatgtcggcgtctcccagcctcgggttgggccctgagtgtacggcatacacacttctgctgccgcctcggcacagaccctctgtgcagccccaggggcggtagatcctagtgtccgtgcgtagccggcctgccctgggctcccctgagcctcttcgggcccagtgcgtggtctgtctgttgctgccgggggactgatgatggggtttctggcagtgacgggtttggacacactgtcctgcggsgggrgggggaggtgagtgggagatgtagattcggcgtcctcgcaaactgccgccgcttctccccyagctgactttgtcctgyagtggatggatgttggcttgtcctcggaattccttctggtgctggtgaacttggtcaaattcaatagctgttacctcgacgagtacatcgcaaggatggttyagtaagaaaagaattgagatcctgttctgataatggtcctaagttcagctccgcagtgaataaagttgaaaccaccaaaaaaatagaggttgggctgggcacaatggctcacgcctgtaatctcagcactttgggaggccgaggcaggcggatcacgaggtcaggagttcgagaccagcctggccaacatggtgaaaccctgtctctactaaaaatacaaaaattagccgggcatggtggtgggagcctgtaatcccagctactcaggaggctgaggcaggagaattgcttgaaaccggaaggcagaggttgcagtgagcggagatcgtgccactgcactccagcctgggtgaaagagcaaaactccatctcaaaaaaaaaaaaaaaaaaagagaagtacgtagctatcttctgtttagctctcatctgatgtcttggttatctttttgttgtttgtttagaatgttgcatgagctctgtctcactcatgctgaacacccagcaccgagagcagtggctggcgcacagcaggcacctgagtgcttgttgggtgggtgggacccccagggaggatgagccatgcgtgttattgaygtcatagagtgactagaccacagcccgtggtggctcggccatccaggcagtgctgccgggactgagctcggtgctccctgcaggatgatctgtctgctgtgcgtccggaccgcgtcctctgtggacatagaggtcagtgcctcccctccccagggccggcccatttcaccctggtttctgggaggctggggcttgggggttgagccctgtgtgccacctgctggctgtgtagccctgggcaagctgctcggtctctctgagcctcaggagtcccccatgtaagtcaggatagcygggcgcctccatgtggagatgtagctcagggtggatgacrgcatcaatgacccacagtgacagggacgtcaggtgcttcccacatgcccgcttgccctgtggcttggagagagggtgccatggcagcggggagaggtggcagcgcaggctgaaggaggtgggaaggaagcctgggtgtcctctcctgtggggaggagctggggtaggacgggcgtgagccgtctccctctccaccaggtctccctgcaggtgctggaygccgtggtctgctacaactgcctgccggctgagagcctcccgctgttcatcgttaccctctrtcgcaccatcaacgtcaaggagctctgmgagccttgmtggaasgtggggtttctgaaactgctctggaaggttcctgagagcacatggatgggacaagggccatcctgtctcccatgaatggttgtctgattcttggggtggccagacaatggcctgttgagggacggccagtgtcattttcscaggcagttgagctgaggtcagggttttggtggcattttgagaaccctgctgcctctgtctttgggaggagatggtggcgagctggccggaccttgggtggctatagggcagcagccaggcggggccagcagcgggactggggctgggggcagggcttatgcctgccagcccctgacacgcattgtgtctcgcagctgatgcsgaacctccttggcacccacctgggccacagcgccatctacaacatgtgccacctcatggaggacaggtgagtgtggtgggtggggcgcagggcagtggaggccagcacagccctcggggcagctccagtgtcccttgccaagcacacactggcttagagagtccttgtcctctcgggcagctgttccagaggctgccactagagcgaggcccatgacttctaggatccagcccctgtcctctccttcctctgtcagttcaacagaatatccacacccagctcagtgcctgccccatgctcggacgtcctccagcggtgctccccaactacttagcctgttacaaggcgaggctcggggtcttggcttgacgttgcycttgccctcacccccacagccaggctgtggccacttttgttgctttagccattagagatggctcagctctgcccacaccctggcctcccacccatgctgccagctccccctcctgctctcctgtatccatccgcgcctcctgaagcccactccatgcagcacccgggtggcctttttctgacacagatatgtcggtgtcaccctttgctggaagccaggtggttcccagcgcccttgggatgtaggcttctcctatggaaccaggccctggggccagccctgcctcagccctgcatctctcccagccctgcctcggcccctgcatctctcccagccctgcctcggcccctgcatctctcccagccctgcctcggcccctgcatctctcccagccctgcctcggcccctgcatctctcccagccctgcctcggcccctgcatctctcccagccctgcctcggcccctgcatctctcccagccctgcctcggcccctgcatctctcccagccctgcctcggcccctgcatctctcccagccctgcctcggccctgcatctttccttccctccatccttggaaccaggccctggggcccagccctgcctcagccctgcatctctcctagccctgcctcagcccctgcatctctccctccctcctcccgtagaaccaggccctgggggccagccctgcctcagcctgcatctctcccagccctgccccaccccctgcatctctcctttcctccatcttgccttctcccctccaccaagggcttgtgcatgccctgattcctcttgccagcaggttcttccacctttgccgagttactctgtttactgaggtcttagcgtggtcactgactcccccacctccctgagtagtttttgctgtggctttccttcttggctgtgattggaggaagagattttgcgtttacctgggagattatgtggctggcgcctgtctcccccagactgcgaggctgtgggccatccctcttgcctgcttcctgtccctggcatgacctgtagctcacagcgtggtcagcagtgatgggctgccgcctgtgcgcaggagtgaacaagagtgttactgctggcctctgttccctgcccttccccagcggtgctcctgccccccccaagcacagggacctctggggctgctgcaggagcctcggcaacctcacacatccatggcggaccctgggacagggccctgctcacattccgtctctctggggaacacttttagagcctacrtggaggacgcgcccctgctgagaggagccgtgttttttgtgggcatggctctctgrggagcccaccggctctattctctcaggaactcgccgacatctgtgttgccatcattttascaggtaaggcggtttctgtgtgcagtgagctggcaggaacgggagagctcccctcacgcctgcccacccatcccactgggggtcctgctgcgggggctgcggtggcatttctaggcctttccaggcagttgctttgcagctgggggtgaggtttggggccctttgtaggctttagtcttttttttttttttttgagaaggagttctgctctttctgcttggctgactgcaatctccgcctcccggattcaagtgattctattgcctcagactcctgagtagctgggattacaggtgcctggtaccatgcctggctaattttgtgtttttagtagagacggggtttcgccatgttggccaggctggtctcgaattcctgacctgaagtgatccacccatctcagactcccaaagtgctaggattacaggcgtgagccaccatgcctggccaaaggcttttttctctctctctttttttttttttttttttttgagacagagttttactcttgttgcccagggtggagtgcaatggtgcgatctcggctcactgcaacctctgcctccccagttcaagccattctgcctcagcctcctgagtagctgggattacaggtgcctgccacagtgcctggctaatggtttttttttttttttttttttttttaatgggacagagtttcgctcttattgcccaggctggagtgcaatggcgcgatcttggctcagcgcaacctccgcctcccaggttcaagccattctcctgcctcagcctcctgagtagctgggattataggcatgggccactacacacagctaattttttatttttagtagagactgggtttctccacattggtcaggctggtctcaaactcccgacctcaggtgatccgccagcctcagcctcccaaagtgctggaattataggtatgagtcaccgtgcccggccaaggctaatgttttgtatttttattagagatggggtttcaccatgttggtcaggctggtcttgaactcctgacctcaggtgatccacccgccttggtctcccaaagtgctgagattataggcatgagccactgcgcgcagcccaaaggctttattctcaagcaaaccttacatcttgcgagtttcaccttctggagttggcagtggaggggtgaacgctgcctcgggggtagccgttctcttgctgttggcggctctgttttgtcaagtgctggtcttgtcctgtctctgcaatgacgccgtggcacagacgctggtggtacagcttcagtttccgcagtgccccgtgatgacagcgctttttgtgtccgtcctcgttctgtgctcacagctccctggagggtggggcgatcacgtcgtcctggttttatagtgatgagctgcggtgtgggtcacagggctctcctgatcctctgctcttcctgctacccccctccccgtaggggcggtggggggatgttgtctttgtgcacagcttgcagccgaactcagggcagctttcagttgctgctgggctggcccaccgggtgcccaggattcagttgctggtctgtccgagtcagggactttgcaggcaggcatgggggtggggcccgtctgggtcctgactgtgctggagcatgtagaaacccctcctgggcgccccacctgctgtttctgcggcccctgataaacgtgtggtgggcactgcgsgctcaggcgtgctactctcggtcccaagggtgactgrgagggcgtcccacagcaarcaagcagctctgaccctgtgtgctggccgggctcgtgttccaggccatggcatgtccgaacgaggtggtgtcctatgagatcgtcctgtccatcaccaggctcatcaagaagtataggaaggagctccaggtggtggcgtgggacattctgctgaacatcatckaacrgctccttcarcagctccaggtggggtgggggcaggagctccggggagcaccgggaacccagacaggcaggctcggcccactcagaagatggtaccttgggccccatctctgggggtcccgcagagactgccagaaccgtgttctctggtgattcgcagtggcgctcatccaccttccaccggagacaggtctgatttttccagacgtggtgcatcgtttaggccccagacaggaatatgcagtaggtgagccggggctgggccagtgctgtccacagtccgcagagtgacctgcaggccgccttcgtggcctgagtgggccccggcacagttcccagagggatgccagtgtggcttccgcatgactttggaggaccgcattagtcgagtctgttaaccacagctttaaggaggactccacggccacacgggctcrtcagcataggggccctggggaggcgaggctagtatccagcagcctcagggctgtgccttttcctggagcctggggcgggtgatgtacaggaggccaggcagcagaagggaggccgggacttcgccgggacttagcagggactgaagtcctctcagagcctgtcgctgggccagagcattgcccccgaccgctggtggcagtggcagaggtcatagcctggggcttctaaaagaggctggacctgggagaggcaagaaaggcttgtagttgtggctactcttggccctcctgcccgagcttccttcttggcccagctgcatgggcacagccaagattccttggggggtggggtacgggcaggaacagcagctgccatcacagccactgtggccccttgagaggatctggggggtgtcctgggccacgtgggtcagggtggcccctggagaggatctgggggtgtctcaacccatgaggcccggagcggcctcagagggctgggggcgtctgtccccatgcggcccagagcggcctgagagggctgagggcgtctccatgcggtgggtgtgtagcgaggcctctggtgccaagtccatgtggggagtggaagtcagcctgtgtcatcgtgcctggtactgcagaccttggacagcccggagctcaggaccatcgtccatgacctgttgaccacggtggaggagctgtgtgaccagaacgagttccacgggtctcaggagagakactttgaactggtggagagatgtgcggaccagaggyctgtgagaccccctcctgggtggggcctttgggctttggctggtggggaggggccgggtgctgggtgaagtgcagctttctgagcctcagaagccaagggccaggtgggcgcctgctttccaggtttctgcactcggcagggaaggctggcaggcacagcacgtgtttggtaacaagctcggggctagcccacccatcagtttcctcccacctgtgtggagcaagcttccatccggctctgtagagtcctgtggctcccaggcggccgcagtcattttgccaggaacactcagcttagggcccaggcttttccatgggtttggacacaagtcttccccgctgccaggagtgcctttgtgtctgggctgtgggctgcaggctgtgaggcggctgggctctgacagcaaaccagcctctcgaccagcagcccagtgtggagaaggagagcgccggaggggcagaggggcaacaccggctcttcttttgacaggagtcctccctcctgaacctgatctcctatagagcgcagtccatccacccggccaaggacggctggattcagaacctgcaggcgctgatskagagattcttcaggtagggggtcctctgtagccttgcctggcacctggagcctggccctgtctctgtctggggcccacccgggctgggtctcaggatgcccgatgagcagggccctcccctctgcctctggagagccctggctctgggtgagcaggtgctagcttgctttccagtccagcaggacaggtcctctcatgacgccactgggctccctcttttcgggggtcgtctggagagatgctccctgggaagcagagctctgtgccctgtgtgcctggccgcgggaggacccagagtcgggctggcctgcgccaggcagacgggctggtgtggggctgtggccgggcactccccacccgccccagcaggctgccgtcccgcaggagygagtccygaggcgccgtgcgcatcaaggtgctggacgtgctgtcctttgtgctgctcatcaacaggyagttctatgaggtgcgtgtccaggcggccgcagctgggggctcagggctatttctccgtgggcgggctgtctctgttgtgcacgtgctcccgcagagccgggctctgcctgggacttcggtcctgccggaccctctgcagcccccagcgtggtctgtttacccctgttcaytcactggcttgctcgtcctgggtgcctctgccaggccttgacacgtggccaagtagcaaggaaggcacagtgcctgccctcagggagctccggccggttttcacccaacacaggagcctcttaaaaattctgtgtgagttcgtttcagccagtcttgcatggggacattgtcttccgtttcagtcctgacgttcaccctgtgcacctgcgtgatcgccagccctgcctggtctctcctctgcgggctctccctctccactccctcctctgggagctctgtggccccaggcccaccttccttgagagacatttgtgtgcctgccagtcatacccctttcccaggaggcgcagcttaggctctgaggctgtcccttcccaccgaactcctccctgcagcctcgcagtcctgccctcctgagagctgcccactctgctcctctccccagcgtccactgtccttgaattgccctttgctgggcattgcgatcccgcattctgtctgagggagctaagggcctcctggaagttcctctgggtcctctggcttctcccatcagggctggtcttgtcctggtctctgttcctgtggaactttttacctgcttctgtgaaaactcacgctgtcctcagcacagcacgcacacacacgcatattcacgcatgcacaggcacacacgtgcacatgcccacgcgtgcacacagccacacacaccctcacgcacacacgcacagcaccatgtgggaggggttctcggctgtgacagtgaagggcagggcctcacctcggctgctccttgtgagttgtgggccccgtgtctgtgcccggccgccctgcggtgctcaccagccttctgaacraggagctggacaggatccctggaaggggccccggggtctctgagtcgcgytcagcgggtgcttgtgctctctgcccagctgtgctgaagtcccgagggacrtgtccgctgcttgcgggtcggttcctgaggaattggaagtgtcacgagatgtggccctcgttgggctggcgctcattggcctcccttgtgcctgtgcaggaggagctgattawctcagtggtcatctcgcagctctcccacatccccgaggataaagaccaccaggtcygaaagctggccacccagttgctggtggacytggcagagggctgccacacacaccacttcaacagyctgctggacatcatcgagaaggtgagagccgttgtacccggggccgggtgctagcgtgccagagctccgtgggcagcaatggcctctgggccctctgtcctcctcttcgagtgaccggatggctgtgtccgtaggtgaggctcccctccctgcagggtgggtgtcccgaggcctgtgcagggcctgccactgctggatttgtgtcctgactgaaagtcctggacatgggtgtcctgtcacactctgggacagctgggctgggcctcctggaccgacgctggagcccagacctggggctggggctttggcctgccgtcctccctgcccagccaacagctttgctctttgattttcagatgcattttggtttctgcacagtcactcgggtataaagggcatctttgcttttgagcaataaagatgaaggccgggcacagtggctcacgcctgtaatcccagcattttgggaggctgaggcaggtggattgcttgagttcaggagttcaagaccagcctggccaacatggtgaaatcctgtctctactaaaaatataaaaattagctgcacgtggtggcgggcacctgcaatcccagctgctcaggaggctgaggcaggagaatcgcttgaacctrggaggtgaaggttgcagtgagccaagattctgccactgcactccagcctggacgacagagcaagactctgtctcaaaaagaaaaaaaaaaagggccgggcacggtggctcatgcctgtaatcccagcactttgggaggccaaggcaggcggatcatgaggtcaggagatcaagaccatcctggctaacacggtgaaaccccatctctactaaaaatacaaaaaattagctgggcgtggtggcgggcgcctgtagtcctagctactggggaggctgaggcaggagaatggcgtgaacctgggaggcggagcttgtagtgagctgagattgtgccaccgcactccagcctgggcgacagagcaagactcgatctcaaaaaaaaaaaaaaaaaaaaaaaaggtgtttgtggtagaaagtgttctcacggctgctgactcagaayyatgagcctgtgtgtaagtcctggycttctcttcaaaggtgatggcccgctccctctccccacccccggagctggaagaaagggatgtggccgcatactmggcctccttggaggatgtgaagacagccgtcctggggcttctggtcatccttcaggtgggtgttctgcacgaggcctctgctcccggggcgcgcatggctagcgtccaccagctgcatctgcgttgtgttggagtcygttccccagcgggacccacaccctccctggatttgctgagggtgcggtggtctcagcaggcagcagaaccttcctcctgctcttgtggagggatggatgcragaggccccgttgtacgccctgaccagagcttgtctcygtgctcctgagtcagggccggaaccatgtaccatcctcagcgtggcgcttgccctcgtcacccagcacagcacctgggaagtaagggtggccctccattcctgccctgcagtccgtttaatatttgcagctgttttgttgagatttaatttacatatcatgcaatttacccattcacagtgaacagttcagtggttttcagtaaattcacagagctctgcagccaaccccacagtcagcttgagaacctcctgagcataccagtagcacacgctcccatcccccgttgctcccgtacccccgggtaccatcaagctgcttcctgtctctgtggatttacctactctcaacatttcatggaagtggaatcacacaaaattcatccataagatgttggatggtagaacagtttcctgtctgctgactggattgttccacccagcgccatgtgtccaggcccgtccaggctgtggcagctgttggtgctcccctccttttcatggctgagtagtattccatcatctggaaggagcacattttgtctgtccgttcctccattggtggacatttggcctgtgtccgccttgcagctgcggtgagtggtgctgctgtgaaccttctcctacgagggctccgccgggcctgcattttcacttttgggtctgcacctaggagtgaattgttgggccctaggtttagtctgcatttggtgtttcaaggcgataccaggctgttttccactggtgctgtgccattttccatccactcgagcagcatgtaagggttctgatttatctttttttttttttttttttttttttgatacagtctcactctgtcgcccaggctggagtggagtgcagtggcgcratcttggctcactgcaaccttcgcctcttgggttcaggcgattctcctacctcagcctcctgagcatctcgtattacaggcacctgccaacayactcggctaattttttgtattattagtagaaactgggtttcaccatgttggccaggctggtcttgaactcctgacctcaggtgatcctcccgccttggcctcccaaagtgctgggattacaggtgtgagccaccacgcccggcctgcctctacttttcaaagcctcacagcatcacttacgtgtgactgtcagtgtcagtatcgtgtaaaatataatgtatgaatcagtttgctcaaaagctcatccttaagatgttggatggtagaacaatttcctgtcatgtttatatgtcatgggtttttatttcttgccatggaagttgaaagtggtgatgatttttttttttaattaattttttgagacaagatctcactctgtcgcccaggctggggtgcagtgctgtgaccatagctcagtgcagccttgaactcctgtgaccaagtgatcgtcctgcctcggaggcctcccaagtagctgggaccataggcacacgtcaccacacctggctaattttttcattttttgtagagatggggtctttatatgttgcccagcctggcatcaacctcctggcctcaagcagttctcccaccatagcctcccaaagtgctgggattacaggcatgagccaccacacctggccgtggtgtttgattaaaaaccaggcatcagccgggtgtggtggctcatgcccgtaatcccagcactttgggaggctgaggtgggtggatcacctgaggttgggagttcaagaccagcctgaccaacatggagaaaccccgtctctactaaaaatacaaaattagccgggcgtggtggcgcatgcctgtagtcccagctactcgggaggctgaggcaggagaatcacttgaacccatgaggcagagggtacagtaagcccagatcacgccattgcactccagcctaggcaacaagaatgaaacaacgtctcaaaaacaaaacaaagcaaaaacaggcatcacctccttggtgtctcatccacatgagcaccatgctctttactgactggttgggaaggggtgtgctgggctgtgggggcctatggcctgggagaactgagaacctttctgcttctgcagagggaaggaaagaggttctgttgcccttacttggaactccagccctggaggcctgagggtctgggctgcagaactgagatatttcctagttgaggcagastcctggttctggctgctttcatttctttatttttttgagatagagtctcaccactatgtcacccaggctggagtgcagcggcacgatctcacctcactgcaacctccgcctcccaggttcaagcaattctcttgcctcagcctcctgagtagctgagatgacaggtgcgcaccaccacacctggctaatttttgtatttttagtagtgacatggtttcaccatgttggccaggctggtctcaatctcctgacctcaagtgatccacccaccccagacccccaaagtgttgggattacaggcgtgagccatcgtgcctggcctgttttcatttcttttgttataattgaaaagtaacacagttgactcttgaacagtatggggctgggagtgccagcccctgtgcaggtgaaaatccccatctaacttttaactccccagaaactttaccaacagccctctgttgactagaagccttgctgatagcagacagtctattaatgtacagctcgtgtgttttatgtattctgtgtttttacagtgaagtaagctagagaaaagcaaatgctgttaagatgctaggcatggtgactcacgcctgtaatcctggcagtttgggaggccgaggcgggcagatcatgaggccaggagttcgagaccagcctgaccaacatggtgaaaccccgtctctactaaaaatacaaaaattagctggatgcggtggtgcgcacctgtaatcccagctactcgggaggctgaggtaggagaatcacttgaacctgggaggtggaggttgcagtgacctgagatcgtgccatggcactccagcctgggcgacagagaaagactccgtctcaaaaaaaaaaaaaaaaaaaaaaatcataaggaagcgaaaatacatttcctgttccttaagtggaagtggctcatcaccaaggtcttcattgttgtcatcctcatgttgaggggactgaggaggaaggagaggagacacatggtcttgctctctcgggtgggagaggcggaagaaaattggcatgtaagtgacccatgaaggccagcctcgtgctgttcgagggtcagagagtttgcacaatggacacggtgacaagtttgattccccttttcctgcctgcctagtgggcccggcagggcggcagctgctgttggttccatgtggccttcccagaatggggggtgccaggcactgtgtgaacccccacctccacctcttttttgtccgaggaagggatgttgcttttatgtcataatattttgagatgaggagaaactgttaatcatttaatcatctttttttttgagatggagtctcgctctgtcgccccagctggagtgcagtggcgcaatcttggttcactgcaacctccgcctcctgggttcaagcgattctcctgcctcagtctcctgagtagctgggatttacaggcatgcaccaccacacctggctaatttttttttttttttgagacagtcttgctctgtcgcccaggctggagtgcagtggcacgatctcggctcactgcaagctctgcctcctgggttcacgccattctcctgcctcagcctcccaagtagctgggactacaggtgcccaccaccacgcccggctaatttttttgtgtttttagtagagacagggtttcaccatgttagccaggatggtcttgatctcctgacctcatgatccacccgcctcggcttcccaaagtgctgggattacaggcgtgagccactgtgcccggcctaattttgtatttttagtagagatgggctttctccatgtaggtcaggctggtcttgaactcctaacttcgtgatccacccacttcagcctcccaaagtgctgggattacaggcgtgagccaccacacctggcctcagtcatttctttcaatgattttttaatcatttaaaggtgttaatcatttctttaaaagaataacagtgtaaccacttacctccagagtgctgcaaagggtccctcaggccagatttcccctggctcctgctggcctcggccccagggttgctggaggcaacagatgctcttcacaccttgccacacgtgtctgggaggtgcccttgaccttttgggaggggctgcctacacctgggatcgccctgcagcacacactccccgccccattctgccctgtctgccacgcagctggagcttctccattgaatggactcttcctcacctgttgatgactgccctgatgatgagatgggcacgaggttgggttttactttttgctgctgtggagagagagtcctggtggtcctgggtttgaaggtcgtgtgttttgaagcacgcactctagagcagccgccccggcccctgctccgggacaagggtgctgtcytaggactgcgttttcacctcctgcgccgtggtgagctgcgtcctctctctgcagaccaagctgtacaccctgcctgcaagccacrccacgcgtgtgtatgagatgctggtcagccacattyagctccactasawgcacagctacaccctgccaatcgcgagcagcatcyrgctgcaggtatggtggctggggttgcgcagccagttcctgggggcccagccaggtatccccgtctcggcaggtgtggttcctggaagctgcagagacggccccaggatggggcctcagctgaccgtccctcctctgcacccactgtggccgcagcctccccagtcctggtgtccttccctctgcctgcagtccacacatctgtggcttgtcgctctaagccgcacggtgacatgggttggggcagagaaaaggacgcacggcgacttccggggcagtgcatggccctgacgctcctggtgctgcagaatctgtgaaggacctgcagcagagggctgggcaggtgggcggcacagggcagagctgagagggcagagctgagacggcagggcagggctggagagggcagagctgagagggcagggcagggctgggcagaacagggctggaggagtttcgctgagtttgcgctatagatgttggcaccaggctgagcagaggtgactgggatgggagccctccctcctagagcaggtgctctctggggccacccctgtggcctcagagtcctgttcagcctgtcgatggaagaagtggcagggctgggagctgagctccgctttctggcagttgggggcgtgtggtgctgccagaggagcgaggcgcccatcccttccatcccaggcgggcccagctgtggtggtggggacaccaggctctgtgagctccgaggcaagggagggaggaggctgtgggtgctgggcctccggtgtcaccaggacagagcctgtgtctgtgttgggaygtgggtgtgtgcacatcagcaggtggccttttctgagtgcctgtggtgctrgacgtgggtctgagcaggtgggacgccgcctgtcctgggcctgcacgagcttggctctggctttcaccatcctcttcctgacaggmctttgacttcctgttgctgctgcgggccgactcactgcaccgcctgggcctgcccaacaaggatggagtcgtgcggttcagcccctactgcgtctgcractacatgtacgcgggacctcgcccacggcccatgaggctcagggcgtcagaggcgctggggctgtggtggcgctgtttgcatgtctgagggatgtcccagggttgggaagagccaagtctgttccgttcctgctgcggggacttggcctcagctgcttctcttgcttctgcagggagccagagagaggctctgagaagaagaccagcggccccctttctcctcccacagggcctcctggcccggcgcctgcaggccccgccgtgcggctggggtccgtgccctactccctgctcttccgcgtcctgctgcagtrcttgaagcaggtgagtggggccgggcagggaccatccgtcccacgttgggccaggaggacagggagctgccacctgcctgctgggcctccctccctgtctggcctgtggagggcagccctccctcagagctgagccttcccccttccccgagcagctgcagggacagaggcctgcgctgggcaggctcccccggctgagaacrgggctccatagcccttgacgctgtgcagccacaaagcagagcctcagatgctagcttccgcctctgtctctagggtccagaaggccctgtcctgacgcctcctctcctcgcaggagtctgactgraaggtgctgaagctggttctgggcaggctgcctgagtccckgcgctataaagtgctcatctttacttccccttgcagtgtggaccagctgtgctctgctctctgctccatggtaccatggccggcctggggttggggtgggggacccagtagggtttttccccaaaagactgcgagcctctgggcagagcgagtgagacccttcgggctcgggctccatttccctcaaactcagctgcactctggagcgcagattgtgccttgggcagggtggagggacccctgccccagctcgcagcttttgggactgacgtcagaggtccccagccaagggcatgtcactgaatgtggatgtctcccatctgtgcttttcctaagtggggctcccgtgccgttcacctcacattcctggtgtgttacttggcaggcactcccaccactccgaaagggaggcccttcctgggagggaggcaagaaggctccccagcccctttgccccctttcctgggcctgcgttcccagggcctccccagcccctctggctaccccgtgacctggccgctggggagrggtttcatgcctggatttggtcatcagctttsaggcccaaagacactggagcggctccgaggcgccccagaaggcttctccagaactgacttgcacctggccgtggttccagwgctgacagcattaatctcttaccataactacctggacaaaaccaaacaggtaggaggtcagagcaggacaggcgagcttgatggggcctgggattcgagggcctggcccaggtaggccccacatttttctcataaacgagtttctgccaggccagggatgagtgagttggctctgcttccctgggtggctgccagatgcccagagtggggacatccgattccctggtgcttctagctctctttggggcctgggagccatccagtgttccctgtccaccccggacagcatctctgctctctgtagagcgttgcctggcttgttcctgctgtcccaagggggaggtggccatgccggttggtggagctgggctggttctgaggcgcagggtgggcaggccagagagtctggcttctgcctccctccacgccccatcaggtgccggaaactgtcccttcacctgcgatctgcctcgcccccgtcccagtcgcattcttccacacctctctttgacatggccctccgggacgaggagctggtgtcctagagattctggcctccgctcagggccatgcccgccaggagatgctgactctgaggcttggcccatctgtgccccgggcctcagcttctgatggtggccctgtagggagctgttgttgggttcccatccctcaggctcagccccaccctgttgggccccttcagcccctctgagaggctcactgggtcctcatgggtcttgcctcaaagcatagccagccttgctgggctgcaggttctgaggccttactggcccacagtgtatccgaggggtgaggccggctttgggaaatggaagctgttcccgggacactgcctggcaggccatctggccccgggctctgcctgagctccgctcatcttctgctgtcctcatggaagacactgcccagggttggtgtgggatctggtggcttggccacttcaggcagcactgccccttgcaacagagccagcctgtgaagggcccagaaccaggggatgagagcccagcatgtctgggttctgttggcctgtgggatcgtgtcggaatgcaactgaccggagcagtctgctgtgcagagtctgctcgggtagctcagcactgctggctctgccccacaggcattcagggacttgctaagcctcggctgttctcccggtggagcactcraggttggcgaggggtaggcgaggctgcctctgctgcaagcgggtggggcctgaggtgtcctgtctcctgcagcgcgagatggtctastgcctggagcagggcctcatccaccgctgtgccagmcagtgcgtcgtggccttgtccatctgcagcgtgragatgcytgacatcatcatcaaggcgctgcctgttmtggtggtgaagctcacgcacatctcagccacagccagcatggccgtcccactgctggagttcctgtccagtgagtccccgccctgcctgcgcatgcacccgagaggttcgggctgtgtaacctgtgcgggcttctctggtgccctctctcaggactccttggggaacctgggtgtctcgccttctgctgcctcagggcctgggcgtctctgcccggctgccatgagtgctctccttcctggctttgaggggcggctcctctcrcccctctagtgtccatgtgaacgctcctccttgaagaagcctcttcccccccgagcagtggccctcccctggttttgggcctcctctctgtccaacagagcacacgccgcttcaggggggctttgttcgcttcccccasactgtgacttcaggagctcaggtgcctgtcccttcccctcaccgcctgtgcgcatctgggcaggccctcaatgttgagatggcagaagggcactgctgggcccgcacttggtgtagaggctggagagaagatcgtgtgtgctttgtgggccacatgcaggtcctgtcggtctttctgttttgttgataaccctttagaagtgtagaagcctggccaggcgcggtggctcaggcctgtcatcccagcactgtgggaggccgaggcgggtggatcacctgaggtcaggagttcgagaccagcctggccaacctggcgaaaccctgtctctactaagaatacaaaaattagccgggtgtggtggcgggtgcctgtagtcccagctactcaggaggctaaggcaggaggcaggagaatctcatgaacccaggaggtggagcttctagtgagctgagatcacgccaccgcactccagcctgggcaacagagcgagacaccgtctcaaaaaaaaaaaagagagaagtgaggccgggcacggtggctcacgcctgtaatcccagcactttcggaggccgaggcaggcggatcatgaggtcaggagatcgagaccatctggcgaacacggtgaaaccccgtctctaataaaaatacaaaaaaactagccaggcgtggtggcgggcgcctgtagtcccagctacttgggaggctgaggcaggagaatggcgtgaacccagggggtggagcttgcagtgagccgggatcgcgccacygcactccagcctgggcgacagagccagactcatctcaaaaaaaaaaaaaaaaaaaaaaaaagaggtgcggaagcctttcctcacggatcacacaaatggtaggcgacagctcgaattggcccagaagctgtggttggctggccatgggaccgagagttgaggccagggtcgggaaagccacgtccgtgtggccgtggccttctctcctctgcagcaccccatcgctgccgtgggcagagcagccgtgttggccttcagaggcgctgcacgggaccccgrctcccctgaccaccctctycattaccgcagctctggccaggctgccgcacctctacaggaacttygccgcggagyagtatgccagtgtgttcgccatctccctgccgtacaccaacccctccaagtgagtggtcgccccaggccctgtgcctcccagccgtggccccsgctaggccttgcggcagaaagccccggcagcctttgtccccaaggcctgagcgcctcggttttttgcacttcatgccctggggatgtttccctgctgccaggatggagtgccagcccccttctcatctcaggtttaatcagtacatcgtgtgwctggcccatcacgtcatagccrtgtgrttcatcaggtgccgcctgcccttccggaaggattttgtccctttcatcactaaggtgggctcagggycggtgaaggctgtgtctctcggtaggccagggcttgctttgcccttggctgtccatggtcgggcagagtgacaggcaggtggagggcagtgggagggtgtttggggctgtgcctgtggcgctgggggctctgctgggcagcctgcagggctttgatgcgcggcaggcattgaggggtgggagctgggtgccgccgccttgcccctagcctgcagcttgtccctggccagggggcacccggcaggcctggtgagggcctccagcccccattgccacccctcactgtctgggtgtgctcactctgccagggcctgcggtccaatgtcctcttgtcttttgatgacaccccckagaaggacagcttcagggcccggagtactagtctcaacgagagacccaagaggtacggcctgcgggggtgtgcctggagtcggtgtggggtggggaaggacatggggctgtggcctgcctgacggtgcctccaagtcagtgagtggaaatgggtcctgtgtgccctggagtatgtgaggcagggcaggacctgcaagggccgctaacacccctcagcccctcagcaggttggccgtggtggcctgggtccgggctgcgtgtgccacgggcacctacttgtggaattgggggttggggtgcaagctttaggcgcctgagcccctcgaaggagccggccttgtctggggctgccccctcctctgcagcccccagcctgctgctagccggggactctgcttcatcaccgccgccttgccggaccgcaaagagctgagccagcctctgtgttcttgtttgcatttcatttgaacggctttctcctcctgtcccccaccttcctgcccgagctattttggctttccctagatgggaatacggcattttccagcgtgacctcaactcggaagctgttgtctccagcccctgggggccgggggccaagctcggccattacggccagagactactttctggggtcttggtctcttttcctagtgaccttcagggcctggccactgaggcctcagtgccgcctcggtcagagctgggcggtgcctgccttccgcgggtgggtgggattgcctggccagcacagcctggaatctgccgtgggggtgacccacacacgtttaatttgcactgacgttgtttgttttggtgtcatgcgtgaagccttacttgttctcagtcatgtttaccagacgtattatcatgcatttttgttttctgtctcttccccgctaactgccctttggcatggctctttttgctcatctcacccgcgggatctctccatcctgaccctgtggcctgggacctttcctcctcacccctccactggcttgttctccccttcccgggagctgggctctctggggcgttggggctccttcctcacccgatagtctgaggatagccagaccccccaaacaaggcttgaataactctccacccrtgaaagaattcaaggagagctctgcagccgaggccttccggtgccgcagcatcagtgtgtctgaacatgtggtccgcaggtagcgggactgtcgggtgsggggcacggaccctggagcttggccccgtgagcacctgggtggcagtgcatggggctgcttgcatgacctcatcgtctgcccgtgtcctccctggccagcscagggggagccggtgacgaggggtggaaaggttgcattctgtccccaggccccgtatgagcacgggctggttgcacgcatccccaggccccctcggggtgccgctccgagagagccaggcgtgccgggcagcagcctccccaggctgtccccaagggccgcagtgtgggttgggggagacaccactcctggttttggccttttcgtattctctagaatggacgtttttcttcgggctttcttctcaacaaggtttattttttgttgtagctgaaagggaacaaggggcatttgtggagggtgctggggtggggcagcctgggagggcctgggtgggggctaggatcctgcagggcatgggcatgggcctgggccccaggccatggtcttagttctccccgcagtgtctgggtgcaggtgtgggctctcgggctctcggctgtcacctgcctgtgggtcatcgctgctggcactggcagaggggatacctgtctcctcctggaagcccgttgcaggccaaggggtcccatggccctcagtccatccacctcctcacctcaggccggcctctgctgggtgggacttggccaggggttggggtggtagaggtgctcggtgaggcttaaagccattttctagcacattctgtatcatgagcaaaatattgcctaggggctatgaaatttgtatcagaatgaactcccataagcctcttccctgtcactgggtgtggagctcaggcagccgctcgcctgcctgagggtgasggtggaaggccacatggggatcccagacctctgtgtgcttgccggaggcagcctgcgggcagaatgcaatctgggcctgtctgtgtggcctccgcctctctgcatgactacaccgtttcgccaggaggccgtaacctagtgctcccgtgggcttcggtgagggggatgtcggtctctagcctcctgagtctgctccgaccagtaggcctggtcttccccacccagcgtctccccgttctctgggacaatgtggtccacgtgattctcaagctgaggctcgctgggccgcccacgccctgttggggtctttccgagcgaggtcctcagccgtgcatgcgttgagctttggcccttggtgataggtggctcggcccgccctacctggcaccctgaccctggtcacggcctctccctccagcaggatayagacgtccctcaccagtgccagcttggggtctgcagatgagaactccgtggccyaggctgacgatagcctgaaaaacctccacctggagctcacggaaacctgtctggacatgatggctygatacgtcttctccaacttcacggctgtcccsaagaggtccaggcggcactacagggctgggcgggcctgcgggagctccacgggcaagctgggtttcacgctccctgtcttctaggtctcctgtgggcgagttcctcctagcgggtggcaggaccaaaaccyggctggttgggaacaagcttgtcactgtgacgasaagcgtgggaaccgggacccggtcgttactaggcctggactcgggggagctgyagtccggcccggagtcgaggtgactgcaccttcctttcctccgcgcctgccagcctcgacaccggctgtcccgagcccaggcccacgtggcaccctygtaccagcctggggactaagtccaccctgtgcgtgggattctcttctcagctccagccccggggtgcatgtgagacagaccaaggaggcgccggccaagctggagtcccaggctgggcagcaggtgtcccgtggggcccgggatcgggtccgttccatgtcgggtgagccttggccccagccacctccacacaggcaccggggctccctcagttgctgctggtcccagtgttcaggaaggccccgagcccaggggccggggtggctggcttcaggcccggcccacgtcctgactctggggtgagccttccacagctcaccccagagccgtggagtggtggagtgtggcccgcttgctgcagaggggcctgctctgggtgctggtgtttcctgcgggttttcagctcggctcagtcctggagcccttctctgctccagcgagccgtggtctgactgcaggacaggttctgggtccctccctgtggccctgggttcactgaggccagcactgtggtgggcygtgccccaagggcagagctgccaccgtctctggctgcctgtggcactagcttgccaggctcggggggagcattcagcttgaggctggtggttttgcatcaggtaagtggtggtcaccagtcctctgccctcttcttcagggggccatggtcttygagttggcgycctggacgtgccggcctccyagttcctgggcagtgccacttctccaggaccacggactgcaccagccgcgaaacctgagaaggcctcagctggcacccgggttcctgtgyaggagaagacgaacctggcggcctatgtgcccctgctgacccagggctgggcggagatcctggtcyggaggcccacaggtactgggcggggctggcctgagcgccatctttctgccagtcacccacagagctgtggacactcaggggcgattgcagacttggccctcttgggatatttgggggtaacttttgttttttttttgagacagagtcttgctctgtggcccacgctggaacgcagtggcgcaatctcggctcactgcaagctccacctcccgggttcacgccattctcctgcctcagcctcccgagtagctgggaccacaggcgcccgccaccacgcctggccaatttttttgtatttctagtagagatggggtttcacyrtgttagccaggatggtctcaatctcctgacctcgtgatcyrcccgccttggcctcccaaagtgctgggattacaggcgtgagccaccgcgcccagccatttgggggtaacttgtaagtctccagaggtgagctgtgaggggcgatccaggtggctgaggtggggcaggggcctgtggcgaaccaagtgacttccatggcagagagttgccctccccgcctggaggctgcaagtccgagaccaaggtgctcctcggcaggaggtgctcctcagaggcctcaatccttggcatgcagttggttttttccctgtgtcctcacaggctctttcctggatgtctgcgtgttaatctcctcttgggaggaaaccggtcatggcttagggtccgctctggtcccttgctagccgtaattagctttctgaaacccagtctccagagacagtcccgttctgagttcctggggttgggactaaagcataccaacatkggggcacagctcagcctgttcccaggggcagagggagcccccgcagaggcccagagcccagggacagagggaggcctttgcagaggcccagagcccaggggcgcctgggtgtgccgtggctgaggggtgcaaagagtaggggttccagccctcgtggaggccttgggtccggactgtgaggctgtgggctggaggccgctgctctgaggtgcctggcggagcctggcctcgaggcaggggctgagcggggcagcagggtgggtggccgtcagagcagcgctggctccgacatcgtggtcctgaggattgtgggagggagcatgagggcaaaaccagggcccaggccaggaggcccctggggggccagagatgggtaaggggaggtactggcctcaggccaaaggtgctgccgcctccgcagggaacaccagctggctgatgagcctggagaacccgctcagccctttctcctmggacatcaacaacatgcccctgyaggagctgtctaacgccctcatggcggctgagcgcttcaaggagcaccgggacacagccctgtasaagtcactgtcggtgccggcagccagcacggccaaaccccctcctctgcctcgctccaacacaggtgagtggcatggcgggccttggcacgggctctgctcccactggcctggtgctcccggtgacggcaatgtggctcctctctgctgagggcgcccacacggctgggagtggtccctggcctgcctcagcaccattgttctcyggtgtttgggaggaggctgacccgtgggaggtgtctgccctgctcaggaagctggggctggcagcttcagaagcagtaggggccctgtggagcctctgcccagcatcctccgtggggagtccagcactgcgggctccaggaggctctgcggcagcctccctccctgcctgggcccaggtttggacacctgagcccgcctgcgcactctgggcccccaccccactcggcaccgtgcttctcgccaggccctctggctcttccctgtggctgcagatggcacttagcggcctaggacgtctattcacgggaggagggaggcactgccctcctcaggtctgcccaagcagcttgtagctagcactgggccccgtgcgcgcccctgccggccgctggccctgccctctctcctctgcaggcacggggcctgtgctctctgctygacctgtgtgtagcccctcctcctgctgacgtggccgcacacggccttcccttgcagtggcctctttctcctccctgtaccagtccagctgccaaggacagctgcacaggagcgtttcctgggcaggtatcgcstctcagagggaagcggttggctgcagagcgccactctgcctcataggtgctgtgctcrtcgcctcatccrcccacccccatggtccgtctgcctccattgccctggggagcaggtcccgactcgcatgaggacgtctgtgcagaatgtctttggcttggccagcgggatccccttgacttggtccctttgtggctgagccctgttcccacgctgtgcragcactcccggcccagcttcaggcctgaggggtgggggtggcctgagtctccatggtgacatcagctgagctgcagactctgatgggtggcagctgtttagggggaagcccacccctgggcctgcaccgagcgggccttgccctggcctttggtggctcccctggcctctggaacccacagatggggctgcctcaagtcccaggttgaccaggggccctgcagaccgacctctgcctgttgcccccaagccctggtggggagtgctgtgacctgcatggtgctcccctgccaggtctccacgtgcagacgagctggtttggaagggctgcgtgggacgggccctggggtggctgactgcgcgtgtgcagggctgtggggcgcccgggggctgtgatggtcccctctgttgctgcttctacttcctctccccctgtcctgacgctggcacaggaaatgctgctttgggacctcccaccctctctccttagcgtccccagctgtgggtctggcttggagttggagggtgagcctctgctcttgggagcagtctgtttgcaaacagggacttcccccacgtcacggagtctccgcagctctcctcggttacgagggctggtttcaggctcccgctcttttagagctgaggcccgtcgggcggagagcgtcttgcccctgcctacctggaggcacaggggtggctgctggtggacactagggtgggcagagccgattgcctgcccaacccccgggcactcatgcaggagaggcctgtgtcggggtcacgtgcaggccttcccagcgtcctccctgcccgctcggtggatggcagcagtaagcagagccctggggaggctcgcagggctgctgtccctctggtcaggagaaggctggttctyggaggccacgtcagggccagggcctggcccagccccacatccagcagccccgtctgtgtcctcccagwctccgccgtggtcatggaggagggaagtccgggcraggttcctgtgctggtggagcccccagggttggaggacgttgaggcagcgctaggcatggacaggcrcacggatgcctacagcagggtgagtgtggctcagagcctggaccctgctgacctcggggggctccttaggggaggcagggctctgcgtgggtgtgcctgcacyctgggaactggctctgaacttgggggagatgttcttccacatccctcgtgcacagacggtctgcactttgcagccatccacctgggccggccctggctgctgggcagcctgtggtctcaggggatgctgatacctctgctcacgcagtgtggggcacagctggtggcagtgctgctgcgtcaacgggcgggggccgtagcctggtgctcgggctggtctgtggccctgggatggaggacagatagggcctcaccacctccaggtcaaccccaggtgggctcgagggtgcctgctgacaggggttctctttgggatggtcctttctagtcgtcctcagtctccagccaggaggagaagtcgctccacgcggaggagctggttggcaggggcatccccatcgagcgagtcgtctcctcgkagggtggccggccctctgtggacctctccttccagccctcgcagcccctgagcaagtccagctcctctcccgagctgcagactctgcaggacatcctcggggaccctggggacaaggccgacgtgggccggctgagccctgaggttaaggcccggtcayagtcagggaccctggacggggaaagtgctgcctggtcggcctmgggcgaagacagtcggggccagcccgagggtcccttgccttccagctccccccgctcgcccagtggcctccggcccygaggttacaccatctccgactcggccccatcacgcaggggcaagagagtagagagggacgcctwaaagagcagagccacagcctccaatgcagagaaagtgccaggcatcaaccscargtgggcctcttgcttccgggcggggctcctgacacctctcctgcgggaacctggtgcctcacttgccccaggccgagcgggctggggtggggtcctcgcctgtgccctagggctggctggaacccctgggagggcggtggagtgggagatggccaggctctgtgttcctccctgtgggctgtggctgccctggccaggccctcacctgggtgcccaccatcccctccctgtgcagtttcgtgttcctgymgctctaccattcccccttctttggcgaygagtcaaacaagccaatcctgctgcccaatgaggtaggcgtggcctccctctcctgcatccgctggagctgtgtggytcrggtgaatggtggggggcccagctctgctgctgggagctcaggcttrcagagggctctggcctaagctccctgtggcagcctgccgtgaccggcctgggtggggcggcctcctgtggacgggcgtctggggctcaggcagggctctgtgtgccacagtcacagtcctttgagcggtcggtgcagctcctcgaccagatcccatcatacgacacccacaagatcgccgtcctgwrtgttggagaaggccaggtgaggctgcggggccggcctaggtgcctggacagggccagctgggcctcagcctgcagtgggtagggagtctgggcccccaacgccccacagagctcaacactgccgggtcccctacagcatgaagtgctcattgagctctgtgccaggtgctgctctgagtgctggggaccccggtgcgagtgacaggttagcgtgggagcacccggcacaccaaggagtgggaaggactgggcgggtggcaccggtcgcagggctggggagggcgctgttggtcagtgagctgacagctgagtggtgagggagcgggcagggggagcctgcataaggggtgggggcatcccacacaccagcagcgggggccgggcgcaccctgcccagcttgagcactggtgctgggcgagcacgggagccgacaggatgggcagcctcagcgccctataggctgcaccttcatcccaagggaaagggcagggcctgggctgcttctgagcagagggcacatggcctgactccgcccagtctcagtgagtccctcctgctgtgtggctcgaggaggtgggtggtgatggttcccgtgggagtggggtaggcccctgggggcaggctgctgaggggccagggccccgggtgtgctttgagtgtggagctccctgattttgccggccaggcacacacggggctgagggaagagagggagtcaaggatgacacccgatgtctggcctgggtggctgctggaatggatggtcttgtctgcctcagggatcagagtggggctcccggcagagcctgctgggcacccccaccctctgcggggcagggcccggccygggagtgatgccaccctgcctctcccctctccccacagagcaacagcragctcgccatcctgtccaatgagcatggctcctacaggtasacggagttcctgacgggcctgggccggctcatcgagctgaaggactgccagccggacaaggtgtacmtgggaggccyggacgtgtgtggtgaggacggccagttcacctactgctggcacgatgacatcatgcaaggtacggcctggcgcctacccgctcctgctgccccaggcctcagggcacggctcccatccagtcctgctaccccayrccctggggcatggccctggcacccccacctgctccagctccccacgcctcaggttccgagcctaacagcgtgggcatggaggcagtgatggggctggtggctttgcgtcccaaagccctgcccctggggagagccgaggaccactggccaggcaccagaggacgtggyccccgcaggcccccagagcccctggagtaatcaggaggtgccccagtgcaaggcacagagggcctcagcactggccccacaaacccatccggccctgctcaccctcagccgtcttcyacatcgccaccctgatgcccaccaaggacgtggacaagcaccgctgcgacaaraagcgccacctgggcmwsgactttgtgtccaytgtctrcaatgactccggtgaggacttcaagcttggcacyatcaaggtgagtgaggggccgtcagtgaggctgggccccaggcaggtgcccactgctgtgtcccgggttggtggcaggtcctcctccctgagcttcggtcacgaggagcaggaggagaggccgcagtgctcagggccccgtgggcacgagcttcaccccgagcctgcgttgtgtcctctgtgccctgaagcctgtggcgcctgctgctgagtgtctgtcaggagtaactggcaagtgcagactgggtgtgctgggtgggcacagtgtagttggtgcttcctgtctgtccggcgcggcccttgggcccccaccatctccccagtggcagctgtcaggctgctcagttggttatcgccacgcaccactaggcagcaaccagcgtcaccctcttcctggaggtgggctgggtcggccagtgtcacagcacggtccgggtgagccccagcatggcggggagagctggcatggcccaggcagggcagataggctggaggcctcactccaagggccccaggatgctgaggcagccactgaaccaaaaccccggggctggtagtcagagtccaggaggggcaggagcatagggaggtgggctctgctagatgccaagacaaccagttgggggggggggggcacctgggcggctgaggagggtgtggtggtgccgagatggggtgcacggctcacttcatggctgggcagacggattcggacgtgtggctgcagacaccctgggggccccagtgagtggaggtgccccagcaattagaggtgtcttgcctgtggctgcagcatatgtgggtgctgcgcccagatgtggagggggcttggcctgggggaggccagacaaacacagccccgctgccagaggggaaagttcaggggcagatgctgcccatggagctgacaggtgtctagcagtgcaaccaggcagtagccgagatcagccttcagcacacgctgtgtgcggggatgaccctttctcttgtcygggcagggcyagttcaactttgtccacgtgatcgtcaccccrctggactacgagtgcaacctggtgtccctgcagtgcaggaaakgtagggccgggtggggccctgcagtgcaggaaaggtagggccgggtggggccctgcagtgtggcgccaagagccctgggcctggcgtgaccaccaagtctccccagacatggagggccttgtggacaccagcgtggccaagatcgkgwctgaccgcaacctgcccttcgtggcccgccagatggccctgcacgcaaatgtgagtgggggtgggtccaggcgtgagctggtgggacaggcccaggtgccacctgatagtgagctcaccccctgcctmcgtccccagatggccycayaggtgcatcatagccgctccaaccccaccgayatctacccctccaagtggattgcccggctccgccacatcaagcggytccgccagcgggtagggaatatggggctccctcagcggggtgtgctggctgcccaagctgtggggcgggtgtgtgggcagagyggttgccaygcctcccagacttastgcccaagccgcctctgccttcagatctgcgaggaagccgcctactccaaccccagcctacctytggtgcaccctccgtcccmtascaaagcccctgcacagactccagccgagcccacacctggctatsaggtgggccagcggaagcgcctcatctcctcsgtggaggacttcaccgagtttgtgtgaggccggggccctccctcctgcactgrccttggacggtattgcctgtcagtgaaataaataaagtcctgaccccagtgcacagacatagaggcacagattgcagtcagacagctcttttattgacttygtctgcttggtgcgggggttgggggggtgtcgaggctctagaagcggccatgcccacagaagtggtacacagaagcaggcacagccagctccgagggccttgaggctgcctgggccatacagcacactcgcgcgtgcgcgcgcrcacacacacacacacacagtcaccttcctccaccctgggagccagcccccaggaggagtcttttcctctaaccaccctggggtcctctgacatgcctagtcctgctacttgcccagacctgatgccagcaggcctgggcgctgctctcttgctacctggcctggggcmagggaggatgacaaggcctctggggtgatgagagtgcctggcagacagctgtgcccccagcaccggcccaaggccawgctcgcatccaagcagcagccgggctgccataacgccaccacacctaccaagcgcassaggtgttgggggaggccagctctgggcgcaggcccctcagccctagtgaaaatagtgacatacaaaaatatacacattttaacaccatataaattactgacacgagacacacagtgagacggtgcagggagtacggtaggaactggagaggtaataacttaggggcagggtggcggcggtgcaggctaaccctccctgaagccagcagccttagcagtgggggacatctgcccagggggtggggccgggcacagcccgctgtacctgaggactcggggaaataaattagcatctcagaggctagaaaccgtccaatactgctgtgtccttcccaagggagctggggaggggaccctgggtcctggttggccacacagcctctttaaagtgctgaagcccacagacagacagatgcccctgcctgctcyctggggaacctacgtgcagccattctgcctggccctcggccttgacagcggcagaaagtaatactgagcggtgtccactcygactccacggcccacccccgccaggaaggaggactaagtgctgctggggtggaccttgttcttggccygaaggggtgtcctgctggggccagtggccaggtccacaccccgactggcccrggcaaggcggctgggcagtgctggccgcaggcccggggatgggccacgggaagatccggcggrcgcccggctgctcctgcggccttgcaggctgtgcagctgctgctccagctgstagacgtcctctgtggcctggttgagtcrgtcaaackgggtgagcagggcctcgaacacggcttggaggcgggagggctcrggctcacaccttgtccccagccggcccaggctcacgctcagcccatccagctggctggaggaggtggaggggtgcgaggcatcggagccagcgctgggtgggggcacatccggggataccttggagcccctggaggagcgagagggcagcggctccatcccttcaaagcrgactttgtggcggaactgggggcggcacaggggctcagtcagtccggctgcaccctgggcagagcccagggcgtgtccctctcccccccactgggccgtacccacctccttgaccttgctgaggcccatccagaggcgcarcctgcgcaggaacaactccaccatctcstagtcctrgggctcccaggccggccggtacagctctccacgcaaggcgtggtagcgccagcggagaataacagcccccagccgtagggcgccccacagccgcagygcccagagccccacwcacagcaggggtgacaggtgccaggactcggcaggacacagggtagagagcccagtcccaggrcacagcaccaacagggcctrgrccacgctccagagggagtccacacaggaagacacgagctgcggggaaggcgacaccagtgagggcgtacagctgagctgagctgagctaagacgccctccccggccgcgcagtcacctaccaggayggccagctrggcktaggctaccccgagcaccaccaggyccaaggtgacccycaggagctmtggcagagctcrgcataatgtcttgccaaagacggaccactggcgcacgaagcgtasstgctgggcagcctgcggacgagaaatctgtctkcttgcagccctggggtgtgcgcccagccccgcgcccaccggcccagccctcaccttgaccaaaagcaggaagagcagcgaggccgccaggccacgggctgcggagctcasstgcgccacctggtcgaagctagtgaagcggcgcgggcggccgcgcacgaaacgggtccactggcggtcagcggcacccagctgggcgaggcgtaccagtgccgtggccgccgtcagcgccaccagcagccaccgcgcccaggctccgagccgcagcacgcgccagcgcccttccctgtgccaagtacgggcctcggccacggcgaagtgcacggcgaacagcagcaggcacacctgtggggggcgcggtcaggagggcgggagggacgctgccggggcggggccctgcgagggggcgggacgctgccggggcggggccctacgagggggcgggacgctgccggggcggggccctrcgagggggcgggacgctgcgagggggcggggcsctgcgaggggtgagacgctgccggggcggggccccgcgagggggcgggacgctgccggtgggaggcgcggggtctggccggggacgggcgtaccgaggtgagcagaggcagcgagaggcccgcgctgaggcggcgcagcgcaaaggggcggacgctgagggcggccagggcgcggccggccgccgggaactcgaggcgcagcgtgacggcggcgtgcagccccacggccgggctgtagcgcgtgagctccrggaacacagcgcggctcctgcgcagagggtgcgggtcagtaggagcgggtggcagggcgggagctgcggggaccgcgcagtgcaggcgtggctgaggggctgtggaagccgcctaggccagcgggggccggaggagtgagggtgggctcctggctggtgactgcggccaccccggagagggcaggggagggagctcccacctgttgtccagccagttgtgcagctgcaggaagcgcagccggtcgcggctctcctccaggctcaggcccagctcctrcacktagcccccgctgtcatacacggcacaggagscccaggaccatgccctgccggagaggggtggcgtgggtgccgcaccccagcccttccggcaccccggagccaggctggtcaggaggccgcggcactcctggagaactactcccttgtccttggcgtagacgcccggggccctcgctctgctcaccccagcagatccggcgctgaataggcccacgtccccgagccattgtgaggactctcccagccaacgtcstaatcgctggtgctgaagcctcctgcggccgagcacgtgtggaccctggggccgggagggtctgggtagagtgctgaaacacacagagccccaggccggggccagggcctcatcaaaacccaacaggagtgtttcctgctggccagctcgcctgagctctggttcggcgccaccccagggaaccctcccagcagccatcaattagacaacgttaccatctctcatatacagagaagraaacggcggtgttaagagggcaaaggtcacacagctagggagcagggctgatgccagagctccgctaaaggctgctctctcaacaagaggaacgatttaagtcttggggcacgccctgccagctcaccttcctgcagccrcacctgccgcagccgtgggggccccagctctgggctggactggttcccgtggacgtagggcagcagcacgtgggccatccatggccagagctcctcagacctgccacagcatcagtcacacgctccagcccctactgccccatgcccgcctcgagtgagcggccaccagagacccagggaacatggytcccactgccctgctggccacggctagacctgggcttctcagccttatcctggggatgttctggggcagacagttgtctgtcatgggcccgtcctgtgcactgcaagacacggacctgtgtccctcccctctgcctactgatgccagcagcacctacctccagttctagcagccacaaaggtatctacacatgtccacatgtcccctagggtctggctggactaaaggcaaaactaaagcccagaagacagaccagtgcacyggatgcccgtacygcgtgatggccaggaaggcccggctgtgcagctcctgcttgatggcgctttrcagacggtaggcgtgcccatgkcatgaggcatccccatagctggccagcagggtcaccagcagaaaaagcrtgtacaccaggaggctctggtggacgggggggccctgtggtcagcctggccccagcccacagtgacagcagggctttggcaacggctggagccatggctgcggcaggtgtggctkcaggaaggtgagctkgcagggggcgccccaagactctacctggccagggtaatkgsagcacacaccctgcccggaaccccacctgggggcagacacacaggccactkcagtggtgcttaggggccttcagggccaggcaggagtgggcattggagctgggccctgkcagggactggggcagcaagtggggggcgtggggtaggagggagaccgggcaaaggctgcagagcattgaacccctaagggccttctgaggtgaggaaagggggacaggagtgtcctgcgtgcatgggtgggaggtgggagacaagagacggaggtggcaggggcacaggccgcacccaggctcacccgcagcatgccatgtagcctcttgaccttgcgggcttcttccttggccaggaagagtgcaaagccgtggrgtggccgtacgcggggcacacgtgcgctcacaggcgtcacagccgggctstctaccagggtgtcatcttcatccggstgcagccgcttggccaccagtgagaagtacagggcttccagcaagacctggggagggggtrgcttcagaggggtcccccgtgatggaggcctgtagcctacccctggcagccccctcaccttcagtggctcccagcygaggaatgaggccaggaagstggcgctgctggacaggagccacgcaacactcacgcccggggggaagctcgcacccacccaccctgagacagccacagccacagccaccaggagcaggctgagccygtgggccagggaggcacaccaggccggcagcaggyscttccgcagaccctccaccagtcctggggaagcagagacagacctgtkagaggcagctcacagggaggggctaggggcatcccggggctacgcaagcacacctgtcctggacagcctcgctgcctggggctgttcccagttcaggcctgggctgggtggccccagctcccccagcctctrcagcrccagcgtctctgtcttctccccaggagtgctggacctgagggacatggtaggctgtgaattcatcccggcctccaggaggcagttgcagccaagcccatgttaacctgggcgggcagtttctkgagcctcttgggtcacagggtccccccgacawaawgccggaagaccctaccccaaacgagagtgggagtggtgctgggagccagggaaccaagagccactscaggcaccgaagtcaggcgtccgcctgcgtccctctcccgcccgcttgctgctgataaacccatcgcccacagcctgaccagctgcccttacagcagtgcacagtctctcagggtgcaatgagccccccttyaaccctgcaaactatgattgggtytcaaccatccaacaagcatctctacaatctagagacgccagtgtgtctgtcccatgcaggtttatggcctaaaattaacttctggacaaggaaacatatgaatgcctttcaaatcccaacagtgtgtagggctccctgaggccagagatctgcttgtgtctccaggagccagtgaccaccgaggctgtgccactgcatcgggccaccatgctgatatgcccggtcccagagctgctagagaagaggtacagaggcagcgaagacacgttgagggggaggacgagaccaactgcgagacgccgagtcccgggctctcaggacgctctcccgtacctgcrccctcgtcagcccatcaccgaaagaacggcctgacccagggtcacactgcactgaatgcttcctgttttgctgtctctcggaggataaaagacactcttggctgggcgcagtgtctcaagcctgtaatcccagcacttcaggaggctgaggcaggaggatcacttgagctcaggagttggagacagtgagaccctgtctttacaaaaaattaaaaaatgacctagcctcaacttkgtcaggcgtggtggctcacgcctgtaatctcagcattttgggaggctgagatgggtggatcacgaggtcaggagttcaagaccagcctggctaagatggtgaaacctcctctctactaaaacacacacacaaaaaattagccggctgtggyggcgggcgcctgtaatcttagctacttgggaggctgaggcagataactgcttgaacgtgggaggcagactttgcagtgagccgagatcatgcgactgcactccagtctgggcaacagagactccatctcaaaaaaataaataaaaataaaaaataacccagcctcaactattcctttatagcaacacaaatgactcagggtctgactcagggagcaggctctcgctggcagagacggagaatggccaatagggaggcatggagtggcagggaatgccagggcagaggcgccgccaggacggagggtgcaggctcaggcgcagggaaggccgtgctctgcgttgggaaaggagccacgggacgcgctggaggctgcagtgaggaaggacgcagaggggtccaggacaaacccaagcctccgacctggtcagcccgaagcactgtccgagcaagggacggccaagggttgaggaagccgggagggtgagggccacgcgctctgtgtggmtgcggagtctgagctgccgtcagaaatccccgcggaagcactgaatctggatttcacagagctttgggccggagatacctggggctggtcagcatgtagtgactacccctggatttccccatactctgtatttttaaaaccaaccagcaatttattcataaagatgccctcatgtgatggttatctgccttttgtaaatcaggaagttttcctttttgtttgagtccaggggcagttcatacctctttagttcttggttgcttaacaatgagaagcactcaaaggaataacacacaaatcaaactagatgtggatgcaaaagcagcagtcacgcaccacttagtgccagggatgtgttctgagaaatgcgtcattaggtaattctgttgctgtgcaaatgtcacagggcgtagttacccaaacccagacaccgcagcccctgtgcatgcaggccctgtggtgtggcctgtggctccggggcaccgcacctgcacygcatgccactgcactgaatcctgcaggcagctgcagtgcaacggcagggccgtgtggacctcagcacacctgagcataggagggcatggcagagcccggggtcacacgcgtgggaacacgccgtgggtgcgctccgccgccggctgccatgtgcgtgactatgtgcgtgactacatacaaggtaacctctatatgaccatttgttgataagttacaaaacaaccaagaaattgaggaatttttttktttttgagacggagtttcgctcttgttgcccaggctggagtgcagtggcgcgatctcggctcactacaaccttcacctaccaggttcaatcgattctcctacctcagtctcccgagtaactgggactacaggcgcctgccagcatgcccggctaattttttgtatttttagtagagacggggtttcgccatgttggccaggctggtctcgaactgctgacctcaggtcatctgcccacctcggcctcccaaagtgctgggattacacgtgtgagccaccgcgcccggccaaaaatggggtatttaaaaacccgcccataatttctcactgctctgagaccaagataaaaacgtggccccggccagcctcacacaggagcctttctgctcctacaaagccccatgagcctgctccctccctagagggaaggttctggggccctggggatcccatgaggctctttccacagacaacagaggttcagagaagtgaagtggtgcagccacagccctgccctggcaccccaccccaccctaccccaggcgggaaccacggctgcctggcctgagtcccggcccctcctctggcaatcccccctcccccgagagccggacactcacaggctgctgagcaggtccgtttccatgtgggtgtcttgggtaggggctgggctgctgaccccctcggcaakgacctrctrgatcaggtcttcatctagaggtacaggaggcatagggtgggcccagctgcaagggtgagcttcagagccccctcctctcaccccagctcacctgatgctgagaaggatttggcaggcgagtaggggctrgccagggagaagccgtcctcctctgggcccagcccatggcccgcctggccccgtgccagctgccgcagattgctacccacaatggacgggtcactgagcaggtccggccaactgagcgttccctcgccggagggccagcacascagactgcaggtggcgcgggtcagcaaggtaccaggggatgtgtcacacacacagcccacccccgtccagtcacgcacggacaccctgggcttccgagcaaacctgctcccrsgtggtgtgaccacatggagccacagacacccagcaaggacacgcagcccgcacacccccggcacyccagacacagtgacctgcaccagggctcgaggtttctctagggaacccacctcttagaatcatccagaaacaagtcactcttcatctgtccarcaaaggcctgctgagaggtgcacagkgtcttgagtccaagctgcgccaaggcggcaggacccccagcccagcccaggacccccagtagagycctcacctcagcgtggaggcctgagaacrtgaggaaggagctgtccagcayggaygagtccaggcagctgtcgatgtccagcacctgctgcccggcaggtgtggggctcgggctcccagccacctgcaggacgagggcagtggtcagcnggcggcagctcagacctgctcaggacagggatgagaagccacctcctcagcagacaggacagagcccggtgccatctkacagaatgtyctagaatgctrgatatatgggacatctgcaccgtccgtgatggcagcccctcgcgacgtgtgccactgaacrcttracagcagactggtgcagctaaggaacagagttttaaatttcatattttcttttttagatggagtctcgctgtcacccaggctggagtgcaatggcgcaatctcagctcactgcaacctccacctcccgcgttcaggcgattgtcctggctcagcctcctgagtagctgggattacaggtgcctgccaccatgcccagctrattttttgtatttttagtagagacggggtttcactgtgttggccaggctggtcttggaactcctgacctcaagtgatctgcccgcctcsgcctcccaaagtgctgggattacaggtgtgagccaccrcgcccrgccawcgttccattttaattaacttwaayacgagcagccacatgtggcctctggttcctgccacggactcgggagcaacccctcctggtcgcrgcttatgcgccttctctgtgtgctgctggggttagtttgcatgtaacctcttgaggaccccacgtgtgcattcctaaggggtgcggcctcccgtttccgtatgaatgggaagcgttcccacctgctgtawtcttggaaagagtctgtgaaggattggtgttaawtcttccttaactgcttagaaaaattctatcgtgaaggctctgascctgrgcttttctttgtgggattttttttttttttttttggagacggagtcttgctccgttgcccaggatggagtgcagtggcgcaatctcggctcactgcaagctccgcctcctgggttcatgccattctcctgcctcagcctctcgagtagctgggactacaggcgcccgccaccatgcccagctaagtttttgtatttgtagtagagtcggggtttcattgtgttggccaggctggtctcgaactcctgacctcaagtgatctgcccgcctcggcctcccaaagtgctgggattacaggcgtgagccaccgcgcctggccctttttaatgttttatatagatgkggtcttgctatgttgcccaggctggtctcaaactcctggactcagatccgcccacctcggccacctgaagtgttgggattacaggcgtgagccaccacacccggcccggccaytgggacgtttctaagggactaactcagcctcttcacttcctatagatgtactgagattttcttctggagtrcatttcggragcgtgcacagccgcgtgcttgcttcttctgagttatctggcgtgctgctgtgcagtcgtccgtggcgtctgcttagcaaagtgccctcgttctttcaycattctggcttctgagtcttctctctttctccctggtcagtctagctaaggctgctcaagtgtgttgacccttcccgagcagcctttggtggacgcctttccctctggctgcagcactggaaagtggcggccctrggcatggtgccgaggcccaggctccattcccagtactcccgggtccccagccccagcccaccttgctccgggacatccggaagagaaaraggatggccaggtagacgggatagacaaccacgctggacaccaggccaacagcgactgtgtcgacgctcagcgggctcagcctggacacatgccccgtgctgtgtggaggagaggaggccacacaggtgaggctgaggggcaggaagggctgggcaggaagaggctgycccgacccctacggcacccacctgtaggcagagtcrccaacagccccgtaccacacggcgttggcgcccaggaagaggcagatgaggagaaygcagcaggtggccctctggatgcgagtgaaacggctmcgaggcggccggtcccatatggagagccagatgtgcttgtcaaagaagccacgctgcagctcagccaccagcaggcgccggaagcgcaaaagggctgcgtcgcctagaaggcagggagggccgcactkcaggaggccacggggcaggaccaccytgcccaacctyccacggagtgggamcatggaacgaggccttactcgcggccagcacctccttctccaccaggcccccgttggcctccgtctccaccgaaagccagtcattgaccaggaagaaggcgctgygtgccgtctrcaggtccctgacgatgacgtgctgcaggaaccaggcagggctgagccctgcagaggcgcrggagggaggtcaggctcgcagggcgccccaatscgggggcagaggggcagagcttggcagggtccgcacaaacctttgttgtcgtgccacactcggatcttccacacgctacccaggctgtgcggggtggcgatcyggaagawgtccaggctgttgcggtggaaggctctgtcgccrtccaggtgccggtggccrctccggctgtccaccccatacagcatgatgcccacgtgggccgtggtacctgggaggcaagagggaggggtgggaggctcggtctgctgcccaacacgtgtggcatcccaggcaagtcatctcagctttggcctgtgcgcactcaaggagccacacaggcagtcccggctttgcacggctctgccatacacaaggagctgcggttactgcaatttgtccaattaacagcaggacctcaaggacatgattaagttacatggaaagaactgtaacttgtgacatgcaaacatggctgcacacgcctcagtccacaccacaaccagtgacccgcactgcacacctgtccacgcctcagtcatgccacaaccggtgacccgcaccacacacccgtccctcagttcatgcacagactgcaaagcgtgaagctgtgtcacctcctctcccagtgacagacccaggtgacagtattttttttcttttttttttgagatggagtcttgctgtgtcacccaggctggagtgcagtggcgcaatctcagctcactscaagctccgcctcccgggttcacgccattctcctgcctcagtctcccaaggagctgggactacaggcgcctgccactacgccgggctaatttttttgtacyttttattagagacagggtttcaccgttagccaggatggtctcgatctcctgaccccgtgatttgcctgcctggcctcccaaagtgctcggattacaggtgtgagccaccgcgcccggccgacagtttttaaaagtaggtaatcaaaagaaagaactgggcaatgaagaggaaagcagcacagagataaaaaatgggaacacagccaggtgtggtggctcacacctgtcatcccagcactctggcaggccgaggcaggcggatcacctgaggtcaggagttcgcctggctgacatggtgaaaaattaactgggtgtggtggtgtgcacctgtactcccagctactcaggagaatcgcttaaggggaatggcttaaacccgggagctggaagttgctgtgagccaagatcatgccattgcactccagcctgggcaacagagtgagactccgtctctaaaaaaagaaaaacgaaaacaamaagggaatgccagaagggcaattccaatgaaaggaaaatggaggtactgaagaaacagccacggkgagggtgctggcrcctccgtctgagagacgagctatgcagtcaggatcgcgggtggatgcacagtctcccacagtggtagygatgctcaygtmacttgtggggcyacgctactgtgyagaacgtgggctgcccaccctgactgactggcacctacttccagctaggagctgtcctagtcctcagggacagtgagtgctcacgaggtcattcccaggatgaacacacgagcccttcacacagyactgcaaaaactgccttgttctgacgyctgcgacgagactcaytcccagagggtgcaaccagcacagccagtgagagcaggggaggccctgccaccccgctgcgsccctcacctgagccccggccccagcctgtcttgacgaggatctcgtacttgaagcggccccgctgcccacasaargggatggcgcggccccggctggcatccaactggtccagcttgtgcaggatggcggccatgaccatgtaggtcaccaggcacacagcacatgtcagcatgacgatgtagtttacatccgctgtyggctcctgtgaggacacagccgccgggcccaggaggtcacgtgcaagctgtgccttctcaggatagagccgagcccacccaggccctcctcgactctgcagaggctcccaggagcacagggtcactcacaggaarsacaaagcggacatggcttgggggcacgaagaggctggygccgaaggcggtgaggtggcgggtgaggcagacggcctggcrgggcgaggtctcctccaggggcagcagcccctctgtccgccacaccayrtcctcctmgctgaagtacyggcacagggacgtgtacargcccasggacacctscagcgccgacyagcggaagtggctggagaggttcagatggtaactccccgctgggtctcygctcctgggmagggaaggggyagcggacgtgagyccaggytccgcmaggttggatrtcgcagtctyagarcccatacccggtccagtcccctcgctgcctgccgtccccatrgggccygtaacccaggcaatgctgacccatgatgccctgccctgccctgccaggcyggcccrcagagctcaccccggggaaatgaagaaggtgtagggccggtggtcagcaccctrgagkgastctgggcggatcctcctgctagccgagcagttgygctcattgggccggggctccgagtgyaggtagactgccaggtagggctcaggttcctcagacaggtagyggcctggggcagaacgcgcaggtcacacgcctgcygggaagctcaaccacccgggggacacccacgatggccctcctgagcccaccctctgccacgggcctgaaaggccatmggagcctctgcaccagagctggcacctgcttctccgtggcccccagctcctytytggccaggcccccarcagcccatgaaacagaaagcaaatttcaccagagacacccatggaagccctacgrgaaacgscttccccccaagaacaaggccagggggccgcgtgtgccccamccgctgcayrcaccgtccagcagcgtatagttgagctgcagatgcagcmcggccrcagggttgctgctgtccagggtgaccacagcaccgacggaggcctggggctrgaccacaacggagttggcggagttggcggagctgcggtggccccgggcagcccagtccgagttgttgggcaccttcacggtgatggcgcgctctgaggccagccgctcgatggggatctgggcgcyggcctgtgtctggaaygccatcgaggccaccttggtggagacggtgtagttgctgatatagccaaagrgaaagggattggagtccaccagaaagrtgagctgcaccacgtcactgaggttrgccrgggccccgctgaaagcctcggggatggagaagtggcagccaggccctggggcgccgccatagcacagcaggctcygcgggtccgagcgcttgycctgggccacgatctcctcrcccgccagygtcaggggctcctygttgagcaygcgggagcgcrtgasgatgsgcrtgagggcagaggtcaggttgtagkcctgggacgccaccatcsgaratggtgactcggctcccagctctgagggctgyggtgcccgcacgtccgagctggccaggtggatgaggtctcctgcagacatgcgtgaggtcagtgcagagacagggaggtagagggagggtgggggcaggcaaaaagggggagccggagggtgggggctgggagaaagggggaacctgagggggcagagagcgaggtgcaggcagaaggaagggggaagctggagagagagtggtggaggggggagggggaaggtgatggggatgaggacgaagatgagggggatgatggggagagggaggaaaaaggaaggaaaagggtagagaaaagagaagggagaagaagaggagcagggggaaagggaggggaagggggataagggaggggaagggggatgagggggatgaggaagatgaggggaatggacaaaaggacggggaggacggggggggaaatggagaaaaggggagagagatggagaaaagggatggtaatagggaagggggagggggaggagaatgggaattgggggagggggatgaggatgggaattggggggaggggagggggacgaagatgggatggggcaaagrcgacrcggttggggggaggagggaggcagaggaaagggccscacggggcgggcgggtggcrtggggcacggrccgcggcacctgtgatgttgaggatgctgtctccgatggcggtgggcgtcacggtgcccgcggtggtctctgcctgcaggatgmgcatcatggcctccagcttgtgcagcgtctgcttcaggcacgagcggcatacgagctccctgctgggcccctgtgtggagccagcagtgtccagccccgctcctggccccactccttgcacacgccctcctctctacacgggtcctcacctggctcccacccccagccctgcagctggagagcccacttgactggacccccmcagyctcctcactaagcattttytgtggctctgcatgaccsasggcctccacctggggaccacgtgatgcagcccacygaccacacaaggcacctcttcacatgagagcggaggaggaggggagagaggagaggggagtggagaaaaggggggagaggagaggggaggggagagaagggggagaggagagggaagggggagaggagaggggaggggagagaagggtggagaggagaggacaggggagaggggaggggagagaagggggagaggggaggggagagaaggggggaggggagagaagggggagagaaggggagagagaagggggagagaagggggagagaagggggagaggagaggggagagaagggggagaggggaggggagagaagggggagaggggaggggagagaaggggggagaggggaggggagagaagggggagaaaggggagggaagcggaggggaggggaagaggggaaaggggagggaggaggaggggaggggaagaggaaagaggaagaggggagggaagaggaggagaggggaagaggggagggaagaggaggggagggaagaggagggcagggaagacaaggagagggaagaaaaggggaggggaagagaaggggaggagaagagaaggggaggggaagaggggagggaagaggaggggaggggaagagaggaaggaagaggaggggaaggggagggaagaggaggggaggggaaggggagggaagaggaggggaggggaaggggagggaagaggaggggaggggaagaggggagaggaggggaggagaagaggggagggaaagaggaggggaggggaagaggaggagaggggaagaggaggggaggggaagaggaggggaggggaagaggaggggaggggaagaggaggggaggggaagagggaaaagaaggggagagaggaaaaggaagagaaggggagaggaaaggaaggagaaaggagaggggaaaggaaggggaaagtggaggggaaaggaagagaaacagagaaaaggaggaggggaggaaaggaggagggaagaaaaggggagaagggaagggaggagaacaggggagaaggaaagggaggaaagaaagagagaaagggagggaggacaggaggggagaaggggaggagaggaagagaaaagggaaaaggggagaagaggggaggaggaagggaggaggagggaaaaagagaagggggaggggagaggaggagaaggggaagggggatggggagaaggagggggaggagggggaaggagggggaggggaggaaaggaggagggaaggagaggagggggaggggaggagagaggagggggatgaggggaggagaggagtggggaggagaggagtggggaggagaggaggggggatgggaggaggggggatgggaggaggggaggagaggaggagaggagaggaggggaggagaggaggggagagaaggggaggagaggagggggatgggatgggaggagggaggaggggaggagggggatgggaggaggggaggagggggcatgggaggagaggaggaggaaggaggggaggagaggagggggaataggaggaggggaggagaggaggggggataggaggagggaaggagaggagggggatgaggaggggaggagaggaggggggttaggagggaaggagaggagggggatgaggaggggaggagaggagccgggaggagaggggggtgggaggaggggaggagaggaggggtaatgggaggaggaaggaggggaggagggggaatgggaggggggaggagggggaatgggaggaggaaggaggggaggaggggggagaagagggaaaagaggaggaaaggagggaagaagggaaggatgaaaagagaggagaaggggagaagaggagaaggggagaaggggagggaggagagaaagggagggaggagaagaaaggagcggagaaggggaggtgaggaggagaggagggcagggggaggagggagaaatggaagggggaggggagagaatgggaacggggaggagggatgggaggagggatgggaggaggagagggggaggaggggaggggggagggggaggaagggaggggggagggggaggaggggaggggaggaggggaggagggaggaggggaggaggaggagggggaggagggaggagggaggagggggaggaggaggggggaggaggggaggagggaggaggggaggaggggggacaggaggggagggggaggagaggggaggaagggggaggaggggagggggaggaagagggagggggaggaggggagggggaggaggggaggaagggggaggggaggggctaggggagggaggggctgggggacgagtggaggggctcagcgggaggaggtgaggggaaggtctaggggaggggaggaggggaaggggtaggggaggggaggaggggaagggctaggggaggggaggaggggaagggctgggggggaagaagggaaagggctaggggaggggaggaggggaagggctaggggaggggaggaggggaggggctaggggagggaagggggaggggaggggaggggagagtggagggcacagagcagcatcttcttagtccctccccacatctgggcccctctttacaccctgggtcccccgagaggcaccctgcgttcacacaggacagaawggctgaggctactgaagcaggtcagagaccgaggaacgccatggcakgaaggagcccaggctggaggctcagctcctcggccaagctgcccgtctgccctggggggstgaacccagtgccctggcaggcatgcggggcrgggwgagcaggtggggccatcctaccatgcactgggccagcgcagcagcgatctgctggatgtcatccacagtgtggaccctcagggacaccagartctccgtgatgttcttgcgtatctgggctcrgygctgccgctcgtgcttgggctctgccgccacgtccagggcccgctcgtactggggcaggcaggsggcacagcaagctgtcagcagcgcaggagrccggcaggaggccagcagatgcccacgactcccggggtgcagttacgtgctagacgctgtgtgatgcgggcaytgacccacaacactgagctgtttcttcatgggcaaaacagggtaagcacatgggccctcctgggcgggggctgcattgtggaaagcagacrccggagagggcccggtgggtgtggctgctgggagcggaaggtcggggtgctgcttcagggtcactgggatttatctctggggcccgggatragccctctgcaaagctccaggcaggggwacaggtcttggtcccmascacgcatgcagcagatgtgacgtcccctsccaggctgcactcacctcgttcagcacggtgaccagggccaacgagtactcgatgacgwgctggggatcrgcctgccgcagcagcccygggagcacactagcggtgagccsgtgcagccagactgtgagccccrttgcgctgccgttgggctctgggagggtgatggccaragacctaygagcagagsggggtggtgagcaggtggcagtctcgggggcgccctcccacggcctggctcacctgttgagggcgaccacagcggctcccagctggtcctgcaccaccacggccaggcccacctcgaaktgtggcctgaaacccgggggcagcacggctccgtagcyggagaggctgcycttgtagacacagaactcytygcagtggcccwggcrrcagcgcygcagcagcagggcrtacaccagcggggcgccagcatcctccgcgtcatgccagcctgagggayggtccccacrgcatcacrggagggctccgtgacstcacagagtcgggggatcccgctgctcccccyamgcaggcctgyactcacccrtgcattygaagtgcaccttggtggtgagrgcgtgcacagcgccyartgggaagasgcrgcaagagccccccagcrgcgggcggttgggggacaggsggatggaggcgcagccctcctcctcrccagagcggcccagcaccgtsagcgtgaaggtgtatccctcgccgtcccgcagcacgccccgccgcagcaccagtcrcatgcctgcrctgcccgtggatgtggtggtctcatccagcaccagygtcttgttgctgaacgtacrtgcagcccaccgctgyaggyagaagggrtggtgagggggcgcaaccctctgccctgtcagccccacttytgcctgcaggccccgtcccctcggscatgggacccatccccaryccgcccacaccccgytcaacactcacccctcrcttggagccgctgctgcaattgargcagcggccctccargtacacgtaggagctgcggctcacttcgtacacggcctrtgccttgcaggacacwcactccaaggacacaatgggcacccggccactscggatcagcacctggcgtgggagtggggttacctccaacacaggtctatttggcctgctggaaggwctgggggacccrtggaggatgctgctcccaaactccaggtttcccaggggcctggccactgccggtgagctcacyccctcccaggatactcatccggtttgccaccttccaacytggrcggcggaagggcatacacagggcagaggacactggagtgtgygttctggtgtactggasccagctggaccctrrcaggaggcaggcaatgctcactgagggcccctggggggatgcgtgtgrgaasagacgtatgtgkgggtgtgaggaccgcagytgccacgtaggcctgactcacagactcctgcagcccttagccagggcctgggtcaggaggctgagcygggatggaacctgctcccacaccctcccctcagacgacccctctgggaagacccccaatcaggccagctgaggraagcagggactggggaacagacrcccactctggggcaccagcaggccccgcctgacagcagcaggagcagccaccacgggctcagggtcaccaagcctcctggccggtccagagwggggagcrtragggtgagaaccggcccaccacatccagcaacagggacatgggctggggacagtggctrcctctggggtgggaaggggctcttcctcactgttggtattgctrggggactgtgtagcttttgycactagagcatatgtggcttgaagactgtacgtggaactgtggcaggtttggaaggaagcaaagctgaagcaggctgtcgtgttacrtagaatttgcatcagaaacagagagggragagcgtgcggcctccaccagcactaaaacacggaaaacagtagatgaccagggaggytgggctgtccaaggcaagtggccgaggggcgggcggcacccaccgtctggttggtggcctcctccttgcggccggccttccacacggtcaggctgaaggtktmctccacgccagcygccagccrytcccgtggaatggtgaccgtgctgctcccgcggggcccaaagttcagcgcacacccgccagcctccctctgcaggccgagaacaaggggcgacgtggccygagarccccatccagttttaaagcagagcccggcccaggagacagcgcgggagaccccctccccatgctgggacggggcccaccaggcactgaggacgggccagccctggtggcaagctgggtgttctctgggctcatgggtgtggacgggtgaggggcakggaggacggccctgccacgcactgacctgtgtcgaagccacacaggcccastggaaactgagcggcgtctggtcgccrtcctccaggttggggtcgtaggactcgctcccatccagcaccaggtccygtgtgtctsaccacacgcggtakgagccaccctcartgatgggcaccaggcgctcrggggccaccrtcacattggcctggatgctcyrtgycagtggcgtgtccccaaatgacacgacaaacacaaakcagtagtgccccacaggcagcgccagccrcggcagcaccagcygaggccggctcacgtccacgccgggcagggccacacgcgcygggcrccccggccgctggcagctggcggtgcgrtacacctcccagcggtmctcagtctggtaggtgacrcagtcgcgcaggtcaacgtgggcctccaagtagttgcgctgtsatcrycgcatcagcacctrcaggggcaggaccacrtccacctccggctcccggcaggccagcacctggacggtcaccgtggcctgcgccacgaagaagctcaccaggttggaggcgttcacctgcacgcggtagtccccaggcctcaggtaggagtgctcggccctgggctcatctgtgtcctgccctggcgacccatccccaaagtcccagtggyaggccacacgccgggggctggggctgrtggcggcctcaaactgcgccgagcggttggtgaagcaggggccrctctgcagggccacatactggacggcgtcctgaacctccagcaccagcgtgcggttctcactgcccagggcgttgaaggcgcgcacctrgatctccaacagccccgcggccacgggcgtgtaggtgacgtcgcggcccgacaggatraccagcgagtcgccctrgaccttctgcagcgagaagtaccaggcgtaggcgacccgagagccgcgctgcacgcgggctgtgaagttcctctcagtgcccgtggcgatgccaggctcgcagcagttgggcayctgcagcccactcacggcctccagcaccacgatgcgcacctgcgcctrggcccagctcwcgtggtttttgccccgcacgctcaccacgtggtctccgacgcgggggaagctgtgggagaaacggggcccggggagcacctcggggttggccccgccgacctryaggcggaaggtgacagctgagccggcagccagcaggatctgaaaatggaccagctgcccgggcgccaccaccttgctgctggcccacagcaccaggcccacgatgggctcctccgccgtgaggttgtacgtggctgagacycagctgactgygttggaggcattgagccggatggagaaggtgccagcatccgggaagaccatggtgacatgagggccacgcttgctgctgccgccgggcacagcccagcaycagctcacattggtgcccgtggccagctgcccccaaaagggcacagaggacccggcygccacgaagctgcctccgggctygctggccctgatgctgaggccactcacaggcacctgcacatccacttccacggtggcgttggctgagcccagcgggttccctgccgtcatggtgaccaagtgcaggccgggtgtggggaagctatgggtggtaaatggctcggaggtctcccagctcagcccctcctccaaggaccaagtgtatacgacaccactgccaccagccagctcggcactgagggtgacgcttktgttgacggcagctgggttcggggaggcrgycaccatcagccaccccacaggctccacgaagtccatggtgcagtcggcccaggcgctgcccagcatgttggtggcccgcagctgcacatggtaggtgccggcctcgagcacggtgagcgagaagcctttgccgctgccggccagggccgggcccctgtccctccaggcagtccagctgtaggagacgttggtgccatccctaaccacggcctrcagctgtaccgtgtggttggtggggaagtagcggccaccgcccaccacctrcagcccctctatgagctgcaggacatagacgaagatgctgtcctgggcggagcccacctcgttctcagccgtgacgatgatattgaaggtgcccacggagcggaaggtgtaagagatggtaggacccccagrgatgggcgtgcagcggtcacagagcacccaggaatagcgcacatcactgccggcctccagcgacgtgctgaagctcaygctcccattcaggggcaccaccgtgsrgcttgcattgacgacgagcccccgcacgcgccgcttcaccgtcacattgagccaggcctmgctgcggctcacctcattscagccggccaccctaacggtgaagtcacctgtgctgttgtaagcgtgggtgacctccggaccctcgagccrcccaccgtcccccagatcccacaggtagctggcggggcgcccacggcccacagcagagaacaggtacggctgctgcagctccagcccaagggagccattgaccttgatgctggtgaccagcacgggctcctgcacctccaccagggctgagtcattggcagcagagatgttgttggacgcggtgactgtcacaagataggagcctgggtctcggtagatgaacgtcacctcagggcccctggcacgggygggggcggcttcctcggtgccaaagtcccaggtgtagcggtaggggaacgggggccaggcacatgccaccagccaggcctcgtccccgagctgcacaaactgcctctctggctgcagggtgacgttgcccacctctggctccacgcagatgctggtgaagtaatgcgccctgttcacgcggctggacagcaccagcgccagggggaacgtgccgctccgcgtgaagttgtgtgtcaccgtcgggcacccccrcacggtcgtgttggaggagccatccccgaaggtccagtcgaagaggtagtgggccgggttcccggtgacgtaggccgtgagccgcgcgtcaggctgcgtggggatgcaggcggcgggttcaacgcgcagcacctccaggacgaagaccagcacgtgcaggctccgggccaggtggccggcggggctgsccgcacccacggtcactgtgcagttctgtgcccgcaggtacacatgctccactgttgcctccgggcccgacagcacggtgccgtcccccatgtcgaaggtccacgtgatgttgtcgcccgtctgcaccgcggcgctgaccaccacgggggcgccctgctccacggccaggctcatgtccacgctgagtccgcggagctcctcaaagacgcgcacatccgcctgggccgccgcaccgctcaccgtgttgttgacctccaggcgcacgtggtaggtgcccctcgaggcataggtgtggttggcagccggctggctctgggtcaggacaggggagcygtccccgaagtcccacgtgtaaagaacacccccaggcgagggcagcgggtgcgggtagaaggtgacgggccggccggccaccaggacgccgtcactcacacccacagccacggagggcagggaggcgcgcacgctcacaggcacctgctgcgtcmggttctcgaaggcattagatgccagcacggtcaggaggtactcacctgtggggacaggcccgagtggggcagccgcggcacccccacctgctccccacccrctcggcagaagccccccgcctgaggagcccggggtgaacggctgcacctgcggcccagccttaagggtcccaggctcccaagccacgtgcgggacggagcacaggtgtagcagcactgagggctgcctggcgaggacggcaccgcctccaagtgcagctgcactcggggcagcagagcagcaagagccaggcccgsggagggyggggggcgcagttcaggggcccagcttccctgtccactccyccmacgcctggcccctccctcaccccagtaggggcctaagccatcagcccaggtgaggtcacagtgagggctgttggggaggaagsggggcagcttgactggggrrctggggggaccccgtgctcagagcctgaaaggmagtggccccctcaccccctcatccctcacctggggcagcgtaggtgtgcrtgacattgtgctccaccagcacctgggccaccgaggggtctggaacygggaaggactcgttgtayggaggctggaactggtggagggcctgctccccatccccaaagktccacctgccggggcggtgggasgcagtgagtgaaccgggacaggggtgggcggtggcggggcagggggtgcttgggacccagccgaggctccactctgcagtcacgccccgggcctccattcagggcccacccggctgtgctgaggcctctcccggctcccgtgcagcctcagggctcctgtgcacccagttacctcccaacagayagggaaaccgaggctcagaaaagcaaccccstgatgtgggggtccctcggctgaggctggrgctgggacaagagcctggtgcccaccccaaaccggccccygagtcactcacaggaaggccacctccacggccgagtccaccagcacgcccgccgtcagtgcyagcgtggcattgggggacagcacggcyggcactgtrgagaccygcagrccctgcatcctgttcatccgctccacggtkaygttgtagttcacggtgacgttgctcacgtggttggaggccgtcagctgcagggacaggcrtcagtgrgcccaggtggcaggtgagaggcctggccctgmttrgcgtccctccctccactcacccacagccatggcagcgtcctcgggcagcatgaagcagagcagaaggcagaggtgaaggtggagcccgcccccgccctgccccgccccatcccctcccctccccacycccgcccacctactgagagcttgaagaccgccgcgctctgataaatgacattgaagaccacgttctggaaggtcagggactgcttgtcgttgatggtccrccggaagaccatgtccgagccggcctccaccacggggctgtacctctgcggggggamtggtgtcagcctgggctctgtggaggactctgcccttagcctgtcgcctcctggacacamctcccgtcrggctggagagtcccacgcggggcacagaggagaggaggtgsccggggctctgcatgccatgrgagccaagcccgggctgggacactsactgtccggctctccagccagccatgtagtactactaatgcctcaacctctctgtgcctcagtttccccatctgtaaagcaaacctagtaccagctacaaagagtccacctctctctgagtcttctcagaccctcccggcgctcytgccccagctcctcacccagagagctcggagcagtgaggggaggcacctacactggcttacagaacccaggacaggctgcacaggtcacgccatttctgatggcccctcccaaggcccctggtgaagaggcaggtacccgcaagatggagacagccctgtcccccatgtacccagcatggtggcaccgcgggcagcccgcagtttcccatcaggggttcagactycacctcaaaagccactcgctttagccaggcgagaacacagcagagggcgtgagagactcacggggrctcgtgtgaggtcagggagcrkagttttaaattcattttgtgaaatgagacrgtggaatgagttrgcggagccrctgtcagagccgtgactttccaggaatttaaagcccaccaggtagcccgaggagccagccagcaggacctgcccggggccgacgtccccagtaactgggctgcygccctcactgggaagccaggcctcamgccctgtgtgagcaccctgtctgcaggcacctgcctgggggctggtggtggagcctcggccatactcaccactrggactccctgcagtacacgggcctcggggctgggcrtggcgcggaggccacagatgggctcctccgccgtcacccgcaggctgaggttggcccggctggcgctgttttccaccaccacrtccaycacgtgctccccctcactgagccayggcagtgctaccactgagaacagggtatcgttggtctcccaggggcagsygggcacgaaggtggccaccagggcagggcagacattctcaaagcgggcgctgasactgcccccaggccagcragccgtggccgtggcgttggcaccagagtccacctggagcaccraggctgagccgttggtgggcacgtagaggcggccgtcgcggggggcagggtagatgacccgcagcccagccactggggagaccacgtcaaagctgcaggagaggttgtgcctggacacgccattgcccacctctgcccggacctcatagcgcccaggcakccgcagyccagggttgggcctcargcccagcagcacggtgagctgttccgtggctgcaagcagccgcagggcacaggcagggcagscccaagtgccctccagctgggctggcaagtggggcagccatsacgaggcgttggcggagaggtacggggccyggggaccagggtggccgggagccggcragcagtgcrggagggcgccagggccagcgtcgtgctgcaagccaacgaggtcaccagggagcatgaggacatcctggcygtggagggtgacctgtggagagggagscagggctgcatcacgtcctcacggtcatggcccgtggaccccygcacgacggatgagggtggacacgcagggctccccgcttcgtcagccacacctcaaggagcctccccacagtgctcgtgacaaggacaggcaggacagttgcagaccgggggacacacggggagaggacacaggccaagacctggcagacaggaaggagcagctgtgctgggagagaggaagaggaggcacagctcgtgccaagggcccaggcgagagcttctcccactgggagaggsccgagggcactgcagaggtcggaggtcakaggtggcaaggacgtgggaggggcctgcaggctgggtgtgtctggtgcacagacccagaccctgggcagcagacaggaaggtggcctgaggagatgcagggaacagacccaggtcagggccacacaccgagtactgcgcggggggccccgcggsaacggagaagaggaactctctccatagcgcatagggggccccgggtagccctggccctgacgtgcagccattggcgcaggcctgggggtggcargaggygtccagcggcaagcagatgttggctccagggcaccagcgtccccctggcatgcacgcggggrccagctgggtcctgttgtcyggggacctgctctcaggctcgctgccgttctccggggtccctgtgaggaggggagggtgttggggccctsatttgcccacaggccaccgtcagagatgcccaactgyctgcaccagcaatcctggycttgctgtgaggacaggtctccccacctgggcagcactcccagcccagtgctgcgtccgtctccggccagscgactgacccaggccggcccccaggcaggccccacccaatccacccccaggacacctggaatgagctggtgtctctggaacccctgctctgtccacctaagactgggaaccactctggtggccacaggaccagcagacgtgaaagctcagagaggccaccccgagtcctgcggcgcccaccacccaccacccaccacccagagtcccacctgctgtgctgaggagccggtacacctgcagccgcagctgggcgggccgccggagctcctgggtcccaaattcggccgtggtgaggaaggcttcacggctcagacgcaggcccgggaataccatgacctggtgggcagggggccgcctcagctccacagaccccatcccagcctgaagcccagactcccccyacccgaacttcscaggaagaggggagggaaggagagcgagccatcagacccccacaggcctggctcctgtcgctcgagaggaagactccgrtggaaactgtccatggggggcaggacccctgacctgcctttcaggaataactcacmcacgctcagagaaaaggcctggrggtaatgtgagtaaacgctttcctctctgcactctggattttcccaaccatcttcactgggcacaagcaacattaaggcccccaagttttttggsgagacccacagtgggcagggcaggcaaggcctccaggggcaggcaggagggcaggttwtagaacgtggggggccgactacctccacgggctcgtgcggggctgagaggccgtcctgctgtgccagaggcgtcaggggtccctgcaggtccccactgggcgctcccacgaggaggttctcggcatcctgcactgggcctggggtggcgagtgcacagtgaggcgccgggccagggcccaggacaccaggacraacagactggggaccgagccgcccgaraacccccccaccagcccctcctcctcagcccaggctccaccgcgggcgctcggcaggcccctaaccacagccagcgtctcaggcccctgcctggccccysgcacacctccrggcygcagctcgcagacgtagctgtgcrgcgctgagcacaggtcggtgttacaccacccggtgggcccgagccggacgcagtgctcggctgtggctgggtgtggctccccgggcagccagttctggcagctctccaggctraaggcctcgccctgcggsgctgggcccacctccaccccctgcacagtcgagaagccgatccacaygtctaggctcctgggggcgggtgtgggatgscagggggctcagggcactcctccatcctcccaccctyacagsagcccrctgggagccccatcactgtccccctttccagatggggaaactgaggctyagagcccggagascagggcccaccascccaggctcacagcagcacccacccacgrggcctgtgggyacyggcagggatccccgygcaggccacctcccgtatggcgtgcccaggagtgtccggaggctgcccccagctcaygtccacctctgcatctgcagagctgacaggaacggccccaccggccggcgccacctgctcaccagggccggcccagctcccacctccytcctcctgagactccccasccscagkctctgccccastgcttcagagatctcccaacctatggcccctcggggggtgggggcaggcacctggtgacccgggagaccaggaagcgctgcacggcgggactgtccaccattgccagggyggccccggcccaggccygacactgctcctgcgcctgcagccaggccgccttctccaccaccaggcggtagcagtgcccrttgccagggaagatctccgtgtccgaggggcagagcgggtgcaccgctggagaccggtgggaaygagggtgtcaacggtcagtgtgggcccaagacgggggtaccaggctctgccccatctggatggccctggggaggaaggggagtgggcagmagacactcacctcrggccggctcctcgcccagggccacgatgctgtaggcrgcctccaggcctgaaccammrcggttctggatgctgaggtcraggctctcgtcactctgcaccgaggacgggcacacgagctccagggcggcaggtgccgcttccacctgcacgtctgtccccagcagggctgagccggyccccagggccagcacggccrtcacgtgatagcgcccaggcagcacatagmgatgcgaggcagccggcccagcggcatccacctcggsggagccgtctccgaagtcccagcgtgtggcagtgacagggagcggggcagcgatgtggaaggctgctagctggccagaggccagaggtccgtggggccccaccagggkggcccctggggaggcagggaagacgtgctrgaggagggtggggcccctacaggtgggggcaggaggtgscgggggsccggagcagagggacaggcaggcaaaggaggcactrgagggctgggcygmcccacacagkcaccagccctrctcskagagggctgcgaggccctggccggtggagaagcagaaggcgctgcaggcctctggctgaagcaggccttcgtgggcagctgaaaaggacactgctgccacggtgcctgagctgttgtcagggaggcaggcgacatactcctcacctagaagaggcagccactggaccccgggttctgctcctcctggctccaccccacgcccccacatccgcccgccgcactcacaggctcccatgctgttcccttggcccggaggccccccccagagaggccttcctgagccctgcccagtgtctgcagggcccaggtcccacctggctgggaaggacagagctgccccacccaccggcactcaccacagccactgtccagcaaggggatgccaagcagaggctggccagccagggagccaggcccagcacacgtggctgcctcgggctgcaccacccgcacctgctgctcctccgcmcatygcggcagccacgccaggccacagtcacactcaaacgggttcccactcaggtttctgcggggcaggggcaggtgttggggaccaggtctggtgggaagggtctatgccagccccccactggcaaccaggccctggagccaccctgacagcacygcctcccctgccccaaccaagccggcactggggggctccaagcaggtagtgaactgcccccaggatctggtctcaagcctggaaggggacacrgaccaactgggagggcagaagggatactgggggcctggggtccagccaggaccccacccaaagaaccacaacttacatttcacttaaattaaataaattagcaaatattccttcttctaacgtagaaatcttgttgttgcttatatccctggaagagasgggggattcggcaaagctgacggaagcccccacagctgagcagcaagaggcggtgccgccagcccacccggagtgagccccgcatgctggcacgactgggggacactcacagctctgccagcgccgaraggttcgccaggagcccaacgtccagcgcccggagcaggttgtgggagacgtctctgaggagtgartggccgtgggtcagggccagagcccytagtaggccagaggccwtccctgggcccatcccacacattkccagcatccccaagctawggcctcccacccttgagctccccactcccagaggtcaggaggggmctttctgatggaagacccaaatgaacactcatctggggaaaccaagccrggagaggcctgggggcctcagccctctgcacccatctcagccctatgccgagtgccacmtggacctgtccacccagggycaggaagggcacggacccccaacccatcccacgcagggmcaaggccccccatcccctgtccacagtcccccacagagccaaggtctcccaaccctgtcyacagcccccacacagactcgaggggcccccatctcctgttctgaacccaacagggtggtcccactgtgggaccacaaccaggtatgactgtrtgagaagcaggctcactaccaggctaccagggagcacagsggagcaggcgccacctygaggcataaacccagagaaacaagacctccaagacggccaggcactggggcacacgccggtaacacagcaccgtgggagctgagacggaaggatcgcctgrgcccaggattttgaaaccaccctgggcaacacagtgagaccccgtatctacaaaaaaatacacattagccaggcatggcggcatgcgcctggggtcccaagtactcgggaggtagaggagagaaaaatcacttgagcccagagaggtcaaggctacagggagctgagatcgcatcactgtactccagctggggtgaaacggcgagactctacctcaaaaataaataaatacatacataattaataaataaaacatcaaagaccagccgacctaactccatctaaaatacacaacttctacgcaaaatataaataaaattagaaaacaaactacaatctcagaaaagcactagcaacttasacgacatactaaaggccaaaaataccctcctgacacacagctaataaagaaaamgtcaactattccagttaaaaagaagaaaaggaaactgggtgtggtggcttatgcctgtaaacccagtgctttgggaaggccaggagtttgagaccaggatggacagcatagcaagaycccatctctacaaggaaaaaaagaatcagccaggcatggtagtgtgtaactgtagttccagctactcggggggctgaggaggaaggatcgcttgagccagggaagtcgaggctgcagtgagctatgattgtgccactgcagtccagcctgggcgacagagcaagacccggtctcgaaagaaaacaaagagaaagcaaggaaagaaagatggccgggcacggtggctcactcctgtaatgccagaactttgggaggccaaggtgggtggatcatgagatcaagagatcgagaccatcctggccaacagggtgaaaccctgtctctactaaaaatgcaaaaattagccgggcatggcggcgggagcctgtagtgccagccactcaggaggctgaggcaggagaatcacgtgaacccgggaggcgaaggttgcagtgagccaagatcacgccactgcaatccagcctggtgacagagcgagactccatctcaaaagaaaaaaaaaagaaaagaaaagaaagaaagggaggagagagagaagaaaaggagaaggggaaagagccgggtgcaatggctcctgcctgtaatcccagcactttgggaggctgaggcgggcgcatcacctgaggtcaggagttcaagaccagaccgaccaacacggagacaccctgtctctaccaaaactacagaattagtcgggcgtggtggcaagcacctgtaattccagctactcaggaggcttaggcaggagaatcacttgaacccgcgaggcagaggttgcagtgagctgagatcgcacccctgcactccagcaccccatcctgcaagagtgaagctccatctcaaaaaataaaaataaaaaaaaaaaggatggagggtgagagggagggaggaaagaaagagaaaactccaaaaacaaaaaaagaaaaaccaggcaattagaagaagcacaattggtcacagccgtaggaaaaacatcccatgtcagtagtcagtgaagaaaaagcaacagaaaccacagggcggcagcatgtctctcttttcagagctgcccgagttacaaaccaggtcctggagctggtgatgcggaggtgagtagacagagagctggggcaaaccgagaactccacctcccctcggcctcaagcacctcgggggtcactctgccgcccaccctgggcacccctcctggtcccacgcactcccagtagtgctcctggcacagggactatggctccgcaggtctgcacaccacccccctgctccccaggaccccgaggyctcacctcctgccacgggcctctacttccccaggtgtcaccctccccacgagtgacccagcaggtgcctccgcctagacttgctcttcccagcaatgaccacccggcagccagccccaagccggggsggcctccatccctgaacacccgcccagcccctgycagcctccagccctgctcctcccaccggagctccgctcccacaggagcctacccggsgcaggagagacgcacacacaggctgcccggtggggcccggggccagggcaagagcttgagaagggaaccaacaaagaaggggaccagaggccaccccagctgaggggacagagcagccgaggccttctccgtgccaggaagcagcaccagccacggacggtggagccaggccctcacctgggctgggtgcccagacagatgagacgctgggcactggctcccggagcttctcgttccatctgcggatggagggcacggttgggggtgcagttcccttcccccaggggctgtgggacactcagagagcctatgcctgtgccctgggctccgggaggggagaggatctgggggccaggcacacagggaacggcccctccggcagggccaccacttcccccctaactgaaccctgcttctctgccgtcccctcctctacaccaaggtagggacacgggctgaggtgctccccactgcccataaggatgggtgggcccacagccgcgctgctaggcatccacaccatccccgccgtggggtgggacagggtggtggctgggagaccagcaagaggccattctcgagacagggtgaggcagctggactcacacccactgcccaagcaccatgcccgagggggaacactgtgccgtgaggaactgcagttagacctgaggagggactttccagcggctgcggcggcagcagaaccaatgctttagggagaaatgaggcaccgggacccgaggcgcaggagccctaaggggcgagaggtgctgcagaggccacggtgaacacaggcaggccccctggaagggacacagctgtgaaactgccccagggaggggcacaggctctcgcacctgcccccaggcatggggagcagctcccacccaggccacgggagaaaggaaagaaggaaaagcctgaagatgtttggccacacctcattttctggaaaatccatcaagagtggctgctgctgggagctgacaagccagggcaggggtgggggcaggtcagccgaggaccccagagccccccggctccccgcccatcccactgtgaaccaggcctgggggtgccatggacacttcttccaygccagcaggcagccctgcctgtcaccggttctggccatgcactccctgcgtgccaggctccaggctggctccttctcccggccctcaccccagcccaaggcccagaaatgcagcaaggtcttggggaccccgctcggccgagctcccagggcccagggcagtggaatgaagctggggcccagacaggagccaggtgcagtcccccagcccccagggtgtggaagcgtctgccctgggtaggactcaggtgccccctgggtgtggaagcatctgccctgggcaggactcaggtgtgggcttcagggacagggaacagcacaggggtccccgtggagtcctcacctcgcttgctcccgtactttttcacgtctccatctgcttttgccatcgccgttctgggggaacgccaaggcctagccaggcagcctcgcgccagcccccccaccccgcccctcgggcttcctctgcacccgccaggtgacatcatcgccgctgtctgatgccctgcccccacgttctggttccctgcaaggatgggggamacagcagggcccaggcatctggcagcaggaccaccgagcggccctaagsccaggcaagagcacagagcagagtgcagggtcctctggggtyccargcccttgctgccccacgcactcctcaccccagttcctgctatragctggaagggtgggagccaggtgcacagggacagcctgatgggtgcccgagggccaggatgtgctcccagggaagctgaagccaagcttgtygggagragtacacccccatggggggcaggacggtgccccagccccgggacacaaggggyccccagcgccgagcgtccgatctggaaggcrggaggagttaggaccatcctagcgtgggacccagcgggctccttagcggctgctggggcaccactgggtggagaaggaagtcccaggtgtgtggccacagtacgggtcttcaccccttcccagcacccttgccaatcctggagcaggagcagcaacagcagagggtgtggccaggcctggaggctgcccctccacacccgtmacaggtggggccacgtcccagggctgtgggcagcagggccagcctgccggcccgaggtakctgasacgtgtctcatgctgcagcgggtctgcccgccacccgggcgtgtgaaccccaggtcgggccccctcgccctggagcctcggcccctcaggggtgttcccagccaggcgctggctctcctgccctccccctgggctctgcccacagttggcgcgagggtgggtgaagcctgaggctggcagggccgggaagtcttgkggctgggccttctgccccacaggcgctcctgggccgggggagccgggstcggggaatgcaacagtgggactgaggagaacttccctgggtgtggggcagctcccggggccctcccaatccacagcagagggaatggccccagacaaaccagacctgcctcagagtctcacactcagagctgagtgccccaggcgcccactccccagaccagatgctgagtggggtctgggggccggacggagcccccaaagaaacatctgcacattccagacacgtgtggtcagcagcgggtgtgcgccaggcccggcacccccgcccgcgctggccgcctcactggaaactgggctggggggaccggctcggaggggccgcctgcggagcttatgtaaccgctcctccctcggcaggggcaggacaggacgccagacccagggaggccccatgccccctgccaggccccgtcctctcctggaggagctggttcccctccgcccagcaagaggacccccaggcccgtccctcccgagagcaggcccagggtgaggaaatgggctgcagtgtgggcgctggagaggacaggggacaggcggcagtgccacccccactgcggccccttcctcgctgggccagccgagccatgacctcatctgtttccctctgcgctgtgctcctttctatttaaggagagtgaggcggcttccagggccggaaatgatcctgtttaaattaacgggctgcagtttgggacggtgctcatttgaaaaaaaacagtgcagccccgggctgggcagatggctgctggctccgcctaccacttccatggggagggccagggaggccggccacaaccctggccccacgaggggtgggggttgcagcctctgatacaggacgaggctgccaggccccaagcaacagagccctgcacgagggtctctgggtcccagacacggggtgtgagactagctggggagccccaggctcagcggcattctgtccttacagatccctcccacggctgaactgtccccaggatgagatgccgggggtgacatgggcagcctcaggtcctccmgggacccacaggcaggcacagggatggagactccggcctcggaggctgaacgagggagatgagaaaggggagtctgcgatgtccttgcctacacagatggaaaaacacagccagctcaaaaagggccgtctggagacgagcccacctgtggggtgtaggaaggagagcgcttcatacgtatgctacctgccgctggggtcggggccacccttccagttcaaggggagaatgagggccggctcctggtgcccctgcacgcagctgacatggagccaggcgttgtgacccccttgcatccctctccactcccacccttcacagcctgtgtgggcaggtgctgcactgaccttacgctcctgatgggcacactgaggctcaaggggccctcctcctyccccaacaccatcccccaaacacctccccgggcagccagcagggtccagtgtgtcaatggaggaagccaaggtaggaagagggatggtgggggggggggcaagcaaactggccatctgcgcccggctgtgcgggcacagcagtgccctggagagggcagcagcacagatccagcggggcagccggaatcccatcacccactcggctgtgggcacagccaatgatggtacgagccatcctgaggccagggccacgatgcacagtggacgggctcagaacccggagcccctgtactcccacagctgtgacgttccctgggcatgggcttgccccagcgctggcctcattcctgcctcaaccagaaggaagagctggsttccgcctctgcctgggcacaaagccctttctgaggtggcctcacagaagccagcctgtcttcagatcatggcgctgctaaggtcaggaatgccaggctgggccakggctgggcctcgggagctgcagggagaaaaggacccagcccgcctcagccccagatgtagcccttctcctgccaccagtgcctgggcaccctggcccctaggcaaggacagctgccaagccatgaagagcgaggtgttctgggaaagggcgtgagctgcattttccagctgcgctcactctgcagggagactgtggcgcccccgctgctgtgcccgcagacgtgcccggcctcagccagctggagcgcaggcagcagagtgcaggccaggcccagacagcagcgggmtgttttcattccagggtgcttggcgggctgggctgccgtggccactgcagagctccagaaaagaacaygtgtgtctccctccaaagtatrttcctygctggaaagcagatcccaggcagggtctcccccacgagcagggggagaggcaccccaaggtgggggagcgagggcagtggcagaaccaccccataccctaggggacccagggaggggcttgcagatgcgggacccacatttggsagcggtgcccggccactgtcacsagatggtggccagcgcatcacccactcatgggccaggatggcagaggagatccacagagacggctccagcaggaggccctcayagagatgccctggcctcagaagagccaacagaaagccgggaagggkgacgtcgaggctcaggcttggcacaacctccccaaagctcccaaagactctcggtgcccaccagcgacagcgcacaccgccaccacctaacagcaagaatgcagcggggtccgcacatcagggcgggcactgagcggaactcaggcagtgccactcgccagcttacgtcaaaagaacaaaaggagtgaggacggtactcgcggctctgccaacacttcccagccccgcacgtctcacacacaccagaacgcgtcaaaaggcaccaatgggcaaacacccagatgtaggcacaagcaggagtgggccgggtcttgtgagcccccacagccacgcggccctgcgctgaaggcaccgaggctgggtgctgaggggtccataggagtccacccgcccaggctgcactggctcccgtcgtccagtgtctggtctaagcacaggcacagtgtctggctctcaccctcaggctgttacactctgctctgtggcagggcaggtctcacagtgcatggaggacaggggaatgggcccccggaacccctgagggaaccgacagagctactttaacaaggtatgattgttggggctgccagtggctgagccaggtcactgctacactgccctgcagggtgcatctaatcatggagcccactttacaggtgaggaaactgaggctgagagactggaccaaggtcacaccagaggtggaggcgctgggacgtgaacccaggtctgactccagggcgcaaattccctacatctgggttcccagcctccttcctgaaactgaacaggaaactagagagaagggacacagcagggatgagccagggagggagaggtgggaggggctggcagggagggagaggtgggaggggctggcagggagggagaggtgggaggggctggcagggagggagaggtgggaggggctggcagggagggagaggtgggaggggctggcagggagggagaggtgggaggggctggcagggagggagaggtgggaggggctggagggagggagaggtgggaggggctggcagggagggagaggtgggaggggctggcagggagggagaggtgggaggggctggcagggagggagaggtgggaggggctggcagggagggagaggtgggaggggctggcagggagggagaggtgggaggggctggcagggagggagaggtgggaggggctggcagggagggagaggtgggaggggctggcagcacccaagcagctgcacctgggcgcagggcccctcagcccctcggggagtgcaagcacatcgcagcccgactcggaagcgccactgccacctctgtctgtctataaaccagggcactagtgtgggccccaggcaccctgtgcggctgcaggggtctgccccagagcatgctgatgaaatcatcaccacggcttctcaaagagcctcaatttcctggtgtgtaaaatgagaccaggagtggctgcaaccctgcggtgccgtgatgaggtatggagagacaagaacacagagggctcagcgcggagcccggcgtggccaccgcggggagagggtgcggactcttcctagaccttttctttttgagacagagtttcactctgtctcccaggctggagtgcaatggtgcaatcttgcctcactgcgacctctgcctcccaggttcaagcgattctcctgcctcagcccccaaagtagctgagactacaggcatgcgccaccacgctcagcattttttttttttgagacagagtctcgctctgttgaccaggctagagtgcagtggtgtgatattggctcactgcaacctccgcctcccgggttcaagtgattctcctgcctcagcctcctaattagctgggattacaggcgcccacgaccacacctcgctaatttttgtatttttagtagaacggggtttcaccatgttggtcaggctggtcacaaactcctgaccttgtgatccccccaccttggcctcccaaagtgctgagattacaggcgtgaaccaccgcgcccaccctgttttttttttttttttttaaagaccgtttcctagtcgcccaggctggagtgcagtggcaccatcacagctaactgcagtctcaacctcatagactcagggaatcctcccccctcagcctcccaactagctgggactacaggcgccaccactaatatctatttattggtctcgctatgttgcccaggctggcctcaaactcctggcctcaagccatctgctctcctaaagtgctgggrttacaggcgtgaggcaccgsgcccggstggacagtggttttgatttacgtttccctcatgactaatgaggccgaccatcttytcacacgctgttggccatctgtgcgtcttctttggagaaatctctgttcagatcctgtgatttttttttttttttttttttttttttgagacagggtcttgctctgtgacccagcctggagtgcagtggtgtgatcacagctcactgcagccttgacctcctcggctcaagtgatgtcccacctcagtctcctgaatagctgggaccacagatgcataccaccacgcccggccaatgttcttttattttttagagaccggggtctcaccctgttgcccaggctggtgtcaaactcctgggctcaagcgatccacccaccctggcctcccaaactgctgggattccaggcgtgagtgaccccttgtccatgtttaaacggggtccctgtctgttgttgaatcatagtgttccctgtatgatctggatgcaagccgatactgcatggatgacctgcaggtgctctctgtctccacagtcgcctctgcagtgggmgctcgggtgccccacattcccaactgctgcagacacaaccaaagcctccccatcccttcccccacccctgccggcaatcgcgtacaggagtgagcgtgtgacttcttgtccacatttttgtccacaagtttggcgagtttgcatccgygtctaakaaagaaactrccgtttctcacgcaggcacgttctgaacgcccgagtgcgggagcmacgtaagacccggctcagggaccccgggtgaggccagctgsacatgcaggatgcaggtcctcaccactgcctccgctcggctgccagggctcttcctagaagacacaggcctctcctaggctctcctgacagaggccctacccctgcccccgagtcaccttgccccttggggactctctctgggcarctccctgtgggagctttgaaacctggcttcaatgtcacctgcactgggggtccttccaggccagccccctccccatcatccatctctgtccttggagaatcatctgcgtgttggttgaacgcgggctccagtgataacggagccctcgagggtggccctccttctgctgagggctcatggaggccttggtgacaatccctagtcctygctctcaggatccagggaccagaaatgggagccaggggcccctccgtggcctggccagccccccaaggaagctgtgtctstggcagttgcgctctaaggcatcaggcctaggggtcgstscagaatgmctgtyttccccgacgscaatcccaggcaggggccccggggtctgcgcctgctgtccctacactctcccacactctcctgtcattcagggatgcaggtgggaaagggcaaggccccgggtgctcctatattttacatcagtgaaccaagcacctaccaagtccctcgatgtgcccagtcctggaccccagcatttgcgagacagcagcagacccaggtgacccccagccagggtgagtggcaaccagcaccagaagtggcctttagagcagggggccctgagctgatgacatctacacctaggycastgccagccaggacaacctctgggacaatgggatgtcggctccaacgaccaatttacaagaaacacaaagsacacactcacagcaccacggaggwgacaccatggaggtggcacccccaagacacagcgagaaatccaggctgcaggagccagtttcttcaacaaattgcacaaggaaaaagagaggaagggaagctcctagacatcatcggacatttaaaagacaggcggtggctcaagcctgtaatcccagcactttgggaggctgaggcgggaggatcacgaggtcaggagatccagaccatcctggctaacacggtgaaaccccgtctctactaaaaatacaaaaaattagctgggcatggtggcgggcaccagtccaggctactcaggaggctgaggcaggagaatggcgtgaacccaggaggcggagcttgcagtgagctgagatggcactgctgcactccagcctgggcaacagagtgagactccatctcaaataataaaaataaataaataaataaataaataaaatacatcactcacacctgtaatcccagcactttgggaggccgaggcaagcagatcacctaaggccaagagttcaagaccagcctgaccaacatggtgaaaccccatctctactaaaaatatttttaaaaattagccgggcgtggtggcgcgcgcctctaatcccagctactcaggaggctgaggcaggagaatcgcttgaacccgggagatggaggctgcagtgagccgagatcacaccattgtcctccagcctgggtgacagagccagactccgtctcaaacaaaacaaaacaaaagacatcagctagctggtccaagcacagtggtgttcacaacgaattgatcacagccaggtagaattcttcattctttctccagtcctactgctttgcttgaccagccttaaagacacacatatatttttgtctgggcgcgttggctcacacctgtaatcccaacactttgggaggccaaggcaggcggatcacctgaggtcaggagtttgagaccagcctgaccaacgtggagaaaccccgtctctcctaaaaatacaaaattagccaggcatggtggcacatgcctgtaatcccagctactggagaggctgaggcaggagaatcacttgaacccgggaggcggaggttgccgtgaggtgagatcgcgccactgcactccagcctgggcaacaagagcgaaactccgtctcaaaaaaaaaaaaaaagtatatatttttaaaagacattggccgggtgcggtggctcacgcctgtaatcccagcactttgggaggccgaggtgggcagatcacgaggtcaggagatcgagaccatcctggccaacacagtaaaaccccgtctctactaaaaatacaaaaattagctgggcacggtggtgcatgcctgtaaacccagctaccaggtactcgggaggctgaggcaggagaatcgcttgaaccagggagtcggaggttgcggtgagctgagatcatgccactgcactgcggcctggagacaagagcaagactccgtctcaaaaaaaaaaaaaaaaagaaaaaaaaaaagacatcaactaattgcagtgtgtggaccttatttggctcttaattcaaactattaaaccaaaaatgtgaacacaccaggccttcggtggcatgaaggaactgtctgttgtgttaggtgggtctgcagtattgcgatgccctccaaaatgcttgcagataaaagggtggctggaatttggttcaaaacatgggtcagggctgggcgtggtggctcatgcctgtaatcccagcactttgggaggccgaggcgggcggatcatctgaggtcaggagttcaagaccagcctgaccaatatggagaaaccctgtctctactaaaaatacaaaattagccaggcatggtggtgcacgcctgtaatcccagctactcgggaggctgaggcaggaaaaagcgcttgaacccaggaggcggaggttgccatgagccgagatcgtgccattgcactccagccttggcaacaagagtgaactctgtctcaaaaaaaaaaaaaaaaaaaaaaaacacatgggtcaggagggagaagggtcggggcagggagggcagggcaggctctggggtggggggtctgtgagtcagccacggctctgcccacgtctccccacgaagcttcgagccacgcagagcagcacgttttgcagtacgccatcttttccaaaagccaccacctctcggcagcatcattaacccaaggcaggctgtggcctcagaagccccggctgtcctccacctggaactggacacagctgtccctgctgagcttcagcagccagggagccacaagtggagaggcacctgcgtgagccccccaggaaggctactggtgacacccagacagcaacgctcttggacccttgaacacctgccagcagctgtgatctgtgtccttcacctctcccagcttgacccctcttccctggggaaaacccagccgtctccccgaggaggagtttgcagggtagacagcaaaatggctgggctgccccacagcacagagggtggcctggggggccagccagggccttcacatccttcctagggccctagtttcccatgggtcccctcaccccaccttccagaactctcccagcggcggccccaggtgtgtacagaacagcacccacctgcccacatgaggtcaccctgtgccctgttgcacacttgaggggcctggcattcggaatcttgccagctcaggctgggacaggccaccaacccccagggtccccctcctccaaaccccaggaccagagcctaagaggacaacacaaggcaggggcgggggctccactgctgtgccaagggcctggagaacacgggccttgctctccgctcagcagccaccagcgcccttctctcccggacagctcccgaggggctgctctcatggacaccatcaggtgctgggaagcaggaaccaccaggacctggacagagtccccagtgaccggcctggcagacagaggagccctcagctacagcatcacaaacaacgggtggggtaggtctgatgcaattctgtgggtgctgttgccaggcaggaggaggccatctccacagagacagccgcgagacacacgcgtccgcagtcagggagcgcaggagcaatgtggccccgaggggcacgggctccattggtccaggagaacccattcttctcccaccctcgagaccacccagcaaagccccaaggacacacggctcccctaaggaagggtggccacaggcgggagtgacccagaaacgttacaaaaccaaatgccagaacccacccaatgtttagcaagcctggggatgtgccacgtcccccagggatccagcacgcacccaaggagacactgtcccggcgaggagcctggagcctgggaaatacaaggcatcagactggtcccaagactctccccagcgctggggacaactgtctgcttatcttagtcccctccgcccttttcaatccaaccctgggtcctgggcacctcatagttccaaacccctgctatgcacatcccggctgtgatgcctgggacaggtcgtgtcacctctccaaacctgtttcctcatctgtgaaatgcaaatctccacggtccctatgcctcggatggtcagagtcaggattccgcatgacgacccccaacaggagcctggcacagacctggctctgggcagcgtctccataaaggccacctgttgtttttatctcccgaaagcgaacatgacaaggctttaaccccccacggcaatcccccctcacccctgttctcaggatagccttggaacccaatagcagagcgcctgaggcccttcatgaccccagcccacccgcgagcccacctcccaccctgcccctacccctcacacctcccgtggccagcctccagcctcacggtctttgctcacaccgttcaccccccttcttctggacccacctcatcgccccttcctaagcatcagcccaattcttgcacatccatcaaatccttttccagacacctcctggaactcttccctgccgccccctacagccatccccacctctccgggtaccccgcagccccaggccgcatcccaattcctctccaattagcgactgtttgtcctcccagctgagcgcggcctccgcgccccgcccccgctggcgtctgcagagcccccgggtgggacgtctgtctccagacccggggtttttcggctccccggggccgtgccaaccgcggctccaggcgttccttatttagcagggccgccgtgccgcgccggagcctcgccctgggagcgtcctggcccgcgtcctgcttcccgtcccgggccagggaacgcgcccacgcccgcccgtcccgcggcctctcccgggtgccgctgggcccgctactcacagcgctgtggcgtccgcggggatgcgcagcgcgggaccgagcgtccgcagcccgcggcccgagcagttgacgcggcaggcggcgccgggcgctgggccgcagaggcaggggggctcgcagggcccgcagccgcgcccggggccccccgccagcgccccgagccacaggcccaggcccagggccagcgccaggcgggcgggcgcggcgggcggcatcgttagggcagcgcgcgcatggccccgccgtccccaggcccgcccgcgcgcggaggccgcagctcaggcggggcccgcggacggcatggcgggcgcggggctggatggggctgcggccgcgacctgctgctgagcgacgcccgctcggggctcggggccaggccgctccgggagctcggccgcccgctcggacgctggcgctgcagtgcgggccccgccgcggctcctcctcctcctccccgcgcggcgcggggcggacggggcgagggggggcggggcgggtgcaggctccgcccccttcgccacagcgcgaccgggccagcgatgagggactggcatccggaggcttcaccctccgctccacagggtcggcagcagggcggggcctccggaagctccgccccacgcgttcccggggcgcatgcgacgtggggcggagcgtctggaagctccgcccgtcgcactgcagagtcggccgaggcgcacgagctatttttcacgctccgccccgctgcaggctaaagtgcgtgggcgggaagcggtgggcagggtgccatctggctccgcccttctcctgtggtgtgggccaggcggcgggttcctcctcctgcagcagccacaggctccaccctgatccttcttccgcggtgtggatccttctcccgcgatctccgtgcgcggcccgagtcagtacccgcagcctcccgacgcacccgctggctccaagcctccctaccccaggtttcctggctgagagagagacagagggagagagggggaagagagagaacaggcaatgggaggttgatggtgagagcttattgaaagacaagagggaggaaacccacatccttcattccccatccattcatttattgccttatttattccattgaatcttcacagctctagaaaaagtgtgctacaattattccctttattaaatgaggtcactgaggcacagacagtttaagaaatttgccagcagggcacagtggctcactccggtaatcccagaactttgagagggggaggaaggtggatcccttgagtccaggagttggagaccagcctggccaacatggcgagaccccgtttctacaaaaattagccaaaattagccaaactggctcacgcttgtagtcccaggtactcgagaggctgaggccggaggagcgtgtgagcccagtaggcagtggctgcgctgagccgtgattgtgccactgcactcccgcctgggcaaaagagtaagatcctgtctcgaaaaaaaaaaaaatggaaaaaagaaaaaaagaactggctgggagtggtggctcatgcctgtaatcccagcactttgggaggccgaggcgggcagatcacaagatcagaagttcgagaccagcctagccaacatggtgaaacctcatctctactaaaaatacaaaaatcagctgggcatggtggcaggcacctataatcccagctactagggagcctgaggcagtagaatcgcttgaacctgggaggcagaggttgtgccactgcactccagcctgggcaacagagcaagactccgtctcaaaaaaaaaaaaagaaatttaccaggtcacacagcaggtggatggtaaggctgcgattgtattccaaacccagcttttaattgcagtcaaatgacagacttaagattcaaggactccagtggagggaagaaacagccacaagaaactgctgccaaatgagcaaaacagattaaccaagtctcaatgattgtttgaaggcggttgtggaataaaatgcaattgtttagaaaggatttcttaaatagaaaagacatatgtttaaagaagcaaattagttacctggaaatgaaattctaaactatttgaaaaaccatgggggccgggcgtggtggctcatgcctgtaatcccagcactttgggaggccaaggtgggcagatcacaaggtcaggagttcgagaccagcctgaccaacatggtgaaaccccgtctctactaaaaatacaaaaattagctgggggtggtgccacgcgcctgtaatcccagctactcaggaggctgagacaggagaatcgcttgaacccaggaggtggaggttgcagtgagctgagattgtgccatggcactccagcctg

SEQ ID NO: 8868 - DNA, 34847 bp, Homo sapiens
tctagaccttgtgatctgcccacgttggccttccaaagtactgtgattacaggcgtgagccaccacgcccagcccttgtcttttatttttatttttttgagatggagtttcactctgttgcccaggctggagtgcagtggtgcgatcttggctcactgcaacctctgcctgccaggttcaagagattctcctgcctcagactcccaagtagctgggattacaggtgtgtgccagcatgcccagctagttttttgtatttttagtagagatgggctttcaccatgttgaccacgctggtctcgaactgctgacctcgggtgatccgccagcctcggcctcccaaagtgctggaattataggcgtgagccaccatgcccggccttgtctaacttttaaattgtgaaatataacacaatatttcgatattaatattttatatatttatgtgagtgcataaaatggacaagacagctgtgtctttttctaattgttgttaagccaacactcctataaccaccacaatattgctagcacctcaaaaacacccactacctccagttccctcaaggcatccttggcctttttccaagatctgaaatatctagagagtcagggagaggttgggtacacatgtgtgtgagcacatcatgggcatgttctcacatgtgagcatatgagcgatgcatgtggccttgtgcctggggctatgtttgtgtatcctgccatgcaacatcacgggtgttggagcaggcagtcacattttccaattacctctacacccagctaggagtggagtgtcctgttgtgtggactttataacatgtgtacctggtacccagtgttggatgacgtgatgcctgtggaagcatgtgggatggcacacgtgtggatcttccccgggtgtgtgtggggggtgcccaggtcaggctgggcagcagggagaaaggacctctgcctagacctgcctggtggagggaggggcaccgtgggaacagcctgcggctctgggtgacgtcatgggggtggagggtggagagctgtctggacacgttgggtggtggtggcttcagcccttcccggctggcacccttcagcttccctgtcttccaggctggatgggcctctgcccagtggggtacgagtggatggggacactttgggctttcccccactgaccactgagcacagcggcatctacgtctgccatgtcagcaatgagttctcctcaagggattctcaggtcactgtggatgttcttggtaagcactggagcagaagtccttggtaaggacctgggccaagggcttggtgggggcagcaggaagcaagacagagacagtgaattgggaaagtgtttattcagagggggctgggctgtgtgtcttgcagagaatcaaactgaggtgtggttttagatgttttgcgggggagctgtgaggtctggggtgggttgtggctgcaggcttccacctcagacagtggcctgtctccagcagacccccaggaagactctgggaagcaggtggacctagtgtcagcctcggtggtggtggtgggtgtgatcgccgcactcttgttctgccttctggtggtggtggtggtgctcatgtcccgataccatcggcgcaaggcccagcagatgacccagaaatagtgagtactgggcactcctgggtgggtagaactaagctgagaacaaagaagaggatagcaggaggtgggccaggaccgaggagactgggtaggctgaaaactgaggagtttcagactagaggtgggcagggtgtttctagggctgaggaggagctaagggtctggagcacagatggagcactcaatccttccaccttagtgaggctcagatccatgtgcctggatgttgccaagtatgcacatgcacacagcacacacatgctcttcagccgcactgccacctgcagccacacactcacacttgcagggccagcacggcacccacaccctccgggcctgtctcactaggctcagccaggataggctcaccttgggaggctgccactaccctcagctcctgacaagggtgtgtctttcccagtgaggaggagctgaccctgaccagggagaactccatccggaggctgcattcccatcacacggaccccaggagccaggtgtgtgccaaggttgggtgtatgcatgcaggggtgtggtcgcattggggtctgcttgtgcctgggcccctctgcagaccaggagcacagctctctgctgggtcagccactgactcacagctggggttggccggggtagagttgagagggtgtagctgctttgggtctgctagggctgctccagaaggcccccttcagcattggcctagggccttttctgggaagccaccatcagttctgcttccagggtgggtttgtggtcgcagtggggaaatgaggatgtttgtttccaggagagaatggacctgttgggttgggggacaggcaagtagggaggaggctggtggaggacaagaggggaagaggctgaggggaggaggctgagccctgttctaactgccccgtgtctgggccctgcagccggaggagagtgtagggctgagagccgagggccaccctgatagtctcaaggacaacagtagctgctctgtgatggtgaggcccccggccccaccggtgtccccaccactctcctcgggcccctgtcctggtcccagatatggtgcgtcagcagcccccttaccagtccctctttccttagccctggctcatgcagcccagcaccgcatctctgctacgtctttgttctcccgtctccctctccccatgcctaacacttgttcctggtccccgatctctgggcccctatgcttctgaggcaaccgttacccctgcttacgcctggcctctgatcccaccatgacccagccatgccccaccatgtgcagctgccctgcctttgttcctgacttgccctttgcccttggtctccagagtgaagagcccgagggccgcagttactccacgctgaccacggtgagggagatagaaacacagactgaactgctgtctccaggctctgggcgggccgaggaggaggaagatcaggatgaaggcatcaaacaggccatgaaccattttgttcaggagaatgggaccctacgggccaagcccacgggcaatggcatctacatcaatgggcggggacacctggtctgacccaggcctgcctcccttccctaggcctggctccttctgttgacatgggagattttagctcatcttgggggcctccttaaacacccccatttcttgcggaagatgctccccatcccactgactgcttgacctttacctccaacccttctgttcatcgggagggctccaccaattgagtctctcccaccatgcatgcaggtcactgtgtgtgtgcatgtgtgcctgtgtgagtgttgactgactgtgtgtgtgtggaggggtgactgtccgtggaggggtgactgtgtccgtggtgtgtattatgctgtcatatcagagtcaagtgaactgtggtgtatgtgccacgggatttgagtggttgcgtgggcaacactgtcagggtttggcgtgtgtgtcatgtggctgtgtgtgacctctgcctgaaaaagcaggtattttctcagaccccagagcagtattaatgatgcagaggttggaggagagaggtggagactgtggctcagacccaggtgtgcgggcatagctggagctggaatctgcctccggtgtgagggaacctgtctcctaccacttcggagccatgggggcaagtgtgaagcagccagtccctgggtcagccagaggcttgaactgttacagaagccctctgccctctggtggcctctgggcctgctgcatgtacatattttctgtaaatatacatgcgccgggagcttcttgcaggaatactgctccgaatcacttttaatttttttcttttttttttcttgccctttccattagttgtattttttatttatttttatttttatttttttttagagatggagtctcactatgttgctcaggctggccttgaactcctgggctcaagcaatcctcctgcctcagcctccctagtagctgggactttaagtgtacaccactgtgcctgctttgaatcctttacgaagagaaaaaaaaaattaaagaaagcctttagatttatccaatgtttactactgggattgcttaaagtgaggcccctccaacaccagggggttaattcctgtgattgtgaaaggggctacttccaaggcatcttcatgcaggcagccccttgggagggcacctgagagctggtagagtctgaaattagggatgtgagcctcgtggttactgagtaaggtaaaattgcatccaccattgtttgtgataccttagggaattgcttggacctggtgacaagggctcctgttcaatagtggtgttggggagagagagagcagtgattatagaccgagagagtaggagttgaggtgaggtgaaggaggtgctgggggtgagaatgtcgcctttccccctgggttttggatcactaattcaaggctcttctggatgtttctctgggttggggctggagttcaatgaggtttatttttagctggcccacccagatacactcagccagaatacctagatttagtacccaaactcttcttagtctgaaatctgctggatttctggcctaagggagaggctcccatccttcgttccccagccagcctaggacttcgaatgtggagcctgaagatctaagatcctaacatgtacattttatgtaaatatgtgcatatttgtacataaaatgatattctgtttttaaataaacagacaaaacttgttctgtctggctcctgtcttgccccttgaactgtgtaagctctgagtcacatactctctgtctcggtaccatccttcctgtagtcccaagtaggggaagacttaggatgcctgtagctgggagggaagggaaagaattggcctccacaaggcctttggccatctctgagagtcccctggtaggaaagtgaagctaagaaccctttcgaggatggccagtaccttagtttgcaaagtgttttaaattccttttttttttttttttgagatgaagtctcactttgtcacccaggctggagtgcagtggcactatctcagctcactgcaacctccgactcccaggttcaagcgattctctcacctcagcctcccgtatagctgggattacaggcacccgtcaccatgctcagttagtttttgtatttttagtagagacagggtttcaccatgttggccaagctggtctcgaactcctgacctcaggtgattcacccgcctcagcctcccaaagtgctgggattacaggcgtgagccactgcgcccagcctgaattccttattgtactggagactcaacaacagctatgtgaaataggcagcagtgtacccttttttacaggtaaagaaactgaaactcaagttaaatgagttttacagactcttagaggtgggaggatttaaaggtcctctagtctgctcccttcattttcctaggtttggaaactgaggctcagtgaagtaatgcgatttgactgaggtgctagatccatcagaggcagaacccaggcatcctcccttgtgagtgtgctttttacagccctgtgtcaacttgctcccaggcaagccccaggtctctaccttggacccaagaattctggtctctaagggagttggtcacctgctcacaccacagacgccatcaccccaccccagggctctgacatcacctcccctgaccaatgaatgaagtccaagcaaagggtgaggatgtgaatgtcagctacctcccccaccctaggccctgtggttgcaaagatgctctaacaggaagtgggttaaggagctgcactgcttcctgccccctaaagctgagcggggcgaggagggcgagtgccaggctgggccacgagacacaggacacaatttcttgccagggtcctggtagcttcctcttcaacagccacttccgtgtggccggggccccaggggcaggagctgctgcccgttgcccaggccaccctccacccccaattgggagccctgcccccctggggccgggccaagcccagcagctggctgggatcccatgggggactggtagggcacaggtcttgggggatagaggtgaccgggccagtgccctggggctctggccatgaagtctcggcagaaaggaaagaagaagggcagcgcaaaggagcgggtttttgggtgcgacttgcaggagcacctgcagcactcaggccaggagggtaaggaggccggytcagcttytgcagggtgggtggggaggcactgggcatctgcagcccgatccagcctgaagggcagaagcagtttccggtgctcctggggaaggggcagtggcctggggtcaccattcaagagaactgtaagtgggcaagacaggaaatgtggctcagtgaagaaggcagggcggctcccttgtgtaactttctggggatggggtggctgaggggatgagaatgtgagtacccaggtagcagtgagggggaggatggagagactggaaaccgaggaggagtggatgaaacagcgggcaggtgactgggaacaggagagggagggtgaggcgacagggtcaggagaggagtggctgaaggggaaatgattatccttaggtctgaatgaaaggagacagggaaatggccccagaagggtctcaagatggcccttgaggcgggtggtttcctggctggagaacacccaaggacaaggtcatgggctctgttcccactgcagccttgctgggccgcaggggatgatgtcgggctggaaacarcctctgcccctagtctttgtgattctcttgttgtccctgtgcaaaagagaaacaggttcaaagtggggggcaaggggagaagctgctgaaatggggaagaatgaaagagagggtgtgaggcctggcttgaagctggaggtggagggtgcaaaggagggtgggtgtggagctgtctgtggagctcacccagctccctccctgggttaccttagagtgggctttgaagccagaaggaccagggacaatatcaggttcacaacggggcctggcatggagcagccactcaaaatcatttcttgattcaatttgaaattgaacccaggcaccctggctgcccagcccagcttgtttttggcacttcaagctcctcctagagaaaggcataattctttccccactccaccccattccaccccaccccaatctgtcatttcctctttgtcccctcctctgctctgggctgtggtgcttgcagcggagggagggtgatggtggttcccagatcatttcctgctcttagccccgcccctgcgtccccagacacctccttccccttttctcctccagtgagaggacccctatccccattgcccttggttaagggaaagcccagaccccaaggaagagtgttaaacagctgaagcgagcttatttgagccttcctcttctcactgggcagagtggaggtggcacagccatcagtgcagggcttactcctttctaagggactcctctcaagagctatgattcttagccaaggattatgagatttaattggggatgatgttctcctcccagctcaatgcaaaccctcagttcagcctttcctggtactgcccttttttgtggtccaccaaccaattttatcttgaaacactgaacccacagccagcccagaccctgctcctataaccctcccggcctcttcctggattcctagcagggaaggggcacactctctagaggggacagacatctgattgctgaatcctgatcctaggtgaatccgagagcaggagaccagaacctcacagaacccaagggtgggttgatcttgggcaccagagtagcagtggtggctccttccctatccctcaggtcttcctggtacagagaggtggaaagtggaaggaaggacagagagaggctggtgatggttcctctctttaatccaacatccacaaaaaaatgagagcagagagatctttgttttcgcttaatttatcctccctgatcacgttggtctcccccatccccacagccttgctccatctcagccctctctccagctctttgcccccacatgggtctcttccttccttaagccctgtatatactgaattctttcttttcctaatctttgatagattgttcaggtttctttctttctttctttctttctttctttcttttttgagatggagtcttgctctgtcccaggctggagtgtagtggggtgatctcggctcactgcaacctctgcctcccaggttcaagcagttctcctgcctcagcctccagagtagctgggattacaggcaggcaccaccacacccagctaatttttgtatttttagtagagacagggtttcaccatgttggccaggctggtctcgaacactgacctcatgatccacccgcctcggcctcccaaagtgctgggattacaggcgtgagccaccgcacctggccgattgttcaggtttctaattctcaggtccctaagctttgggccttcctccctgaccctactcttatttcctcgatgtctccatccctttgacttcatcgctccaatcctgtctgtaggttttatctctgatctcatctctctgatctctatctccctaactcccccatctctgtgaccctgttgtctcttcccccatctccttgacccagttcttctatggctgtgactccttaggcttttgagtgtcccctttaaaggactctggaggttcaaaatcagcagagaaggataggatagagaagacctggtttgtatgctgctcatgtgacaaaaacctggtggtttaggtgacagcagactatttatgagtcaaaagagttggcttagcattaggcacccgagagtacagcagcagctcagacaaggaggggcctgccctatctctgcattcaatgctgggaacctgaggtcagtgggatcctagaaaatgggagtaggtactgaaacgatggatggtgaactgtaggactgagactaagacgaggcaagagacatgactagggtgcaaaatttaaggaagcactcactttcagtgtcgtacaattgccctaggtgccttttttttttttttttttttttttttttgagatgcagtcttgctctgtcacccaggctggagtgcagcacaaccatcttggcttactgcaacctcgacctccagggttcaagcaattctccctgcctcagcctctcgagtagctgggactacaggcaccaccacgcctggctaatttttgtactttttagtggagacggggttttgccatgttggccaggctagtcttgaactcctgagctcaggtgatccactcgcctcggcctcccaaagtgctgggattacaggtgtgagccaccacaccaggcccctagatgcctcattctcaaggaggtactcaagaccgtgcatgggcatggttggcatctccatggccctgagaataagtgcttccttaaattttgcacactagatgcttccctaatcccacccaactcctggctgtggtgtgcaggaggatgaagggtctgaaagccaggtcgtatgaggagagttgaaagattttggttggctgagcatggtggctcacgcctgtaatcccagcactttgggaggccaaggcgggtggatcacttgaggtcaggagtttgaggccagcctggccaacatggtgagattccgtctctactaaaaatacaaaaattagctggacatggtggtgtgcgcctgtagtcccagctactcgggaggctgaggcttcagtgagccaagactgcaccactgcactccagcctgggcaacaaagtgagactctgtctcaaataaataaataaataaataaataaataaataaataaataaataaggggccgggtgcagtggctcacgcctgtaatcccaacactttgggaagccaaggtgggtggatcacctgaggtcgggagtttgagaccagcctgaccaacatggagaaactctgtctctactagaaatataaaaattagccgggcagagtggtgggtgcctgtaatcctagctacttgggaggctgaggcaggagaatctcttgaatctgggaggcggaggttgcagtgaactgagatcgcgccattgcactctccagcctgggcaacaagagtgaaactccgtctcagaaaaaaaaagaaaagaaaaaagaaaaaagaaaaagaaaaaagaaaaaggaaagattgggattgatgaatttattgattattttcttcattccatatttctgtcatactttattcaacaaagagcttggaatgactttcaaaacctaaaactttacaaaaaattagaataaatgattgaaggaattgggttgaaggaaaaacaagaggaagagaaagatcagcacccagaaatgcatattacattgttctgtatggttcttagaggtgggctctgagcttcctagtggttaaagaggtaaacataggccaggcccagtggctcacgcctgtaatcccagcactttaggaggccgaggcaggcagatcacttgtggtcaggagttcgaggccagcctggccaacatggtgagaccccatccctactaaataacataaaaattagcagggcatggtggcgtgcacctgtagtcctggctactcaggaggctgaggcaccagaactgcttgaatgcaccccaactcaaaataaataaataaataaacataatcaagtgcaagactcatgggcccataaggaaaaaaagttagatggtttaggagaaccacagctttttcccccttcccttcccttcttcccttcccttcccttcctttccttttctcttccttccctccctcccttccttcctctctcttttctctccttcctctccttcctctccttcctttcctttctttctttctttctctttctttctttctttctttctttctttctttctttctttctttctttctttttctttctttctttctttctctttctttcttgtcttactctgttgccgaggctggtgtgcaatggtgccatcatcactcactgcagcctcaaactcctgggctcaagcaatctcctgctttagcctcctgagtagctgggactacaggtgtgagccaccatgccctgctaattttttgttttttgtagagatgaggtcttgctatgctacccaggctgttcttgaactcctgatctcaagtgatctacctgccttgacctcccaaactgttgggattacaggcatgagctgccatgccaaacacagctttttctgacactgatatgtgagacgaattgctctgatgagtcctagttaatagaacccagtattctgtcactggcaatattctctgttaaatctccaagggatgttattgattctcataattgattaattcactgagtcatttcataccgggggaactgccccgataatcatgtaggttctttcctattttcctaagcgtcggctggcttgagaaataaaaggacagagtacaaaagagagaaatgttaaacctgggcatccaggggagacatcacacattggtaggatccgtgatgccccacaagccacaaaaaccagcaagtttttattagagagtttcaaaaggggagggagtatacaaataggtatgggtgacagacatcaagtacttaacagggtaacagaatatcacaaggcaagtggaggcagggtgagatcacaggaccaaaggaccaaagcgaaattaaaattgctaatgaagttttgggcaccactgtcattgataacatcttatcaggagacaggttttgagatcaaccggtctgaccaaaatttattaggcgagagtttcctcttcctaataagcctgggagtgctatgggagactggagtttatttcacctctgcaatctggaccataagagacaggtacgcccyggtggggggggcgttcagagacctacccctaggtgcgcattctctttctcagggatatcccatgctgagaaaaagaattcagcgatatttctcccatttgcttttgaaagaagagaaatatggctctgttctgcccggttcaccggcagtcagagtttaaggttatctctcttattccctgaacaattgatgttatcctgttcttttttcagggtgcccacatttcatattgctcaaaaacacatgctgtacaatttgtgtagttaacgcaattattacggggtcctgagacgatatacatccttcttggctgacaggattaagagactaaagtaaagacaggcataggaaatcacaagggtattgattggggaagtgataagtgtccatgaaatctttacaatttatgtttagagattgcagtaaagacaggcataagaaattacaaaagtattaatttggggaactaataaatgtccataaaatcttcacaatccacgttcttctgccatggcttcagccggtccctccatttggggtccctgacttcccacaacaatttcacaaacattcattgagcatctgctctgtttcaacattgtgccagatgctgggaggatgttattatatgtcaggaggtatcaatacaaaataaactaatcataacaaactgcaagaagtgctataatacaaacatgaatggctgggcgcagtggctcacgcctgtaatcccagcactttgagaggctgaggtgggcagatcacctgaggtcgggagttcgagacagcctgaccaacatggggaaacaccgactctactaaaaatacaaaattagctgggcacggtggcacatgcctgtaatcccagctactagggaggctgaggcaggagaatcgcttgaacctgggaggcggaggttgtggtgagccgagattgtgccactgcactccagcctgggcaacaagagcgaaactccgtctcaaaaaaaaaagaacaaagactgtggcgaattataatatagatataagaaaaaggtttggaattggaggttatgtttaagatgtgctttttttcttttttttttgacacggaatctcactctgtcccccaggctggagtgcagtggtgcaatctcagctcactgcaacaactacctcccagattcaagcaattcttctgcctcagccacccaagtagctgggactacagacacatgccaccacatcaggctaatttttatatttttagtagagacggggttttgctatgttggccaggctggtctcaaactctaaacctcaagtgatctgcccacctcggcctaccaaagtggtgggattacaggtgtgagccaccgcacctggcctaagatgtgtcttaaggaatgcatagaagttcaccaggcagagtcagagggagggtaattccaggcacgggaataatatgagtgatgctaccaaggctcataggatttgtcaaggaattgtctggagctgtggctgaaatggtgtctggacctgatttgtgaagggtcttatataccaggttgaggagtttatattttatttcgtatttgtaaggtaagcaatggggattaaagtggggcagagtggggtgtatgcgaggcaaaggatctaaagtagggaagtgctttggaaagataactacgtggcctggtggagatgggtttcaatacatggtttttttttgttgttgttgtttttaaagaccgagtcttgctctgtcattaaagctggagtacagtggcacagtcttggctcattgcaacctccacctcccgggttcaagcaattctcctgcctcagcctcccaagtagctggaattataggcgtgcgctgccacgcccggctaatttttgtatttttagtagagacggggtttcagcatgttggccaggctggtctcgaactcctgacctcagatgatccacccactttggcctcccaaagtgctgggattacaggcgtgagccaccacgcctggccatttttgaggatctatcatgtatgagacaccatgtcagataatataaggaataccaagatggatcacacttagattttgtccttaaaaagcttacagtctagtaacaggagggggcctagggttgggaaagatagtacaggttttgcacccttgatttgagtcatggctctagctgggtgctgctgggcactcagtacttctttgaccctcagttttcttatctgtaaaatgggtactagaatatctaatttttaaagttttttttttcagatattcttgtatttgattgccaaaggtctgtcattcagaatatctaatttttaagattaaatgatagaacatatataaagcaggtcaggcgcggtggctcacgcctgtaatcccagcactttgggaggctcacctgaggtcaggagtacgagaccagcctggccaacatggtgaaacccggtctctactaaaaatacaaaaattagctgggcgtggtggcgcgtgtctgtaattccagctacttgggaggctgaggcaggaaaattgcttgaacctgggaggtggaggttgcagtgagccaagactgtgccactgcactccagtctgggaaacagagtgagactccatctaaaaaaaacaaacaaacaaacagaacccaacaacaacaaagaactaatagccatgagctttcttaccagagggtgtgcttcaaataatccccaacagtcctgttccatttgggttgggacaactaatgttccttcaccttatgtagagtgttaagtaaatgcacttttaagataagtccttggccaggctcggtggctcacgcctgtaatcccagcactttgggaggccgaggcgggcgaaatatgaggtcaggagttcaagaccagcctggccaacatggtgaaaccctgcctctactaaaaatacaaaaaagttagctggagacgtagcggcgggcgtctgtaattctagctacttgagaggctgaggcaggagactcgcttgaacccgggaggcggaggttgcagtaaggaaagatcgcgccactgcactccagcctgggcaacagagtgagactccgtctcaaaaaaaaaaaaaaaaaaaaaagtccttgactctgcctcccctaccaaccagattgttgcccctttaaaaataactagtaattacagacaagtttctttcctttcctttttttttttttttttgagatggagtttcactcttgttacccagattagagtgcagtggcgtgatctcagctcactgaaacctccacctcctggttcaagtgattctcttgcctcagcctcccaagtagctgggattacaggcatgtgccaccatgcccaggtagtttttgtagtttttagtagagatggggtttcaccatgttggtcaggctggtctcaaactcctgacctcaggcaattcacccacctcagcctcccaaagtgttgggattacaggcatgagacaccgcacctggcccaagagagataaatttctttctttctctttctttttttttttttgaaacagggtctcactctgttacccagcaggccagagtgcggcttcctgcagcccttgcctcctgggctcaggtgatcctcccatatcagcctcctgagtagctgaaactacaggcatgtaccaccacaccccatttgtgtttgtattttttgtagagacagagtttcagcatgttactcagtctgatcttgaactcctgggctcaagcaactcacccgccttggcctctcaaggtgctggcttacaggggtgagccactgcacccagcctgacaaatttcactttaacaaaggcagaactttctaacaaagagctgattgggtagtttggagaggcagtgagctcccaggacctttaggacccactaagcagagatactgtagaggggttggcaggttgaagctgatgatctgtaagaattgttctgacaagtttttattccatgagctttgctcgtcgtggtctccccaaattccatttctcagacccagtgcagtctttgaccacccagatcctctgatttctatgtctctgccccgtctgtgtccccagtgccccaggtgctaaagagctgtgcagaatttgtggaggagtatggagtggtggatgggatctaccgcctctcaggggtctcctccaacatccagaagcttcggtgagtcaaacagagtgggagggctctgtgaccaggaggccagggagccagaaggtcacagtaagagttgctgaggacagcagagatggggagtgagaggcagtggggagaaggaaacacagatactaggtaaggtcctagggaggtgctctaacaactcctcagggaaggtggagaccatggtccctcccccaacttagcacacacacacacacaaactccactctcacatacaccattcccacacacacacccggcttaaaaaaaacaaaaaacaaaaaacttgagccaggcgcggtggctcacgcttgtaatctcagcactctgggaggctgaagtgggtggatcacctgaggtcaggagttcaagaccagcctggccaacgtggtgaaaccccgtctctactaaaaatacaaaaattagctgggtgtggtggcacacacctgtaatcccagctccttgggaggctgaggcaggagaattgctccaacccaggaggcagaggttgcagtgagccaagattgcgccactgcactccagcctgggtgacagagtgagactccatttcaaaacaaaaaacaaaaaacttagatataatttacatatcaaaaaattcaccatttaaaaatgtataactccgttgtttttagtgtattcacatactattcacatggtatatttactttagatagtgatgaagtacaataatcatcactatctaattccaggacatttctttcttttttttttttttgagatagagtctcactctgttgcccaggctggagtgcagtggcgcaatcttggctcattgcaacctctgcctcctgggttcaagtgattctcctgcctcggcctcctgagtagctgggactacagatgcacaccaccacgcctggctaatttttgtatttttagtagaaatggggtttcactatgtcggccaggctggtcttaatattttttttttcaatttttttttttttttgagacagagtctccctctgttgcccagggtggagtgcagtgtcgtgatcttggctcattgcaacctctgcctcctgggttcaagtgattctcctgcctcagcctcccgagtagctgggactacaggcatgcaccaccacacccagctaatttttgtatctttagtagagatggggtttcactatgttagccaggctgctcttgaactcctgacctcaagtgatctgcctgccttagcctctcaaagtgttgggattacaggcatgagccaccatgccctggcctgtgtatttatttatttatttatttattttttgggatggagttttgctctgctgcccaggctgtagtgcagtggcgtgatctgagctcactgcagcctctgactcctaggttcaagcaattctcctgcctcagcctcccgagtagctgggattacaggcacatgtcaccactcccggttaatttttttttttgagatggagtttcactcttgttgcccaggctggagtgcagtgtcgcgatcttggctcaccacaacctccaccttgcgggttcaagcgattctcctgcctcagcctcctgaatagctgggattacaggcgagcgccaccatgcctggctaattttgtatttttagtagagacggggttcctccatgttggtcaggctggtcttgaactctcgacctcaggtgatctgcctgccttggcctccagaagtgctgggattacaggtgtgagccaccatgctcagcccacagttttgtatttttagtggagacagggtttcaccatgttggtcaggctggtctcgaactccagacctcaggtgatccacctggctcagcctcccaacgtgttgggattacaggcatgagccactgcgcccggcctaccttttttattatagccatccctgtaaacgtaaactgatatttcaaagtgatttatatttgagttacttttgttctttttctgttctttttttgagactgggtctcactctgtcacccaagctagagtgcagtggcatggtcatggctcactgcagcctctacctcctaggctcaagcgatcctcctacctcagccttctgagtagtggggattacaggcatgagccgcctcccctggcctatatttgcatttctgtaataggtaatgatgttgaacatcttttcctgtgcttattgtctacttgcatatcttctttggagcaataccatgtttattcaaaccctttgcccattttttccccctttcctatggtgctgactttgcctgtttaaaaatttggcttatttgtttagccgggcatggtggtgggtgcctgtagtccagctactcaggaggctgaggcaggagaatcactcgaacctgggaggcggaggctgcagtgagcagagatcgtgccactgcatgccagtctgggcgacagagtgagactctgtctcaaaaaaaaaaaaaattagcttatttgtctttctagtcattgaattacaagagttctttatatgtttggaatgctagaccctcaatcagatatattgtttgcaaatattactcccattttgtgggttgtcttcacttttttaatggtgacttttggctacaaatgtttttaattttgatgttcaatgtatccatttctttgtttgcttgtgcttttagtatcatatctaagaaactgttgcctaatcctaggacataaagatttacacttaacgtttctttctaagagttatacccatccatttttacatgtacccagtggcacagatttaggaccataccctactgactcttacagacccttgtactgctacacatatctacagctacatccctaacatatccctgttcacgcatagatccacttacctgtacatgtacccatcctcacattcacatctacatgtcaacataygcaatatcttatacttactggcttacatgtgtacgtgtcccaacattctccttccaagtccaacacatgttgacccacgaccatgccgggacccatctctatagggacccacctctccccacatcaccccaacccctaccactcctgaccacaccgcgcctccccaggcaggaatttgagtcagagcggaagccagacctgcgtcgggatgtttacctccaagacattcactgcgtctcctccctgtgcaaggcctatttcagagaactgccggatcccctgctcacttaccggctctatgacaagtttgctgtgagttgagaggccgaggggtggaagacagggctcaggggtggacagcctggttttgacatcccaagtgtgccacatactagccagagtcctagcgatcctgaatgacagagaccacagaaaaacttaccggggaaaagacccctcctccccaaatctcctagcccctactacctttgtcctcccccattccttttctcttcactctctctctgctatgtccttctttctccctaaggcctgaagattgcacacagcacagtggtgagacttggggaggtagaggtcagattgttgtagctggaagggccttggaaagcatgtagaccagagcttccctacacttaagagaatcagaatactttttagaagtaaaattttttcaaggatgcctctccattcactctaattatgcgttgaacatctttggtattttattttattttatattttatattttttatattttatatatttattttattttattattttattttattttattttattttatattttaagatggagtctcactctgttgcccaggctggagtatagtggtgcaatcttggctcactgcaacctccgcctcccaggttcaagtgattctcctgcctcagcctcccgagtagctggagagcccgccacaatgcctggctaattttttgtatttttggtagagacagggtttcaccatgttggccaggctggtcttgaatccctgacctcaagtgattcacccacctcagcctcccaaagtgttggaattacaggcatgagcccctgcgcccagcctgttttttgttttttgagacagggtctccttcggtcacccaggccggagtgcagtggtgtgatcacagctcactgcaacctcaatctcccaggctcaagtgatcctcctacctcagcctcctgagtagatgggactacaggcgtgcaccaccatgcctggctgatttttaaaatttttagtagagacaaggtcttgctgtgttgcccacgctggtctcaagctcctaagcttaagaaatcctcccaactcagctcccaaagtgctggtgttacaggtgtgagtcactgtgcccagcctgaacatcttttaaatgcgaaaacacatgaaaaatatgctattttgaattgagtaacactttaaaaataagttgcactttattgagcataagagcactgaragaccctaaatcctagcagcmccctgctcagtccacaccggctaggttggggtgggggacagctttcctggacacactgaaataactctgtggtccctggggcacccacagggtggcgccactraagtatcccagtaccagagctctacggatggaggatggtaaggcagcgagttgccaagttcacaaaagctattaagtggcataaccaaaattcagctgccatcttcgtggaccccaattctgagctctctctaccaagtcagtgcaccgcagatgatgtaggatggggtagcacagagtccagtgcacattgttcctgagaacttggttacaagctctggggagtaagcaggggcattgctgggtcactgattcctgcttcttgcactcttctcaatcaggaggctgtaggagtgcaattggaacctgagcgcttggtcaagatcctagaggtgcttcgggaactccctgtcccaaactacaggtatgtgacactccatatctgcccagcaacctgagacaactcattcactcgctgcctggagccttaactgggtcctactgctcccaggtcccagccctaatgcctgccctgggcattccctgtgtgatccctgcccccgctttctgcaggaccctggagttcctcatgaggcacttggtacacatggcctcattcagtgcccagaccaacatgcatgctcgcaacctggccatcgtgtgggctcccaacctgctgaggtaggtgcctgtgtgagcagtgtatggggatcctgtgagacactggcctttgggaggctgctcccaggatgaggtgtgactgtgtgggtacactggagaagggtgtagggctcacaaagcccagtgagaaaagaaggttcaagatcatggtgggtcggatgggccccatctattttagtcccttctctgtgatcaaataaagtccctaaaaggcaggacttttgtgttttcctacagtgtgtcactgagctcagggactggaacataacagttccatatcaattttttgtttgtttttgagacagagtcttgctctgttgcccaggctggagagcagcggtgygatctcaactcactgcaaactccgcttcctgggttcaagggattctcgtgcctcagcctcctgagtagctgggattacaggcatgagccaccatgcctggctaatttttgtatttttagtagagagaaggggtttcaccatgttggtcaggctgatcttgaactcctgacctcaggtgatccacccacctcctccctgtgcaagtgctaggattacaggtgtgagccactctgtccggcctcacgccaaatgtttgttgagcaaaacgtcttgcagtctgttggctgtgctcactgtgcatatcactcactgtggtccaagacagactatgagaagtcctgtaattcattataaaattcattataaactagacaccctggtgtgcaaaggaaatagagattaatcctgaggcggrtgtccaagaaggcttccttcctaraagtcttcaagtggcatttgrgaattggaagaattatgcatacaatttaagaggtagagaaggggttaaggtcattcgagagagagagagagagagagagagagagagagagagaataaggtattttcagggagaatctggattgggaagtttggtggggctgagggggagaataattccacatctccacaggtctaaggacatagaggcctcaggcttcaatgggacagcggcyttcatggaggtgcgggtacaatccatcgtcgtggagttcatcctcacacacgtggaccrgctctttgggggtgctgccctctctggtcagtgtccttcctgccctccacatatcccactgttggggagtcaagttagttacagagagccttgaagatcacctacttcagctgagtctcatacagggatgttggtagtggccacatggagagaaccctggggagataattgtgcagtcaggacttgagaagacttcttctgctgtcagtctagggcatggcttgacctctgagtcaccatcctggctcccaaggctagtgatggctcatatccacccccagcccaccaggccaacgttctcggatctcccagccctctttgtccatgagggcactcttttgaggtgatggacatggaggcactgtcttcaggggcttctgaatatatccctaacctggtagttggcgaggggtgatgaaggattgggtgcctgasgtccctctcttggctctgttcctggctggccaattccttttcttttcccaggtggtgaggtggagagtgggtggcgatcgcttccagggacccgggcatcaggcagccccgaggaccttatgcccaggccactgccttatcacctgcctagcatactgcaggctggcgatggacccccacagatgcggccctaccatactatcatcgagattgcagagcacaagtaaggcctccttcctgggccttcctcccctgcacygaccttcatgttccaacctccaattatgcccctccattctttgtaggaggaaggggtctttgaaggtcaggaagtggaggtctatcttcaatttaggtcgctctggccatgagactaagcgtaaacttccacggggggctgaggacaggggtaagtctggggagatggggggagctctgctgagggtgcacaaggccctggctctacacacatccctgtcttacagaggataaatccaacaaggggacactgcggccagccaaaagcatggactcactgagtgctgcagctggggccagtgatggtgagtataggggtgcatttctgtgtgtatgtgtgtgtgctatgtgaccagcgtgggcttgtgtgtacatgcagccaactgtgttcaataatttcaaaaaatatttaatgagtgcctattatataccagccacattgtaaatgtagctgaatgctacggtgagttgattgtctaatctatgastttgttgatgagtgttcgtatgggatgggacagcatgggtatgtggtggtggtggtggtggtggtggtggtggtggtggtggtggtggtggtggtggtggtggtggtggtggtggtggtggtggtggtggtggtgacaacggccagtgactgtatctgcagggaaggaagggagttccctaggtatgtgaaggtgaggtgatctttgacctactggctgggtgaaaagtttgcagtagtgatcaaaagaagctgggcctggtgccttccaggctatcgttgctttcaagcctgagaaagcagagagcattctccagagccttcttgagatgtctaggccccttggagtttaggctattgcctacctggccctctttttcctccacagagccagaggggctggtggggcccagcagcccccggccaagcccattgctgcctgagagcttggagaacgattctatagaggcagcagagggtgaacaggagcctgaggcagaagcactgggtggcacaaactctgaaccaggcacaccacgagctgggcggtcagccatccgggctgggggcagcagccgtgcagaacgctgtgctggtgtccacatctcagacccctacaatgtcaacctcccgctacacatcacctctatcctcagtgtgcccccgaacatcatctctaacgtttccttggccaggctcacccgtggccttgagtgccctgctctacagcaccggccaagccctgcctctggccctggccctggccctggccttggccctggccccccaggtgaggacccattgattgaccaagactaggaaaggggactggaactctaggctgaagctctgatgctggaagatccaccctaggaagggcagaggcctcagcccttrggctttggggtggttacctttagctgcctccctagattcaggattagggaaatccagtaatattatcaggctatgtgaaatctatggagaggagatctctagcagccttcagaacattgatgtacccaagaataggggcctgtgtcagaaacatacagcagggattactaaggacaaatgtgggaatatataatagatggatgggtaacaataatagtaacatcaatactatcagctaacatttagcaagagtttattaagtaccagccaggcgccgtggctcatgcctgtaaacccagcactttgggatgcctaggcaggcagatcacctgaggtcaggagttcaagaccagcctgcccaacatggcgaaaccccatctctactaaaaatgcaaaaaactggccaggtgtggtggcagatgcctgcggtcccagctccttgggaggctgaggcaggagaatcgcttgaacccaggaggcagaggctgcagcgagccgagatcacgccactgcactctagcctgggcgacaagagcaaaactctgtctcaaattaaaaaaaaaaaaacaaaaaacagtttattaagtaccaagtgctaggccaggcacggtggctcacacctgtaatcccaacactttgggaagctgaggagggtggatcactggaggtcaggagttcgagaccagcctggtcaacatggtgaaaccccgtctctactaaaaaaaattaaaaaaaaattagccaggcgtgcgtggtgaggcatgcctgtaatcccagagactcagaaggctgaggcaggagaattggttcaacccaggaggtggaggttgcagtgagctgagattgcgccactgcactccagcctgggagacatagcaagactccgtctcaaaaaaaaaaaaaaaaaaaaaggtccaagtgctgtgattgcaggattggtttgtttcattttctcataatcttatgacataggtattgttagccttatgttacagcagtggaaactgagacttaggttaatcaatttgcaattgatttaggtagaagtagcagagctaggatctgatccttgctctgactccagttcctgaagtgtcactcatgagaagtcctgaggcaggataggatagtgggtaagaacatgggctatagagttaagtagacttgggttcaaattttggctgtactgcttattcattacatgaccttagacaaattgcttaatctctctgagcctcagtttcctcatatgtaaaatgaggacaataccccacataatagtttggaggaaaaaatgccaatgcattgtaaaatacatagcacagtgcttggcacctggtagggtctcaattaaggtagcaagccaataactaggracattggtctgaaaggatcagtcatgcagagtagcaatgctgggagtgctgggcccctgctatatcaatgctaggaggactcacactgaaaagggtcagggcttgacctttgtattcctgggactacttctcccccaacagatgaaaagttggaagcaagtccagcctcaagtcccctggcagactcaggcccagacgacttggctcctgccctggaggactcgctgtcccaggaggtgcaggactccttctccttcctagaggactcaagcagctcagaacctgagtgggtgggggcagaggatggggaggtggcccaggcagaagcagcaggagcagccttctcccctggggaggacgaccctgggatgggctacctggaggagctcctgggagttgggcctcaggtaaggagagccgtgctgggtttgggggtggcatggagtcaagggtggacagggcctcctggtcctgagtcacaatgctgtgcctacaggtggaggagttctctgtggagccacccctggatgacctgtctctggatgaggcacagtttgtcttggcccccagctgctgttccstggactccgctggccccaggcctgaagttgaggaggaaaatggggaggaagttttcctgagtgcctatgatgacctaagtccccttctgggacctaaacccccaatctggaagggttcagggagtctggagggagaggcagcargatgtggaaggcaggctctgggacagggtggggaagagcaggcatgctgggaagttggggaggacaagcaggctgagcctggaggcaggctagacatcagggaagaggcagagggaagtccagagaccaaggtggaggctggaaaggccagtgaggatagaggggaggctgggggaagccaagagacaaaagtcagattgagagaagggagtagggaagagacagaggccaaggaagagaagtccaaaggtcagaagaaggctgacagtatggaggctaaaggtgtggaggaaccaggaggagatgagtatacagatgagaaggaaaaagaaattgagagagaagaggatgaacaaagagaggaagcccaggtagaagctggaagggacctagagcaaggggcccaggaagatcaagttgctgaggagaaatgggaagttgtacagaaacaagaggctgagggagtcagagagsatgaggacaaaggacagagggagaaggggtaccatgaagcaagaaaagaccaaggagatggtgaagacagcagaagcccagaagcagcaactgaaggaggagcaggggaggtcagcaaggaacgggagagtggggatggagaggctgagggagaccagagggctggagggtactatttagaagaggacaccctctctgaaggttcaggtgtagcgtccctggaggttgactgtgccaaagagggcaatcctcactcttctgagatggaagaggtagccccacagccacctcagccagaggagatggagcctgaggggcagcccagtccagacggctgtctatgcccctgttctcttggcctgggtggcgtgggcatgcgtctagcttccactctggttcaggtccaacaggtccgctctgtgcctgtggtgccccccaagccacagtttgccaagatgcccagtgcaatgtgtagcaagattcatgtggcacctgcaaatccatgcccgaggcctggccggcttgatgggactcctggagaaagggcttggggrtcccgagcttctcgatcctcttggaggaatgggggtagtctttcctttgatgctgctgtggccctagcccgggaccgccaaaggactgaggctcaaggagttcggcgaacccagacctgtactgagggtggggattactgcctcatccccagaacctccccttgtagcatgatctctgcccattctcctcggccccttagctgcctggagctcccatctgaaggtgcagaagggtctggatcccggagtcgtcttagtctgccccccagagaaccccaggttcctgaccccctgttgtcctctcagcgcagrtcatatgcatttgaaacacaggctaaccctgggaaaggtgaaggactgtgattaggaccacagccctgggcaaaggggaccagcaagttgtcttgaatctccagggttcctgactagctgtctcctctgcagcatgagcagctgtagtgcccarctctataggctttggccctccagcttctctctttgactgtgggaggcactgccttggttggtttacctgaacttgtctccgacacaaagcacttatctcttaggagattcccaagaaagtcaacaagatcttgttcccagggagtgggtcattggccaaagggaacataaggtaggcagaaaacttaaaagagtttgttaaagtgaagactggagaaattcctcccttcctctgagctgtgaatctctcttcatgaaagccaaaggtagagacagggaggacagggccaggttagggccttccacacacaaacacttctagagttgcccattcctgttatgttcttggaccctaagatacctcctgtcccttttaaatccagattaagagaaacgtccaggaagagctctttgaagccctcaatatttgttggagggactggactcctctccagctccccaccctctgcctccagtcaccatgtgcaagagaggtcctgtacagatctctctgggctctcctttctcctttggaataacttgttcctatttcaggaaagggaaatggtgtcactcaggccctgggactgcttctccagccaggctggggccacaggtcccactctagtgaaggtcaatgtctcagaataaaagctgtatttttacacatagtgtggagtctcattattcttattaaagtctttggtgataggtattatatcttcacatatttggcaaaacattctttttcttcttcttgtttgggtgctcttcctcagttgttgtcatggagactagtggccagaaactagagctaggttcatggtggtcaggaaataaggaagagaaacttatatttacataatgcgttcattatgtgccaggaactggactaagtatcctgtgctcacaaaatctatgtccttgattttatttaatccacacaattctggaaggttggtgctagtatctccagtttatagatgaggaaactaaggctcaattaagtcaaaatgtttgccaaaggtctcagaggtaagaagtggcagagatgggtttgaaacctggatctgcctggcccccaagcttgaatttttcccattataccacactactccaaatccattcagggtaggtcttgattgagaagaatgggaatcaagattcctgtcacagaaggtgtgagcctttagaacactagaagctttggggtctttggatgagtgactgctgacgcgaataacaaggaacatatccaattctatgcatgccccgataggtcgtaatctctagcaggtaacctttcaaaaagacgccctgcgccaagatggcctcccaaatagcccttgttaaagatggcgcctccgtcggacgtccctcccttgatctcagctggattctcttctttcctggaatgaaaaaatgccctgccaagcactaagatattagtacaagttagtcgtctctttcccgttcttgtcgaaagtggccaggccttcagctacattctccaggacacggcttctttccggcttcacaaataacccacaaacaccaactctcatcaagatggagtgagcggaagtggggcagttctgagtttgagtttatgggcggggcgagagcgacacttccgcccctcaccaacatggccgcgggctggaagtgcgcatgagcagctgtctatggagatacctaggccgggagagggagaacacagttggagaaaatcggcagctgagacggccttggccggtgagtgtaggaccgggcagaagtctggaaactgggtggactggcaaggcagggcagctttgattttgtttccgtttttcaagttagagaacactgctggggaggaagcctttgttttgggggagggggctgtgctggttctttatctcataccctgctttgtgggccaaactctctcccttccccagagcgcgagcgtcccagccctcctgcgctgtccagctgcgcgccgcagccgccggcaccgggcgcttgagctccctagtccccgaggccctttcctgcctcctccgcggagcagctggggcgcggggctaagactgcggggctgcggggtcacggcgcaggctcccgggctcgcgcctggcgggcgctcagctccgtaagcgccttctggttggtgagcctgcagggagacgcctcattctaaggcaaggtctaggtgcctgacttctttcgggagttgattttttttccctttgtgtccagacttagcaagggctcttactgggcccttctggcctgagcgtgcacaccacaacgtcccatccctgtttccgtgtcaccgatccctaatgcctaggaaatgcttccggatgtccaactaagatttgaataagtaccctgaccccgttgctgggtgtcctcagagactgccccggctgacagctgtggccaatagagatgcctcctgtgccgggccctctatttcattgccttcccctgcagtcagcgcggcaagcttcgcagggcatttcctcttcaggtttgaagatggaaatgtaggtggtcccaaaacactagtgctacttccccttatcgactgggatctccttgcagcgttacttcgtctgtacggtttcactttcagttcctttttcaacattttcctcggacgcggtctttccgaggcttatccattgaaaattttccttggataggaaaggtttggaggaccttatgggtagagaatttccaaaaatcttgccccttttgtgttgggattatcttattgctttgtactgtgtagctgtttctttctggaggcatgtctgcccagctctttgtttttcctgccctctggctgggtgtcagggtcctaaggcagagcttgtaggtggattcttccccctttgtctcttcttcagaaccctgtttttttttttttaccccttcttgctcaggcttagttgatttggagttgtcatagcaacattttagcaacagtgttgttctgcaggaaggcttgatgaataaaatagagaatgcttgaagacgatccacttgggctttagggtttctaacagattatataaatctggataccccaaaacaagagtcctgtcagtagaatggggcccaaatgccaagtctagtctttgtggtcagggatattcttccagtggtagtgggcttcagatttcctcttcctaggtttgaaaacagaaatgtcttgatggacaacatgtggctgagaaactggaagaagcatcagtgtccatgacactgtattttttgatggtggggccaatacatggcccttcctgattcccatgaagctgccatcatggcaggtcataatagctttaatgatccatttagagatgtgttgttggctgggtgcggtggctcatgcctgtaatccaagcactttgggaggcggaggcaggcggatcacctgaggtcaggagttccagaccagcctggccaatatggtaaaaccccatctctactgaaaatacaaaaattagctgggcgtggtggtgggcacctataatcccagctattcaggaggctgaggcaggagaatcacttgaacccaggagatggaggttgtaagccgagattgtgccactgcactccagcctgggtgacagagcaagattctgtctcagaaaaaaaaaaaaaaaaaagaaagaaatgtgttgtttcggccaggtgcagtggctcacacctgtaatcccagcactttgggaggctgccgaggtggacagatcatgctctcaggagttcgagaccagccgggccaacatggtgaaaccccgtctctactaaaaatacaaaaattagccaggcgtggtggtgtgcacctgtaatcccagctactccggaggctgaggcaggagaatcacttgaacctgggaggcagaggttgcagtgagctgagatcgcgccactgcactccagcctgggtgacagagagagactctgtctcaaaaaaaaaaaaaaaaaagtgttgtttctgtcttccagtataattatccactctccaccaggagttggagtgataatggagggatggggaacactatttgtagccttgctttttcaatcactgtaggccagtcctcaacatcagtatggtggaggctgattgtcccctgcagatgactgggttattttcctggctatgtgttcatggaacctaagttctagaaccagagatactgttctgtttcctaaactcattgcaaacttcatgatttctaccaggacttagcactcaggcctgtgaatcaggaaatacaaagacctccaaaaaaggaccagttcctcggatgtgccccctcacagagagatgaaggggtgagtgaagaagaggtagggtctgggatgaaagatgggtggcctggaagaatgcaaaatgaccaagagcactgcctctggagtcaggcagacctggattcaggttctactctatcacttactgtgtgatttggtttctctatctataaaatggaagtagtgctatctatctcgtggtgctgtttttagtactaaataagattacatgtaatgtacttagcttagtgcttatgtacatagtaaacagtaaacactagttgttattctaacctaacccagcttctgttgggaatgccaatgagtttgcagccatatgttactgggccagtgagcttctcattgacttcttctcatactcttccttttgtcctttcaccacaaacaggcagcagaaaacagctgaaacggaagaggggacagtgcagattcaggaaggtgagtgctagaaacagaaccaagactaagaacccatcatggcctcccttccttccccaccagaccatctcctgtgcatcctcctccttccgtgacatgcaaatggaacgggggtagaaaggcagttaactcacagacttttcctttgttcttttaattcaggtgcagtggctactggggaagacccaaccagtgtggctattgccagcatccagtcagctgccaccttccctgaccccaacgtcaagtacgtcttccgaactgagaatgggggccaggtaagggagggggccaggtggctgcaggtgttatctggggttgggattgagggaggtaattgaacatgtcttggggagacctggcttggaggatgagttgaaagagtggactgttgcaggggagggaggtgctaatactggagtagagactggtgtgaggttagatgtatgctgaaacctctgtgtggggaaagaagggagaatggctgaatccatgtctctgaaggactttgttttggggccctatccaagggaagctttatgaggggccctaggattcccaacacttaatcttttcttctctcttcactccctctgccttcctctacacttctaggtgatgtacagggtgatccaggtgtctgaggggcagctggatggccaaactgagggaactggcgccatcagtggctaccctgccactcaatccatgacccaggtacagggtatgggctggggaggtcactagagttctgagaagtaagatgaagaagggaatcagtaggatgggggtgaagctaggaacagtgaggcatctaaggctgccttgtcccaaagcactaggctctccttttctggatgtttctctctctctctctctctctctccaccctacctaccaccccaagggatagaagctgcagagtggtgtagtgggaagaagtttttgactgttaccagaatcagttttcttgctccccttcccaggcggtgatccagggtgctttcaccagtgatgatgcagttgacacggaggggacagctgctgagacgcactatacttacttccccagcacggcagtgggagatggggcagggggtaccacatcggggagtacagctgctgttgttactacccagggctcagaggcactgctggggcaggcgacccctcctggcactggtgagatattgcatgaggatgctggctgaaagggctagaataggctgtgggacatgactggtaggcagtgagccttcactcatgactcttagtgatcattaagacctggacaggcagtgagtccggggctgctcttctattagcatgttctttttagaggaggggaccagggtcttcacctcagggcttggtgaggttcctacccatgtcctgacagaacctaccctgcatcttcacaggtcaattctttgtgatgatgtcaccacaagaagtactgcagggaggaagccagcgctcaattgcccctaggactcacccttattccccgtgagtgacccttgtttcttctcagattccgtaagtggttttttttttttttttttttttttgagacagagtcttgctctgtcacccaggctggagtgcagtggcatgatctcagctcactgcaacctctgcttccagggttcaagcgtttctcatgcctcagcctcctgagtagctggaactacagacatgtaccaccacccctggctaatttttgtatctttagtagagacagggtttcaccatgttggccaggctggtctcgaactcctgacctcaagtgatccgcctgcctcggcctcccaaagtgctgggattacagatgtgagacaccacacccagctaccataagtggtcctaatacctgctaaatcttgtataattcc

SEQ ID NO: 8869 - DNA, 19825 bp, Homo sapiens
ctgtaatcccagcagtttgggtggcagaggcaggcggctcacaaggtcaggagtttgagattagccggccaatatggtgaaaccctgtctctactaaaaatacaagccgggcgcggtggctcatgcctataatcccagcactttgggaggctgaggcaggcggatcacgaggtcaggagatcgagaccaacctggctaacatggtgaaaccccgtctctaccaaaaatacagaaaattagccaggtgtggtggcgggtgcctgtagtccccgctactcaggaggctgaggcaggagaatggcatgaacccaggaggcagagcttgcagtgagccgagatcgcgccactgcattccagcctgggcgacagagtgagactctgtctcaaaaaaaaaaaaatacaaaaattagctaggcacagtggcgggtgcctgtagtcccagctactcaggaggctgaggcaggagaatcgcttgaacctgggaggctgaggttgcagtgagccaagatcacgccactgcactccagcctggttgacagagcgaggctccatctcaaaataaataaataaattaattaattaaaataaattttaagaaaagagaaagaaagtttaataatgatttgaaaggttatatatcagatatcacttaaggccagtcacagtggctcacgcctgtaatcccagcactttgggaggccaaggcaggtggatcacctggggtcaggaactcgagaccagcctgaccaacatggtgaaaccccttctctactaaatacaaaaaattagccaggtgtggtggtgcatgcctgtaatcccagctactcaggaggctgaggcaggagaagcgcttgtacccaggaggtggaggttgcagtgaaccaagattgtgacactgcacttcagcctggatgacaggagtgaaactctctctcaaaaaaaaaaaagaaaaagaaaggtatcggccaggcgcggtggctcacgcctgtaatcccaacactttgggagaccaaggcaggtggatcacgaggtcaggagatcgagaccatcctggctaacacggtgaaacctgtatctactaaaaatacaaaaacttagccgggtgcagtggcgggcacttgtagtcccagctactccttgggaggctgaggcaggagaatggcatgaacccgagaggcagagcttgcagtgagttgagtcgagatcacgccactgcactccagcctgggtgacagagcgagactctgtccaaaaaaaaaaaaagctatcacttaaaaatagcagcaagtgaatgagtaagtcagcctcaccttcaaaatagtctaacctgaccaccattcacaaccctactgctttcatcctcttctaagccactagcatcccctggctggctgcaagtctcctcattggtctctctgcttctgctcttggcagtcttcagtatatcctcaacacagccaaagtcatcctgttaaatcaggctaccctcctactcagacctctctgaaggcttctagtcttgcccagaaggcccacaatatcctacacaatctgctcccatcttacctttgtgctgtcatgacctgctgctttcctccatacttatgcagcttctgctagccaaatctccctgcagctccctgaacgcagtgaagatactcccatctcaataccttggcagttgctattccctctgcctggtactttatggctcaatccctcaccttcttcagatccttcctcaatgtcaccttctcactgaagtcttctttaaagatctattaaagttgtaaaccaccaccacccccaatatatctatgtcgctactcaactttctttttctccatagcacttttcaaacttaacattctagtctgggtgtggtggctcatgcctgtaatcccagcactttgggaggctgaagcggggggatcatttgagcccaggagttcaagaacagctgggcaacataaggagacctggtttaaaaaaataaaaataaataaataaattaaaacttgacattctattatttatttttatagcatattgtatatttcctggtactagggtacaatctccagaaaggcagaaatgtgtacctgacttgttgctatatccccagcatctagaatatgttctggcacataataggctcgcaattaatgcttttaaaagaaataaacacacaaatttgtgattagaaaacattcatgaagcctgctgttagttctagagcagccactaaaaggatagaaaaaaagcttacaattttaaaactagtagagagaaaaaaacaatgacacaattgtgtcagtttcctagggttgccataacaaattgtcacaacctaggtggctttttaagaaattactctatttcagaggtgagaagtccaaaattaaggcatcagcaggactgtgctctgtccaaagactctgcaggaggatcttctcttgcctcatccagcttcaggtagaaagcaatccttgggttttttgtttgtttgcttttggttttgatagaaatggagtttcactgtattttttgcccaggctggtctcaaactcctgggctcaagcaatcatcccacctcagcctcccaaagtactgggattacaggtatgaggcaccatgcctggccaatccttggtatttattgatttgtggccacataactcccttctctgcctccgtcttcatacagctgccttccatctgtgtgtgtttctgcatctgtgtctcttctcttcttataaggatattagttatattggaattagggcccaccctaatccactataactgcattttaaatagttgcatctgcaaaaatctcatttccaaataaggtcacattcacaggtaccttggattaggactttaacataccactttagggaacacagttcaactcacaatagcaatcatcagtcttggtcttgaattatgtctatattcatacagaatgctcagcaatgctatgatctgaacatttatgtcctctcaaattcatatgtaggtttgttaatatcctgtttagaattgttgcatatacagtcatgagggtggttggcttataattatcttttcttgtgatactcttgtgagattttcatatcaaggttatgctggatacattgttagaggagcagcccacaagaccaccctcacttctgacaccgattgcaaggttggggtcccccaatatcctcctcctctctgacattaattgtcagcttggggggaccccaagaccacccgtgagtttaataattcacaagacaaactcacagtgctcatggaaagttacggtttattgcagctaagaatacaggttaaaatcagccaagggaaggggtacatagggcagagttcaggaaagctctaaacacagaactcccagttgtcctttccatgagttgtggacagtgttaatttcctgacatccagtgtgtgataatactcgcagaatattgtcaaccagggaagcttactcaggccagtttattaggctcaatcacataaatctggtcagctgccctcagtctcctagcccttgcaaagtttgagctgataccactgttctggtgtggggttttcatgaggttgcagtcacatggtggctggggttgggataatctttaagactctttctctaacatgtccgatccctgggtgggcagactgaaacagctacagaaagaagcatatatggcttcttgggcatctttctacttctatatgatcttttcacatggtctctccagcatagcagcttcaggatagtggacttctcacttaataaatcaggatccgaaggcacaagtcctaagaaagagaaagccaggaagaagctgtatcattttttaggatgcagtctcagaggtcacacttctgccatattcttttcatgaaaacttagtcactaagcccgcccaaatttggtggggtggggggaattaccaaagaattggcaggctatatgcagaatatgccatatcagtgaattttctatgtcagaatgatctttccaaggtgaaaaacaatactgggtcagggttggtctctggattttgaaagcaacacatataacatgtgagcctgctgctttcatctaggccaattttaagtggggcacaaagcaagaaaagcctccacggcaagtctaggctttgatgaaaattttccttccacgtggaccttatggttgagcataccatataagattgctagttggaaaaggtattttagctctccctttcccctccccctcccccctccctctcactctccttctcccgctttctgctcggtctccctctccctctgtccttctccggctttccacggtctccctctgttgccgaagctggactgtaccgccatgatctccgctcgctgcaacctccctgcctttttctcctgcctcagcctgcccagtgcctgggattgcgggcgcgcgccgccaggcctgactggtttttgtattttttggtggagatggggtttcgccctgttggacgggctggtctccagctcttgaccgtgagtgatctgcccgcctcagcctcccgaggtgctgggactgcagacggagtctcgctcactcagtgctcagtgttgcccaggctggagtgcagtggggtgatctcggctcgctacaacctccacctcccagccgcctgcctcggcctcccaaagtgccgagattgcagcctctgcccggccgccaccctgtctgagaggtgaggagcgtctctgcctggctgcccatcgtctgggatgtgaggagcccctctgcccagccgcccagtctgggaagtgaggagcctctctgcccggccgcccatcgtctgggatgtggggagcgcctctgcccggctgcgaccccgtctgggaactgaggagcctctctgcccggctgccaccctgtctgggaggtgaggagcgtctctgcccggccgccccatctgagaggtgaggagcccctctgcccggcagccgccccgtctggaaagtgagaagccccctccgcccggcagccactccgtccgggaggtggggggcagcccccgcccagccagccaccccatccgggaggtggggtcagcccccgccctgccagccgccccgtccgggaggtggggggcagcccctgcccggccagccgccccgtccgggaggtggggggtgcctccgcccagccgccgccctgtgtggaaggtgggggggcgcctctgcccggccgccccgtctaggaagtgaggagcccctctgccccgccgccaccccgtctgggaggtgtgcccaacagctcattgagagcgggccatgatgatgatgacggttttgtggaatagagagggggaaatgtggggaaaggagagagagatcagattgttactgcgtctgtgtggagggaggtggacgtgggagactccagtttgttctgtactaagaaaaattactctgccttgggatgctgttaatctataaccttacccccaaccccgtgctctctgaaacatgtgctgtgtccactcagggttaaatggattaagggcggtgcaagatgtgctttgttaaacagatgcttgaaggcagcatgctcgttaagagtcatcaccactccctaatctcaagtacccagggacacaaacactgtggaaggctgcagggtcctctgcctaggaaaaccagagacctttgttcacatgtttatctgctgaccttccctccactattgtcctatgaccctgccaaatcctcctctccgagaaacacccaagaatgataaataaatactaaaaaaaaaaattaaaaaaagaataccacagggaaaaggtattgtatggagtctctgacaagccccaataggagaaccacaccactcacctctagggttttagagtaagactgtttctgtttggtcttctgccaattattctccatttgaacagctcctgccttgctgctgggtgctggagaggctaaatgtatgactaaggagcatcaagtgactaccaaacccaaactccccatcaagcactgggtacgaactgtgagtaaaaacttcctggccaggggcagtggctcatgcctgtaatcccagcactttgggaggccaaggcgggtggatcacctgaggtcaggagttcgagaccagccatggtcaacatggtgaaaccccttctctactaaaaatacaaaaaattagccaggcgtggtggtggcgcatgcctataatcccagaatcccagctactcaggaggctgaggcaggagaatcacttgagcctgggaggcagaggttagagcaaagttccatttctaaacaaaaaaaaaacaaaaaacttccttcatgacagtcatttttgtgtctgtatgccttaccatacccaaaacaaattccaggtacccttaaaacacaatgtgaccaacagacttcctcccctcaaagaaggtgatcaaaacaagagctgcatttatatatgtatataatatatatatgcatttatatattatatatattatatatttatatttatatataatattatatgtatatataatataataatatataataatataaatatatatttacatatattatatatttatatatacatttatagaattatatgtaatatttatatataatatatatttatatatgtacatatatattgtatatatatgctatatatatatatatatatttattttttttttttttttttttttttttgtagagactggatttcgccatgtcgctggtgctggtcttgaacttcctggactcaagcaatccacctgcctcagcctcccaaagtgctaggattggccaggcgcaggggctaacacctgtaatcccagcactttgggaggccgaggctgggggataacttcaggtcaggagttcaagaccagtctggccaacatagcaaaatcctgtatctactaaaaatacaaaaactagtcaagcatggtggcaggcacctataatcccagctactcgggaggctgaggcaggaggatcgcttgaacccaggaggcagaggttgcagtgagccaagatggcaccactgcactctagcctggacaacagagtgagactccatatcaaaacaaaacaaaaaaaaaaatgattcttcctgcagcacgtatgtgctgtcgctacagagcagcgccatggcagactcagaagcactgagcttcgaacacatagggccttgatccctggctcctgcaggctgtcaacaacttgggctgctcgtgacctacggtgatccaggaaaaggctatcccattggccctagaggggaaggacctcctggctcaggctggcaggggctccaagaagacagctgcttatgctattctgatgctgcagctgttgctccacaggacggcgacaggtccagtagtagaacacgcagtgagaggccttgttcttgctcctaccaaagagctggcacagcaggcacagtccatgattcagtggctagctacctactgtgctcgggatgtccgagtggccaatgcctcagctgctgaagattcagcctttcagagagctgtgctgatggagaagccagatgtggtagtggggaccccatctcrcatattaagccacttgcagcaagacagcttgaaactccgtgactccctggagcttctggtggtggacaaggctgatcttttttccttggctttgaggaagaactcaagagtctcctctgtcacttgccccggatttaccaggcttttctcatgtcagctattgttttttagttccttcttcttcctcttcctcttcctcttttcttcttcttcttctttttttttttattattttttttttattgatcattcttgggtgtttctcagagagggggatttggcagggtcataggacaatagtggagggaaggtcagcaggtaaacaagtgaacaaaggtctctggctttcctaggcagaggaccctgcagccttccacagtgtttgtgtccctgggtacttgagattagggagtggtgatgactcttaatgagcatgccgccttcaagcatctgtttracaaagcacatcttgcaccgcccttaatccatttaaccctgagtggacacagcacatgtttcagagagcacagggttgggggtaaggtcatagatcaacagcatcccaaggcagaagaatttttcttagtacagaacaaaatkaagtctcccatgtctactcctttctacacagacacagcaacaatctgatttctctatcttttccccacctttcccccttttctattccacaaaactgccatcgtcatcatggcccgttctcaatgagctgttgggtacacctcccagacggggtggtggccaggcagaggggctcctcacttcccagaaggggcggccgggcrgaggcaccccccacctccctcccagagggggcggctggccgggcgggggctgaccccccacctccctcccggatggggaggctggccgggcgggggctgacccccacctccctcccggccggggaggctggccaggcgggtgctgccccccacctccctcccggatcgggcggctggccggcagggggctaacatttaagtctttaatccatcttaaattaatttttgtacaaggtgtyaggaagggatccagtttcagctttctacatatggttagccatatgtagaaatggccatctacaattggccagcaccatttattaaacagggaatcctttccccatttgttatttttgtcaggtttgtcaaagatcagatggttgtagatgtgtgatgttatttctgagggctctgttctgttccattggtctatatctctgttttgatacaagtaccatgctgttttggttactgtagccttgtagtatagtttgaagtcaggtagtgtgatacctccagctttgttctttttgtttaggattgtcttggcaatgcgggcttttttttggttccatatgaactttaaagtagtttttctaattctgtgaagaaagcctttggtagcttgatggggatggcactgaatctataaataaccttgggcagtatggccatgttcacgatattgattcttcctatccatgagcatggaatgttcttccatttgtttgtgtcctcttttatttcattgagcagtggtttgtagttctccttgaagaggtccttcacatcccttgtaagttggactcctaggtattttattctctttgtagcaattgtgaatggcgttcactcatgatttggctctctgtctttgtctgttattggtgtataggaatgcttgtgatttttgcacattgatgttgtatcctgagactttgctgaagttgcttatcagcttaaggagattttgggctgagatgatggggttttctaaatatacaatcatgtcatctgtaaacagggacaatttgacttcctcttttcctaattgaatgccctttatttctttctcctgcctgattgccctgcccagaacttccaacactgtgttgaataggagtggtgagagagggcatccctgtcttgtgccagttttcaaagggaatgcttccagtttttgcccattcagtatgatattggctgtgggtttgtcataagtagctcttactattttgagatatgtcccatcaatacctagttgattgagagtttttagcatgaaggctgttgaattttgtcaaaggccttttctgcatctattgagataatcatgtggtttttgtctttggttctgtttttgtgatggatttcgtttattgattcatgcatgttgaaccagccttgcatcccagggataatgccaacttaatcttgatggataaggtttttgatgtgctgctggattgggtttgccagtattttagtgaggatttttgcatcaatgttcatcagggatattggtctaaaattctgtttttttgttgtgtctctgtcaggctttggtatcaggatgatgctggcctcataaaatgagttagggaggattccctgcttttcatttattggaatagtttcagaaggaatggtaccagctcctctttgtacctctggtagaattcagctgtgaatttgcctggtcctggactttttttggttggtaggctattaattattgtctcagtttcagagcctgttattggtctattcagagattcaacttcttcctggtttagtcttgggagggtgtatgtgtccaggaatgtatccatttcttctagattttctagtttatttgcatagaggtgtttatagtattctctgatggtagtttgtatttctgtgggatcagtggtgatatcgcctttatcatgttttattgcatctatttggttcttctctcttttcttctttattagtcttgctagtggtctatcaattttgttgatcttttmaaaaaaccagctcctggattcattgatgttttcaagggtttttggtgtctccatctacttcagttctgctctgagcttagttatttcttgccttctgctagcttttgaatttgtttgctcttgcttctctagttcttttaattgtgatgttagggtgtcaaytttagatctttcctgctttcttttgtgggcatttagtgctatacatttccctccacacactgcctttaaatgtgtcccagagattctggtatgttgtgtctttgttctcattggtttcaaagaacatctttatttctgccttcgttgtgtacccagtagtctttcaggagcaggttattcagtttccatgtagttgtgcagttttcagtgagtttcttagtcctgagttctaatttgattgcactgtggtctgagagacagtttgttatgatttctgttcttttacatttgctgaggagtgctttacttccaactatgtggtcaattttggaataagtgcaatgtggaactgagaagaatgtatattctgttgatttgaggtggagagttctgtagatgtctattaagtcagcttggtgcagagctgacttcaagtcccagatatccttgttaaccttctgtctcgttgatctgtctaatattgacagtggggtgttaaagtctcccattattattgtgtgggagtctaagtctctttgtaggtctctgaggacttgctctgtgaatttgggtgctcctgtattgggtgcatgtatatttaggatagttagctcttcttgttgaattgatccctttacctttatgtaatggccttctttgtctcttttgatctttgttggtttaaagtctgttttatcagagactaggatagcaacccctgcttttttttgcttggtagatcttcctccatccctttattttgagcctatgtgcatctctgcatgtgagatgggtctcctgaatacagcacactgatgggtcttgactctttatccaatttgccagtctgtgtcttttaattggagcatttagcccatttaaatttaaggktaatattgttaatatttacatttaagtttaattatgtgtgaatttgatcctgtcattatgatgttagttggttattttgcttgttagttgatgcagtttcttcctagcatcgctggtctttacaatttggcatgtttttgcagtgcctggtaccggttgttcctgtccatgtttagtgcttccttcaggaactcttgtaaggcaggcctggtggtgacaaaatctctcagcatttgcttgtctgtaaaggattttatttctccttcacttatgaagcttagtttggctggatatgaaattctgggttgaaaattcttttctttaagaatgttgaatattggcccccactctcttctggcttatagagtttcttctgagagatatgctgttagtctgatgagcttccctttgtgggtaacctgacctctctctctggctgcccttaatattttttccttcatttcaactttggtgaatttgacaattatgtgtcagattcaccaagatactactcttctcgaggagtatctttgtggtgttctctatgtttcctgaatttgaatgttggcctgccttgctaggttggggaagttctcctggataatatcctgaagcatgttttccaacttggttccattctccccatcactttcagatacaccaatcaaacgtagatttggtcttttcacatagtcccatatttctcggaggtgttgttcatttctttttactcttttttctctaaacttctcttctcagttcatttcattaatttgatcttcaatcactgataccctttcttctgcttgattgaattggctactgaagcttgtactgaaacttgtacatgcgtcacatagttctcgtgccatggttttcagctccatcgggtgatttaaggtcttctctacactgttgattctagtttgccattcgcctaatcctttttcaaggtttttagcttccttgcgatatgtttgaacatcctcctttagctcagagaagtttgttattatgaccttctgaagcctacttctgtcaacttgtcaaaatcattctacatccagctttgttccattgctggcgaggaactgcaatcctttggaggagaacaggctgtctggtttttagaattttcagcttttctgctctgrtttctccccatctttgtggttttatctacctttggtctttgatgatggtgaagtacagatagggttttggcatggatgtcytttttgttgatgttgatgctattcctttctgtttgttagttttcctcctaacagtcaagtccctcagctgcaggtctgttggagtttgctggaggtccactctagacctgtttgcctgggtatcgccagcagaggctgcagaatagcaaatatcgcagaacagcaaacattgctgcctgatccttcctctggaagcttcgtctcagaggggcacccagctgtatgaggtgtcagttggcccctactgggagatgtctcccagttagactacataggggtcagggacccacttgagggggcagtytgtccattctcagagctcaaacactgtgctgggagaaccactgctctcttcagagctgtcagacagggatgtttaagtctgcagaagtttctgctgccttttgttcagttatgccctgcccctagaggtggagtctacagaggcaggcaggcctccttgagctgcggtgggctccacccagttcaagcttccaggccactttgtttacctactcaagcctcagcaatggcagacgtcccctcccccagccaggctgccacctcgcagctcaatcttgtactgctgtgctagcagtgagcaaggctctgtgggcgtgagacccactgagccaggtgcaggatataatctcctggtgtgccatttgctaagaccattggaaaagcacagtatttgggtgacagtgtcctgattttccagctacagtctgtcacagcttcccttggctaggaaagggaaatcccccaaccccttgtgctttccaggtgaggtgatgccccaccctgcttcagctcaccctccgtgggctgcacccactgtccaaccagtcccaatgtgatgaaccaggtacctcagttggaaatgcagaaatcatccgtcttctgcattgatcacgttgggaactgcagaccagagctgttcctatttggccatcttggaacccttcccaatatttagtattttaaatatttagtttcttgttagctggtcttcagttgacttggttctctatccagttacagccatggtgcatgttgcatgcagtcgtctatacattatttaaaygggcttaaatattaaatgtgttacccaccaataataaaatagacccttatgaaaactataaaaacaaaacacacaaaaaaagccattgggtacatttgttcaaatctttttttttttcgagatggaatttcactatttgttgccctggctggagtgcagtggcacaatctcagctcactgcaacctccgcctctcaggttcaagcaattctcctgtctcagcctccccagtagctggaattacaggcacctgccatcacacccagctaatttttaatatttttagtagagatggggtttcaccagttggccaggctggtctcgaactcctgacctcaggtgatccgctccccttggcctcccaaagtactgggattacaggcgtgagccaccatgcctggccttaaatctctttttttaaatgctcttgggcttggcacggtggctcagccctgtaatcccagcactttgggaggctgaggcaggcaaatcacgaggtcaggagatcaagaccatcctggctaacacagtgaaaccctgtctctaccaaaaatacaaaaaattagccgggcatggtcgtgggtgcctgtagtcccagctacttgggaggctgaggcaggggaatggcatgaacctgggaggcagaggttgcagtgagccaagatcttgccactgtactccagcctgagcgacagagcaagactccatctcaaaaaaaaaaaaaaaaagttctttattgccttcagctgtcagggcttcatgacttccattctatagaatttaaacaaaatcctctgtttctcaatggcagcacagctggcatttgagatcagaccattctttgtcatggagcagggatgtcctgtgcagtgtaaggtgtttcacagcatctccagcctctattcactagatgtcagtagcgctcctgccaggccttccaccaccactcattgcggtgtctccagacattgccaaatgttccctagatgtagggttgccaggtaaaatattgcatgggacaaacatactaaaaatattatcgattgtttatctgaaatgcaaatttaagttggccttccatatctttatttgctaaatctggcaaccctatctgagaggtgaaaaaccctatctgagaggtaaaatcaccactacatctcctacctcccatcccatttgaaaaccaatgctctagtccacagggagcaatggagaaaaagtgtggtaatgggtttgggaaatgttatgattagatttgcatttggagcaaagcactttttgtttgtttgttttgtgttgtgttgttttgtttgagacgcagtctcactctgttgcccaggctggagtgcagtggcatgatctcagctcactgcaacctccgcctctggggttcaagtgattctcctacctcagcctcccgagtagctgggatgacaggcacccaccaccacacccagctaatttttgtatttttagtacagacggggtttcaccatgttggccaggatgttctcgatctcttgacctcgtgatccacccgcctcgacctcccaaagtgctgggattacaggcatgagccaccgcacccagcctggagcaaaaaaactataagacgtccaagccctcttcaccagccaggactgctgtagtcaacatcctgtttgagacctgattggaatgcctggctctctttttttttttttttttttttgagatgtagtctcgctctgtcacccaggctggagtgcagtggtgcaatcttggctcactgcaacccccacctactgggttcaagcgattctcctgcctcagcctcctgagtacctgggactacaggtgcacaccaccacacctggctaatttttgtatttgtagtagagatggagtttcaccatattggctagtctggtctcaaactcctgaccttgtgattcgcctgcctcggcctcccaaagtgctgggattacaggtgtgagccaccacacctggccatctctcctttttagtaagcaactagagttgggattccagatgtggccaggcacatgcacctctggagagactaccctgtctgctaaagctggaagaataaaagaaatgggtgattgtgctatctcctgtttctcttctttaatatgtttatattgaaggcttaatttaattagctaataaaggtgcattaggaagaactaacatgaaatattttctcttgtccttaaatccagttcagggatctcctaaaaacaggaacatacttgtgttctgggacagatgagacttgaaattccaaacccagaatgtctttgtctttatttttcttttcttttctttttttttttttttttttgggtaaagttttgctctgtcacccagggtggagtgcaatggcgagatcttggctcactgcaacctctgcctccctggctcaagccaaccttccacctcagcctcctgaggagctgggactacaggcacgcattacttcctagctaatttttgtacttcttgtaaagatgaagttttgccatgttgcccaagctggtctcaaactcctgacctcaggcaatccacctgcctcggcctcccaaagtgctgggattacaggcatgagccaccatccctggcccagaatgtctttttatttttcaatttttttatatctttttgctaatcttctctgtattgttccaattttagtatatgtgttgctgaagtgaacatttatttttattcaatgggttcttcctagccactgtgcaagcccagaatatgtgaggtggaattcaccagaaccataggtattcttttaaaatatccctcaacacatcagccaatttataaaaagaattcaaagaaacatagagttgcaaattgatgtgatttagtctcctctcctccttgttagaattccagtttttccgtctccaaatagccggggttggaagatgggttctcgccctgacaccgcagagctctgtctcatctatagaacaagagtacagccgcctccgttatctcccgactgcagctgctcttaacgtgagttccatatccatcccagtcaaaggcggagaagtccccacactgacggggtttgccctgtgggaagaaccctcctccaccgatgcagtgctgggaaacagaaagaagaaacactgtgaggaatttgatttgctgctgacaccagtgagcgcaaggctggtctcgaactccagacctcaagttatccgcctgcctcggcctcccaaagtgctaggattacaggtgtgagctaccacacctggccctatgcatgtattttaaagtagtaatgcatgcaggaacatacacaaacacgcactaatggacagtctgaggagcacagagccagtagagaaacttgtcaaggaaaagggcataaagacatatactctagtccacccccactgcccacgtggtcgtcatcctccgaattctaatctgcgagtccctccatgagagaatagctgcctcatcttagctggaaaatgaaaaagctgaaagctggggcagggaagatggaaccgtgagttcagactgtcagttggggagggaagggggccctaagtgaatgcccttgttcttgatggctctgacgctctcttcctccaacccctaggcacaggatgtccctcaaatacaatctcccaccactacaactgtggtgctgtctcctacaagactggaaaaacaataaaaatataaagcttctaaaagttaagattaatattggagaatattttcacgacctcggtgtaaggaggtacatcttaaagaaaacattaaaagtactaaccataaatgaaaagtttgataaactgaattccattaaaataaattatactcagccgggcacggtgactcatgcctgtaatcccagcactttgggatgccaaagtgggcagattgcctgaggtcaggagtttgagaacatggagaaacccatctctactaaacccatctctactaaaaatacaaaaaaattagccgggtgtggcagtgcattcctgtaatcccagctactcaggaggctgaggcaggagaaacacttgaacccgggaggcagaggttgcagtgagcagagatcctgccattgcactctagcccaggcaacaagagtgaaactccctctcaaaaaataaataaataaatacataagatttaaaagacaaataaattatactcaacttctggcatctactactccaaactttgtaccacttaatttttattaaaaatatggactcttcaggctgggcgtggtggctcacgccagtaatcccagcactttgggaggccgagacgggcggatcacgaggtcaggagatcaagaccatcctggctaacatagtgaaaccccgtctctactaaaaatacaaaaaaaattagtggggcgtggtggtgggcccctgtagtcccagcaactcgggaggctgaggcaggagaatggcatgaacccgggaggtggagcttgcagtaagctgagatcgcgccactgcactccagccttggtgacagagcgagactctgtctcaaagaaaaaaaaaaagaaagaaaaggactcttcaaagaaaaaaaaagaaataaaaaataaattatattcataagacatcatcaggagagtaatgagagtaaacagaatgagagtaagcgagtaaccacagagacacacattgatacaccccacacaggtacacacatgtgcatacccatgcacacacatggtgaagggggccagcccctccacatctgtgggtatttctcgtcaggtgggatgagagactgagaaaagaaataagacacagagacaaagtatagagaaagaacagtgggaccaggggaccagcactcagtatacggaggacctgctccggtgccagcctctgagttccctcagtatttattgatcattatttttactatcttagtgaggggagtgtagcagggcaacaggtaaggagaaggtcagcagggaaacatgtgagcaaaggaatctgtatcatgaataagttcaaggaaaggtactgtgcccggatgtgcacataggctagatttatgtttctctttacccaaacatctcagtgtagcaaagagtatcagagcagtattgctgccagcatatctcgcctccagccacagggcggttttctcctatctcagaatagaatgaatgggagtggtcagctttacacccagacattccattcccagggatgagcaggagacagaagccttcctcttacctcaactgcaaagaagccttcctctttcactactcctcctcagcacagaccctttacgggtgtcaggctgggggatggtaaggtctttcctctcccatgaggccatatctcaggctgtctcagtgggggaaaaccttggacaatacccaggctttcttgggcagaggtccctgcggctttccgcagtgcattgtgtccctggtttatcaagaatggagaatggcgatgacttttaccaagcatactgcctgcaaacatattgttaacaaggcacatcctgcacagccctaaatccattaaactttgattcattacagcacatgtttctgtgagcacagagttggggctaaagttacaggttaacagcatctcaaagcagaaacaatttttcttagtacagattaaaatggagtttcttatgtcttccttttctacatagacacagtaacaatctgatctctctttcttttccccacacgtgggccattgatctccccaaaaactcacatgctcagtgttacagccagtaacttttatcccagcacaaagggcgttggctgctctctcgttattaaacacccggaactgaacgaatcctgcaacaaattcccctgaaaaagaagaggtgaagaaacagccaagtagtcaaaggatgaactagaagcagcatcccattggccagtccagggattccctaagccaaaagctgaggctacagccaaacaccccaggctgtaggggtgc

SEQ ID NO: 8870 - DNA, 24341 bp, Homo sapiens
ttaatcaagttaagtcttcgtgtgtcagcaggtgattaaggcctgtttagaagaagcagtggggaaggggctgagggaagcttggagagtttagtagggtggtcaggaaagccctcactaagaggtgatattgaaataaagacctgaaggaggcaggtgagaagagttgcctggggaagggcatttttttttttttttttcctgagatagggtctcactctgtcgtccatgctggagtgcagtggtacgatcttcgttcactgcaacctccgcctcccaggctcaagcagtcctcccatatcagcctcctgagtagctgggactacatgcatgcaccaccacaactggctaacttttgtattttttgtagaggcggggtctctttgtgttgcccaagctggtctcgaactcctgggctcaagctattctcctgctttggcctcccaaagcgctgggattataggcgtgagccatcacacccagccaagaaggacattctgagtatcggggccagctaggacaaatgcaggattgcacagaagccgtgtggccagtgcagttactgagggagagaagatggtagatgagttccaagaaataacggaggggctggctcatggagagtctggaaggtcacggagagattttgccttactcttagttggaagcctgtggaggagcctttctcattggggctcacctgagccctggaaggcagaagtgactagagtgattatttgttcagttctcccagggatgggaggcacctcatcctgggagagcagctccttagttgcatacactggctgcctgagagcattagggcctcaggctctggaaccctgcttgagagaggctgcgaagtgttcagagcaggacagtgccaggtgctggctgatacttcacagagcatcgctgtggcggctgcagaggacagacaggcccaggcattggagcctgaggccagtcacacagcattgcaggcttggggtggttgaatgggatggtgagaggaggtcagattctgggtgtattttttcttttttttttattttgaggtggagtctcgctctgtcgcccaggctggagtacagtggcatgatctcccctcactgcaacctccgcctcccgggttcaagcaattctgcctcagcctcctgagtagctgggactataggcgcccgccaccatgcctggctaatttttgtatttttagtagagattttgtatctctacttgtatttcaccatattggctaggctggtctggaactcctgactttgtgatccgcctgcctcagcctcccaaagtgctgggattacaggcgtgagccaccacgcccagccacttctgggtgtattttgaaggtcgagcccacaggatttgtggaaggattggatgaggaaaagaggggcagatgccgaggttttttgtctaagcacctagcgggatggggggttgtcactcatttgtccaggaattaccttcaagctgcctcctgtgtgcactgctttaaagaatagtgaaccaaacaaagatcgcttcctttggggagctgcctttccgtgaagaaatttcctacttgaagcctgacgtagtaaagatcgggggagggttagacagatacagtggtccccaaccattttggcaccagggactggtcttatggaagacagtttttccacagactgttggggggatggttttgggatgaaaccgttctgcctctgatcatcaggtgttagattctaataaggagcgcacacctagatccctcgcatgcatagttcatggtggggttcgcactcttacgaggattgaatggtgcgctgctccggtaggaggctgggctcaggctgtaatgcctgctcgcccaccactcacctcctgctgcatggcctggttcctaacaggccacggaccactactgttccatggcccggaggttgaggaccccgagatacaggacaattctgtggcaagcaggactgtcccctcgccaaagatgggacatcgaggctccttggagcaccctgtggccaccttgcagcagcctctgtttccccatgtttccatgacctggtgtccatctgtcttccccagtttgggagcttctctccgaggaggacctgggcctggtgtggcacctgctgtgtgagcggggccatgtccaacggccttcttggggactttgggtcggggagaagttctgcctgggttttactgccttctcccaaccccacactgtctcccctggcagcggttgatcgacaagaccaaggtgacatatctgaagtggctgcctgagtcggagagcctgttcctggcatcacacgccagtggccacctgtacctgtacaacgtcagccacccctgcgcctcggccccgccccagtacagcctgctgaagcagggcgagggcttctctgtctatgctgccaagagcaaggcaccccgcaacccgctggccaagtgggcggtgggtgaggggcccctcaacgagttcgccttctcgcccgatggccggcacctggcctgtgtgagccaggatggctgcctgcgcgtcttccacttcgactccatgctcctgcgtgggctcatgaagagctactttgggggcctgctgtgtgtgtgctggagccctgacggccgctacgtggtgacgggtggcgaagatgacctggtcaccgtgtggtccttcaccgagggccgcgtggtggctcgaggccatggccacaagtcctgggtcaacgctgtggcctttgacccctacaccacaagggcagaggaggcggcgacagcagccggtgctgatggggagcggagcggcgaagaggaggaggaggagcccgaggctgcgggcacaggctcggccgggggcgccccgctctctccactgcccaaggctggctccattacttaccgctttggctcggcgggccaggacacgcagttctgcctgtgggacctcactgaagacgtgctctacccgcacccgcccctggcccgcacccgcaccctccctggcacacctggcaccacgccaccggccgccagcagctcgaggggtggcgagcctggcccaggccccctgcctcgctcgctgtcccgctccaacagtctcccgcacccagctggcgggggcaaggcgggcggcccgggtgtggcggcagagcctggcacaccattcagcattggccgcttcgccacgctcacactgcaggagcggcgggaccggggggcagagaaggagcacaagcgctaccacagcctgggcaacatcagccggggtggcagtggcggcagtggcagtggtggggagaagcccagcggccctgttccccgcagccgcctggaccccgccaaggtgctgggcactgcgctgtgcccgcgcatccacgaggtgcccctgctggagccccttgtgtgcaagaagatcgcccaggagcggctcacagtcctcctgttcctggaggactgcatcatcactgcctgccaggagggcctcatctgcacctgggcccggccgggcaaggcggtgagtggccccacaccagcctgccggggacctggcaggacctttcgtgggaagaggcaggcattggcagagagagggctttgttgctgtcacagcctctggctccgtggggtgaggggaagccagggaaatcttagtgtctcagaacaagacctctcagatccttagagtgagggggtctagccctaggcagcaggcagcagaaagaggggtgggtgtgagagccagctaggaattggggcatccaaggctggccgtctgaagggcagcagatgggccccacatggccaggtcttactgcctgtcactcgaaccagaatctatttctgttgaacatctgttttttaaatcgtgaaacttttttgagtacttcaggccaaaactaggggcgagctcaagcctgtgggcatggctgccagcctgggtctgggactcaggatctgagcctcctgctgaaggcacaggctgggaatcccaggcctgggttccagtcccactccctctgtgaccctggacaagtcactgccccctctgacctccaactcatcacctcttagaacagagcctgtaggatgggcagtgggtggatgtgcttgcctcctgggtgggctgtggcgttgggaaggtcatagtaggcgaatcaggcctggcatcttgtaagttcggagctcgtcttgggtgtctcagcttcttagggcttggactcagttgcccagggtcctggaggccgtggcttggttcctcagatcctcagttttggaatcgtagagtcctgagtccctagaacttgagagcacagtctgagtgactcagaggcaagagtggtgggatttggggagtctggttgagtcctaaaagagacccctctgtctccgtagttcacagacgaggagaccgaggcccagacaggggaaggaagttggcccaggtcacccagcaagtcagtggtagaggtaggactgtccctgagttctttccccagcacctcagggtccctcccaagttagaagggagctccagtttccccctcccctcccacccttacccttaccccatggtctcactcaggatccgccaaggactttgattattgcgtgaaagtgctgactgccaggacaggaagctagctaagatgcaagttcccagcctagagcagtggcctctggggggtctagggcggacccaagggcaaggccagggtggcagcagctttggggactctgggctggctccctccccttgacactggctgaagcccaggtggtctctaacccctcccatctctccctctcatcttccccagggcatctcctcccaaccaggcaactccccgagtggcacagtggtgtgaagccatggatatcgggcccccccaaccccatgcccccagcctcctagccataaccctccctgctgacctcacagatcaacgtattaacaagactaaccatgatggatggactgctccagtccccccacctgcacaaaatttgggggccccccagactggcccggacacgggcgatgtaatagcccttgtggcctcagccttgtcccccacccactgccaagtacaatgacctcttcctctgaaacatcagtgttaccctcatccctgtccccagcatgtgactggtcactcctggggagagactccccgcccctgccacaagagccccaggtctgcagtgtgcccctcagttgagtgggcagggccgggggtggtccagccctcgcccggcccccaccccagctgcccttgctattgtctgtgcttttgaagagtgttaaattatggaagcccctcaggttcctccctgtcccgcaggacctcttatttatactaaagttccctgttttctcagcgggtctgtccccttcggaggagatgatgtagaggacctgtgtgtgtactctgtggttctaggcagtccgctttccccagaggaggagtgcaggcctgctcccagcccagcgcctcccaccccttttcatagcaggaaaagccggagcccagggagggaacggacctgcgagtcacacaactggtgacccacaccagcggctggagcaggaccctcttggggagaagagcatcctgcccgcagccagggcccctcatcaaagtcctcggtgttttttaaattatcagaactgcccaggaccacgtttcccaggccctgcccagctgggactcctcggtccttgcctcctagtttctcaggcctggccctctcaaggcccaggcaccccaggccggttggaggccccgacttccactctggagaaccgtccaccctggaaagaagagctcagattcctcttggctctcggagccgcagggagtgtgtcttcccgcgccaccctccaccccccgaaatgtttctgtttctaatcccagcctgggcaggaatgtggctccccggccaggggccaaggagctattttggggtctcgtttgcccagggagggcttggctccaccactttcctcccccagcctttgggcagcaggtcacccctgttcaggctctgagggtgccccctcctggtcctgtcctcaccaccccttccccacctcctgggaaaaaaaaaaaaaaaaaaaaaaaagctggtwtaaagcagagagcctgagggctaaatttaactgtccgagtcggaatccatctctgagtcacccaagaagctgccctggcctcccgtccccttcccaggcctcaacccctttctcccacccagccccaacccccagccctcaccccctagcccccagttctggagcttgtcgggagcaagggggtggttgctactgggtcactcagcctcaattggccctgtttcagcaatgggcaggttcttcttgaaattcatcacacctgtggcttcctctgtgctctacctttttattggggtgacagtgtgacagctgagattctccatgcattccccctactctagcactgaagggttctgaagggccctggaaggagggagcttggggggctggcttgtgaggggttaaggctgggaggcgggaggggggctggaccaaggggtggggagaaggggaggaggcctcggccggccgcagagagaagtggccagagaggcccaggggacagccagggacaggcagacatgcagccagggctccagggcctggacaggggctgccaggccctgtgacaggaggaccccgagcccccggcccggggaggggccatggtgctgcctgtccaacatgtcagccgaggtgcggctgaggcggctccagcagctggtgttggacccgggcttcctggggctggagcccctgctcgaccttctcctgggcgtccaccaggagctgggcgcctccgaactggcccaggacaagtacgtggccgacttcttgcagtggggtgagtgcctaccctcggggctcctgcagatggggtgggggtggggcagsagacagstctgggcacagaggcctggctgttgggggggcagsatggcaggatgggcatggggagatcctcccatcctggggctcagagtgtggacctgggccctggggcaacatttctctgtcctatgccaccactctggaggggcagagtaaggtcagcagaggctagggtggctgtgactcagagccatggcttaggagtcacagcaggctaggctgccaacagcctcccatggcctctctgcaccccgcctcagggtcagggtcagggtcatgctgggagctccctctcctaggaccctccccccaaaagtgggctctatggccctctcccctggtttcctgtggcctggggcaagccaggagggccagcatggggcagctgccaggggcgcagccgacaggcaggtgttcggcgccagcctctccagctgccccaacaggtgcccaggcrctgggagggcggtgactcacgcgggccctgtgggagaaccagctttgcagacaggcgccaccagtgccccctcctctgcgatccaggagggacaactttgggttcttctgggtgtgtctccttctttwgtaggttctgcacccacccccacccccagccccaaagtctcggttcctatgagccgtgtgggtcagmcaccattcccgccaccccgggtccctgcgtcctttagttctcctggcccagggcctccaaccttccagctgtcccacaaaaccccttcttgcaagggctttccagggcctggggccagggctggaaggaggatgcttccgcttctgccagctgccttgtctgcccacctcctccccaagcccaggactcgggctcactggtcactggtttctttcattcccagcaccctgcycctctggccctcatatgtctggccctcagtgactggtgtttggtttttggsctgtgtgtaacaaactgtgtgtgacacttgtttcctgtttctccgccttcccctgcttcctcttgtgtccatctctttctgacccaggcctggttcctttccctcctcctcccatttcacagatgggaaggtggmggccaagaagggccaggccattcagcctctggaaaaaccttctcccaacctcccacagcccctaatgactctcctggcctccctttagtagaggatgaagttgggttggcagggtaaactgagaccgggtggggtaggggtctggcgctcccgggaggagcactccttttgtggcccgagctgcatctcgcggcccctcccctgcmaggcctggggcgggggagggggccagggttcctgctgccttaaaagggctcaatgtcttggctctctcctccctcccccgtcctcagccctggctggttcgtccctgctggcccactctcccggaaccccccggaacccctctctttcctccagaacccactgtctcctctccttccctcccctcccatacccawccctctctccatcctgcctccacttcttccacccccgggagtccaggcctccctgtccccacagtccctgagccacaagcctccaccccagctggtcccccacccaggctgcccagtttaacattcctagtcataggaccttgacttctgagaggcctgattgtcatctgtaaataaggggtaggactaaagcactcctcctggaggactgagagatgggctggaccggagcacttgagtctgggatatgtgaccatgctacctttgtctccctgtcctgttccttcccccagccccaaatccagggttttccaaagtgtggttcaagaaccacctgcatctgaatctagaggtactggatacaaccccacgtctgggccgttacccaggacattctacatgagaacgtgggggtggggccctggctgcacctgaactgtcacctggagtcagggtggaaggtggaagaactgggtcttatttccttctccccttgttctttagggtctgtccttctgcagactccgttaccccaccctaaccatcctgcacacccttggagccctctgggccaatgccctgtcccgcaaagggcttctcaggcatctcacctctatgggagggcatttttggcccccagaaccttacacggtgtttatgtggggaagcccctgggaagcagacagtcctagggtgaagctgagaggcagagagaaggggagacagacagagggtggggctttcccccttgtctccagtgccctttctggtgaccctcggttcttttcccccaccacccccccagcggagcccatcgtggtgaggcttaaggaggtccgactgcagagggacgacttcgagattctgaaggtgatcggacgcggggcgttcagcgaggtaagccgaaccgggcgggagcctgacttgactcgtggtgggcggggcataggggttggggcgggsccttagaaattgatgaatgaccgagccttagaacctagggctgggctggaggcggggcttgggaccaatgggcgtggtgwggcaggtggggcggggccacggctgggtgcagaagcgggtggagttgggtctgggcgagcccttytgttttcccgccgtctccactctgtctcactatctcgacctcaggtagcggtagtgaagatgaagcagacgggccaggtgtatgccatgaagatcatgaacaagtgggacatgctgaagaggggcgaggtgaggggctgggyggacgtggggggctttgaggatccgcgccccgtctccggctgcagctcctccgggtgccctgcaggtgtcgtgcttccgtgaggagagggacgtgttggtgaatggggaccggcggtggatcacgcagctgcacttcgccttccaggatgagaactacctggtgagctccgggccggggkgactaggaagagggacaagagcccgtgctgtcactggacgaggaggtggggagaggaagctctaggattgggggtgctgcccggaaacgtctgtgggaaagtctgtgtgcggtaagagggtgtgtcaggtggatgaggggccttccctatctgagacggggatggtgtccttcactgcccgtttctggggtgatctgggggactcttataaagatgtctctgttgcggggggtctcttacctggaatgggataggtcttcaggaattctaacggggccactgcctagggaaggagtgtctgggacctattctctgggtgttgggtggcctctgggttctctttcccagaacatctcagggggagtgaatctgcccagtgacatcccaggaaagtttttttgtttgtgtttttttttgaggggcgggggcgggggccgcaggtggtctctgatttggcccggcagatctctatggttatctctgggctggggctgcaggtctctgcccaaggatggggtgtctctgggaggggttgtcccagccatccgtgatggatcagggcctcaggggactaccaaccacccatgacgaaccccttctcagtacctggtcatggagtattacgtrggcggggacctgctgacactgctgagcaagtttggggagcggattccrgccgagatggcgcgcttctacctggcggagattgtcatggccatagactcggtgcaccggcttggctacgtgcacaggtgggygcagcatggccgaggggatagcaagcttgttccctggccgggttcttggaaggtcagagcccagagaggccagggcctggagagggaccttcttggttggggcccaccggggggtgcctgggagtaggggtcagaactgtagaagccctacaggggcggaacccgaggaagtggggtcccaggtggcactgcccggaggggcggagcctggtgggaccacagaagggaggttcatttatcccacccttctcttttcctccgtgcagggacatcaaacccgacaacatcctgctggaccgctgtggccacatccgcctggccgacttcggctcttgcctcaagctgcgggcagatggaayggtgagccagtgccctggccacagagcaactggggctgctgatgagggatggaaggcacagagtgtgggagcgggactggatttggaggggaaaagaggtggtgtgacccaggcttaagtgtgcatctgtgtggcggagtattagaccaggcagagggaggggctaagcatttggggagtggttggaaggagggcccagagctggtgggcccagaggggtgggcccaagcctcgctctgctccttttggtccaggtgcggtcgctggtggctgtgggcaccccagactacctgtcccccgagatcctgcaggctgtgggcggtgggcctgggacaggcagctacgggcccgagtgtgactggtgggcgctgggtgtattcgcctatgaaatgttctatgggcagacgcccttctacgcggattccacggcggagacctatggcaagatcgtccactacaaggtgagcacggccgcagggagacctggcctctcccggtaggcgctcccaggctatcgcctcctctccctctgagcaggagcacctctctctgccgctggtggacgaaggggtccctgaggaggctcgagacttcattcagcggttgctgtgtcccccggagacacggctgggccggggtggagcaggcgacttccggacacatcccttcttctttggcctcgactgggatggtctccgggacagcgtgccyccctttacaccggatttcgaaggtgccaccgacacatgcaacttcgacttggtggaggacgggctcactgccatggtgagcgggggcggggtaggtacctgtggcccctgctcggctgcgggaacctccccatgctccctccataaagttggagtaaggacagtgcctaccttctggggtcctgaatcactcattccccagagcacctgctctgtgcccatctactactgaggacccagcagtgacctagacttacagtccagtgggggaacacagagcagtcttcagacagtaaggccccagagtgatcagggctgagacaatggagtgcagggggtgggggactcctgactcagcaaggaaggtcctggagggctttctggagtggggagctatctgagctgagacttggagggatgagaagcaggagaggactcctcctcccttaggccgtctctcttcaccgtgtaacaagctgtcatggcatgcttgctcggctctgggtgcccttttgctgaacaatactggggatccagcacggaccagatgagctctggtccctgccctcatccagttgcagtctagagaattagagaattatggagagtgtggcaggtgccctgaagggaagcaacaggatacaagaaaaaatgatggggccaggcacggtggctcacgcctgtaaccccagcaatttggcaggccgaagtgggtggattgcttgagcccaggagttcgagaccagcctgggcaatgtggtgagacccccgtctctacaaaaatgttttaaaaattggttgggcgtggtggcgcatgcctgtatactcagctactagggtggccgacgtgggcttgagcccaggaggtcaaggctgcagtgagctgtgattgtgccactgcactccagcctgggcaacggagagagactctgtctcaaaaataagataaactgaaattaaaaaataggctgggctggccgggcgtggtggctcacgcctgtaatctcagcactttgggaggccgaggcgggtggatcacgaggtcagaagatggagaccagcctggccagcgtggcgaaaccccgtctctaccaaaaatataaaaaattagccaggcgtggtagagggcgcctgtaatctcagctactcaggacgctgaggcaggagaatcgcctgaacctgggaggcggaggttgcagtgagctgagattgcaccactgcactccagcctgggtaacagagcgagactccgtatcaaagaaaaagaaaaaagaaaaaatgctggaggggccactttagataagccctgagttggggctggtttggggggaacatgtaagccaagatcmaaaagcagtgaggggcccgccctgacgactgctgctcacatctgtgtgtcttgcgcaggagacactgtcggacattcgggaaggtgcgccgctaggggtccacctgccttttgtgggctactcctactcctgcatggccctcaggtaagcactgccctggacggcctccmggggmcacgaggctgcttgagcttcctgggtcctgctccttggcagccaatggagttgcaggatcagtcttggaacctyactgtttkgggcccamagactcctaagaggccagagttggaggaccttaaattttcagatctatgtacttcaaaatgttagattgaattttaaaacctcagagtcacagactgggcttcccagaatcttgtaaccattaacttttacgtctgtagtacacagagccacaggacttcagaacttggmaaatatgaagtttagacttttacaatcagttgtaaaagaatgcaaattctttgaatcagccatataacaataaggccatttaaaagtattaatttaggcgggccgcggtggctcacgcctgtaatcctagcactttgggaggccaaggcaggtggatcatgaggtcaggagatcgagaccatcctggctaacacggtgaaaccccgtctctactaaaaatacaaaaaaattagccgggcatggtggcgggcgcttgcggtcccagctacttgggaggcgaggcaggagaatggcatgaacccgggaggcggagcttgcagtgagccgagatcatgccactgcactccagcctgggcgacagagcaagactccgtctcaaaaaaaaaaaaaaaaaagtatttatttaggccgggtgtggtggctcacgcctgtaattccagtgctttgggaggatgaggtgggtggatcacctgaggtcaggagttcgagaccagcctgaccaacgtggagaaacctcatctctactaaaaaacaaaattagccaggcgtggtggcatatacctgtaatcccagctactcaggaggctgaggcaggagaatcagaacccaggagggggaggttgtggtkagctgagatcgtgccattgcattccagcctgggcaacaagagtgaaacttcatctcaaaaaaaaaaaaaaaaaagtactaatttacaggctgggcatggtggctcacgcttggaatcccagcactttgggaggctgaagtggacggattgcttcagcccaggagttcaagaccagcctgagcaacataatgagaccctgtctctacaaaaaattgaaaaaatcgtgccaggcatggtggtctgtgcctgcagtcctagctactcaggagtctgaagtaggagaatcacttgagcctggagtttgaggcttcagtgagccatgatagattccagcctaggcaacaaagtgagacctggtctcaacaaaagtattaattacacaaataatgcattgcttatcacaagtaaattagaaaatacagataaggaaaaggaagttgatatctcgtgagctcaccagatggcagtggtccctggctcacacgtgtactgacacatgtttaaatagtggagaacaggtgtttttttggtttgtttttttccccttcctcatgctactttgtctaagagaacagttggttttctagtcagcttttattactggrcaacattacacatactataccttatcattaatgaactccagcttgattctgaaccgctgcggggcctgaacggtgggtcaggattgaacccatcctctattagaacccaggcgcatgtccaggatagctaggtcctgagccgtgttcccacaggagggactgctgggttggaggggacagccacttcataccccagggaggagctgtccccttcccacagctgagtggggtgtgctgacctcaagttgccatcttggggtcccatgcccagtcttaggaccacatctgtggaggtggccagagccaagcagtctccccatcaggtcggcctccctgtcctgaggccctgagaagaggggtctgcagcggaaggtttagaaagagcagctcccaggggcccaaggccaggagaggggcagggcttttcctaagcagaggaggggctattggcctacctgggactctgttctcttcgctctgctgctccccttcctcaaatcaggaggtcttggaagcagctgcccctacccacaggccagaagttctggttctccaccagakaatcagcattctgtctccctccccactccctcctcctctccccagggacagtgaggtcccaggccccacacccatggaastggaggccgagcagctgcttgagccacacgtgcaagcgcccagcctggagccctcggtgtccccacaggatgaaacagtaagttggtggaggggagggggtccgtcagggacaattgggagagaaaaggtgagggcttcccgggtggcgtgcactgtagagccctctagggacttcctgaacagaagcagacagaaaccacggagagacgaggttacttcagacatgggacggtctctgtagttacagtggsgcattaagtaagggtgtgtgtgttgctggsgatctgagaagtcgatctttgagctgagcgctggtgaaggagaaacaagccatggaaggaaaggtgccaagtggtcaggcgagagcctccagggcaaaggccttgggcaggtgggaatcctgatttgttcctgaaaggtagtttgkctgaatcattcctgagaaggctggagaggccagcaggaaacaaaacccagcaaggccttttgtcgtgagggcattagggagctggagggattttgagcagcagagggacataggttgtgttagtgtttgagcaccagccctctggtccctgtgtagatttagaggaccagactcagggatgggkctgagggaggtagrgaagggagggggcttggatcattgcaggagctatggggattccagaaatgttgaggggrcggaggagtaggggataaacaaggattcctagcctggaaccagtgyccaagtcctgagtcttccaggagccacaggcagccttaagcctggtccccayacacaggctgaagtggcagttccagcggctgtccctgcggcagaggctgaggccgaggtgacgctgcgggagctccaggaagccctggaggaggaggtgctcacccggcagagcctgagccgggagatggaggccatccgcacggacaaccagaacttcgccaggtcgggatcggggccggggccggggccgggatgcgggccggtggcaacccttggcakcccctctcgtccggcccggacggactcaccgtccttacctccccacagtcaactacgcgaggcagaggctcggaaccgggacctagaggcacacgtccggcagttgcaggagcggatggagttgctgcaggcagagggagccacaggtgagtccctcatgtgtccccttccccggaggaccgggaggaggtgggccgtctgctccgcggggcgtgtatagacacctggaggagggaagggacccacgctggggcacgccgcgccaccgccctccttcgcccctccacgcgccctatgcctctttcttctccttccagctgtcacgggggtccccagtccccgggccacggatccaccttcccatgtaagacccctctctttcccctgcctcagacctgctgcccattctgcagatcccytccctggctcctggtctccccgtccagatayagggctcaccctacgtctttgcgactttagagggcagaagccctttattcagccccagatctccctccgttcaggcctcaccagattccctccgggatctccctagataacctccccaacctcgattccsctcgctgtctctcgccccaccgctgagggctgggctgggctccgatcgggtcacctgtcccttctctctccagctagatggccccccggccgtggctgtgggccagtgcccgctggtggggccaggccccatgcaccgccgccacctgctgctccctgccagggtacgtccggctgcccacgcccccctccgccgtcgcgccccgcgctccacccgccccktgccacccgcttagctgcgcatttgcggggctgggcccacggcaggagggcggatcttcgggcagccaatcaacacaggccgctaggaagcagccaatgacgagttcggacgggattcgaggcgtgcgagtggactaacaacagctgtaggctgttggggcgggggcggggcgcagggaagagtgcgggcccacctatgggcgtaggcggggcgagtcccaggagccaatcagaggcccatgccgggtgttgacctcgccctctcyccgcaggtccctaggcctggcctatcggaggcgctttccctgctcctgttcgccgttgttctgtctcgtgccgccgccctgggctgcattgggttggtggcccacgccggccaactcaccgcagtctggcgccgcccaggagccgcccgcgctccctgaaccctagaactgtcttcgactccggggccccgttggaagactgagtgcccggggcacrgcacagaagccgcgcccaccgcctgccagttcacaaccgctccgagcgtgggtctccgcccagctccagtcctgtgwwccgggcccgccccctagcggccggggagggaggggccgggtccgcggccggcgaacggggctcgaagggtccttgtagccgggaatgctgctgctgctgctgctgctgctgctgctgctggggggatcacagaccatttctttctttcggccaggctgaggccctgacgtggatgggcaaactgcaggcctgggaaggcagcaagccgggccgtccgtgttccatcctccacgcacccccacctatcgttggttcgcaaagtgcaaagctttcttgtgcatgacgccctgctctggggagcgtctggcgcgatctctgcctgcttactcgggaaatttgcttttgccaaacccgctttttcggggatcccgcgcccccctcctcacttgcgctgctctcggagccccagccggctccgcccgcttcggcggtttggatatttattgasctcgtcctccgactcgctgacaggctacaggacccccaacaaccccaatccacgttttggatgcactgagaccccgacattcctcggtatttattgtctgtccccacctaggacccccacccccgaccctcgcgaataaaaggccctccatctgcccaaagctctggactccacagtgtccgcggtttgcgttgtgggccggaggctccgcagcgggccaatccggaggcgtgtggaggcggccgaaggtctgggaggagctagcgggatgcgaagcggccgaatcagggttgggggaggaaaagccacggggcggggctttggcgtccggccaataggagggcgagcgggccacccggaggcaccgcccccgcccagctgtggcccagctgtgccaccgagcgtcgagaagagggggctgggctggcagcgcgcgcggccatcctccttccactgcgcctgcgcacgccacgcgcatccgctcctgggacgcaagctcgagaaaagttgctgcaaactttctagcccgttccccgcccctcctcccggccagacccgccccccctgcggagccgggaattccgaggggcggagcgcaggccgagatggggaatgtgggggcctgcagaggaccctggagacggaggcgtgcagaagctcagtctcggggcggaggcttcgcgcccttagtcctcctggacggcccgttaccttctgcgttgtcccgatggggaaactgaggccctgagccagaagcacacgctggggggaggcagaaagcgcggccagaggcggagggaaaacaaagggagaatcacagacagacgggagggggacggacacacacaaggggacagagacccgagtggagagctggatctcgccttcccggcgtggggcgcagggtcggccagaaagaagatcgagaagagcggggagtgggggcgaaaaggggggacaggtgggggaggaggctggggaaagcccgagggaggaagagagggagggaggaacttcccaaagttgcaaaacatggctaccttgcctgcggagccgagcgcggggccggcggctgggggggaggcggtggcggcggcggcggcgaccgaagaggaggaggaggaagcgcgccagctcttgcagactttgcaggcggccgagggtgaggcggcggcggcggccggggccggggcgggcgcagcggctgcgggagctgagggcccgggatccccgggcgtccccgggtcgccccccgaggccgcttccgaaccgcccacgggcctccgcttctcgcccgagcaggtggcgtgcgtctgcgaggcgctgctccaggcgggccacgccggccgcttgagccgcttcctgggcgcactgcccccggccgagcgcctacgtggcagcgacccggtgttgcgcgcgcgggccctggtggccttccagcggggcgagtacgccgagctctaccggctactcgagagccgccccttccccgccgcccaccacgccttcctgcaggacctctacctgcgcgcgcgctaccatgaggccgagcgggcccgcggccgcgcgcttggcgcagtggacaagtatcgactgcgcaagaagttcccgctgcccaagaccatctgggacggcgaggagacagtctactgcttcaaggagcgctcccgcgcagcgctcaaggcctgctaccgcggcaaccgctaccccacgccggacgagaagcgccgcctggccacactcaccggcctgtcgctcacgcaggtcagcaactggttcaagaaccggcgacagcgcgaccggaccggggccggaggcggcgcgccctgcaagaggtgaggggcctcgggcggcgcaagtccagctctcccggggacatcccgtccaccagccctcttcccccgtgcccactgctggggccggcgcgccgaggtcctcggacatctcccgggaccagctcacaatctcaggcgcccgcggggcgcggggactaagtgtggacgggacaggcacccgcccgggccctctccccgcacgcgtctcctcttccagcggctccattccgagctccttcccaaatcccatcggtgttggggaatcacactgcggggggcactagagggactgaggaaaaaggacagggcctgtggccactccactccgcgtaggggctgcctcccagccccctttcttcactgaccgttactcttacccacccgcccccacactccctccgggcccggacggcgtggtccgtcttctgcctttgttgtgaaacgtgaacctttcccagctccggtttccctgtaacccaaacccttctcctcccaccctgagcgccggcctctcccttctctgacgccccgcggggagggcaccgggaactgggctggcggctgctgctccctctctccaggccactcgcccgctttccgcccaaccaaggaacttttagggcaacctgggagctcagcctctggggacccgaggccgaggtgggggagagcaagggcctcttccctccccagcgcttctctgcagtggtgtccacgcagggcttgcaaaaggccctggagtttggagtggtctcagagaggcgtcataacccctggaatgatccaccgaaacttgggccagggaaaggtgggggagcagctggctggctatgcgggaggccccacaggctaagggaccccagctgacagccatttctccggccagcgagtctgatgggaatcccacgactgaggacgagtccagccgaagtcctgaggacctggagagaggggcggccccagtgtccgccgaggccgctgcccagggctccatattcctggcagggaccggccctcccgcgccttgcccggcttcctcctccatcctggtgaacgggagcttcctggcagccagcggctccccagcagtgctcctcaacgggggccccgtcatcatcaacggcctggccctgggcgaggcctccagcctgggcccgctgctgctcactgggggcgggggtgcccctccaccgcagcccagccctcagggggccagcgagaccaagacctctctggtcctggaccctcagacaggggaggtgcggctggaggaggctcagtcggaggcccctgagaccaaaggggcccaggtggctgctccgggaccagcccttggagaggaggtcctggggcccctggcccaagtggtgcctggccccccgacggctgccacctttcctctgcccccggggccagtgcctgctgtggctgccccacaagtggtaccgctctccccacccccggggtatcccacgggcctgagccccacctccccactattgaacctgccccaggtagtacccacctcacaggtggtgaccctgccccaggctgtggggcccctgcagctgttggcagccgggccaggcagccctgtgaaggtggcagctgcagcaggccctgccaatgtgcacctcatcaactccggggtgggcgtgactgccctgcagctgccttcggccactgccccaggtacccccatctccctccctcaggcctaggtgagagccggggaggggtgcagtcatctcggagagggaggggctgtccctgggctcctggagggcatctcatccctggcaagtcccagtgccccaaggcccaccacaaggctccctccgcccgccctccagctgcacagtctccacttctctctggcttggcctgctctcctggctctcacctgcgctcggtccctctctccccacaggaaacttcctcctggccaaccctgtgtctggcagccccatcgtgacgggtgtggccgtgcagcagggcaagatcatcctcaccgccaccttccccaccagcatgctcgtctcccaggtcctgccgccagcccccggcctggccctgccactgaagccagagacggccatctccgtgcctgagggaggcctcccggtggcccccagccctgctctcccagaggctcacgccctaggcaccctttctgcacagcagccaccccccgccgctgccaccacctccagcaccagcctgcccttctcccctgactcccctggcctcctgcccaacttcccggcgcccccaccagaggggctgatgttgtcacccgcggccgtgcctgtctggtcagcagggctggaactaagcgcaggaacagaggggctgctggaagcggaaaaggggctggggacacaggccccccacaccgtgctgaggctgccagaccccgaccctgaggggctgctcctgggggccaccgcagggggtgaggttgacgaggggttggaagctgaggccaaggttctgacccagctccagtcggtgcctgtggaggagcccttggaactgtgacccagtgtggccccgtggcctctcccgacattggtgctgaagacgcagggacaggaatgggaggggggagccccagaaatgcggttgctgaagaccccagtcaccacatccttctgcctgggtggcctctccaagccctggtggtgctgggggttgtatccccggccacctcctgtccaggtctccatccccctttggatgggaggcctctctgttacagccctccccatgctgtgccctgccatatacgtgggggactcagggtcctgactcaggggccctgccccctccacttggtactagctgtaagcggaacaccctgccccagggccggacttccagcccccagagccctctccctgtcactccctgaaacactattaatagctctgccgatagctggtgttgtcacaactgcctggaatccgaaggtggaggacaggcagccccgcgcccctgagactggagaccctccccagtgtggcatttcctgccaggggcggggggtggggcagctgtggggagacgggggtcttccttcaccagctcccctcgactcaagcccttgtcctcattatccggcccagaccaaagattccctcatccctgggggcagccctgccgctgtgtctcctttgtatcctaaatctttatttttctaggacatgttatgcctccattttcaattaaaataaagttatcggattacaccaccaccaggggtctggggtgccttccagtgtctgtccaaagcagcgctgaacacagagcccacctcgagacctggccttcccattgctgcctcccgaggggaagaggggtttgcattcagatgcacagagtggctggggagggggtggcactgaggcctcttgcaagccacaggcctccagatgagggtggacggagcaccccagtggggcagcagggggacgcaggagggcctgcccttgtctctcttgctggtaacaaaggttccacttgctttattttatttaaaacaataaatagtctaaaaatagaacaggagagggaggagtagggtgaggtgagcatgaacagggttgcaaccgagtggctctggggtggggaagggaaggggagaggggtgggtaaacttcaccttccgacaccccgcatttcattttgggtttccttcctaagcctgggggagaatcaaggcagctgtgggtgactctggtgctccaggcaaatgtgcccagcagttggggctaatcagtgcccccctccccagtcccatgggacctgcattctcaggggctggaggcccaggagggacaagttcatcgatgggtcctggcttccagcaagagccgcggttgccatgaggggtgaggggagcgaggcgaggggccgccctctcactggaggtgcgggggcagcggcaaggccttctcggccagcagctggtagaagggctttggcgtctcccagtcctcagcctcgctgctggagccgtcctgcttcacgatgcggttgtgctggcggctgaacctgcgagccttggtgctggggagacggtggcaggatggcctggcttcctcactcgcctcccgggcatccctgtaccactcccaatcctgtgtccccgcaggggcctgggccaccgttttagcctctattgggcgagccttgggtccaccaagtcccagtcagtaagatgggactcggccaagggctctgggatgtgttcaaagtcaggagccagggcaggtggcagctccttgaaggtggaggggacaggattcgggggagtcga

SEQ ID NO: 8871 - DNA, 14348 bp, Homo sapiens
atgggattcaggggagagaatggtagttgaagacatgtgccaggaagtgattttaataatggacttaagaatctaggctgtaagaaggaaaataaagaaatgaacacttcataactcattctgtgaggccagtattgccaataccaaagccagacagacactacaagaaaagtactgaccaatatccttcatgaatccagatgcaaaatcaacaaaagcctacaatccaaatttagcagcgcccctgctgtaaaggattttacaccatgaccaagtgggacttattcccaggacgcaaggactgattgttcaacatgtgaaaatcaatcagtgtaacacataatataaacagaataaagggaaaaaacacatacaggaaaaaaatgacaattcaaaactctttcatgataaaaacttaaaaattagcaacagtaggaaactaccagaacataataaaagccatatatgaaacatgtaccgctgacatcatactcaatggtgacagactgaaagctctcctccaagatcaggaacgagatcagaatgcaggtttttgccacttctattcaatgtagtactagaaattctagctggagcaattaggcaaaaaaagaaaaaaaggcattcacattggaaaggacaaagtatcaataaaattgacagaggtaatcaacaagttcaacaaagtagcatgatacaaaatcaacacaaaaatcagttgtgtgtttatacactaacaatgaacaattggaaaagaaatttaaaattccatttaaaatagcatcaaaaagaataaaatacttagaaattaatcactgaggcaaagacttgtataatgaaaaccacaaaacattgctgaaagagatgaaagaaaacaaatggaacaatatcccatgttcatggattagaagacttaataatgttaacatttcgatactatccaaagtgacctacaaattcagtgcaatccctgtaaaaatccaaatgactttttcctcctacagaaatagaaaatatagcctaaaattcatatagaacctcaagggatccccaaatatccgaaatagtcttgagaataaagctttagggctcacatttttttatttcaggttattacaaagctacattaatcaaagcagtgcagtactggcataaaagacagacatatagaccaatggaatagaatacagatcccagaaataaacccttgcatgtgtggtcaaataatatgcaacaggggtgccaagaccattcagtgggggaaaagacagttttatcaacaaatggttctgggtaaactagagagccacatacaaaaagaatgaagttggacccttacctaataccatatgcaaaactcaaagtgggccaaagacctaagcatcagaactaaaactataaaactcaagaggagcatgtggtggcttatacctgtaatcccagcactttgggaggccaaggtgggaggattgcttgagcccaggagttcaagactagactgggcagcatagtgagaccccatctctataaaaaaatttttttaaattaatggcacacacctgtagtcccagctacacaggaggctgaggtgggaggatcacttgagcctaggagttcaaggctgcagtgagccatgatcacgtcactgtgctccagcttaggccacagagtgagaccctgtctctaaagggaaaaaaaaggaaagcctcatggcattgggtttggcagtgatttcttggttataaaaccaaaagagtgagcagggaacaacaacaacaacgtagacaaattggacttcataattaaaaacttgtgcatcaaaggacattatcaacagtaaaaaggcaacccaacataaaatacttggaaatcacatatctgataaaggattaatacccagaatatatagaaaactcctaaaactcaacaaaaaccaacctgattcaaaaatgggcaaagaactggaagaggcatttctatagagataacaagaggctagaatatgaccatgggagccaaatggctaaggccgaagtgaaggatgaggacattcaatcagaggaagtctaggaactaagtgaggaagtctaggaactaagtgcccaagtgttgggttaattggaggacattgaaattatcaatttatgacaggagaaatgaatgagccaggtatgtgtggaggtggcactcacttaggagggcagtaaataactgcaccctctgagggttgtgggcttaaatgttcagggatctatgtcttatcacagtccctaacaatgtagtgcatattcaaatatcagctatcacacttctattcttactcttgagctacaatgccagaaactatggtgtatacttgtaagtgcatgtattttttgacaagtagcatgtctaatataagaatcataatactcaaacttgaaagaaaaattcagagaccaggctcatgcctgtaatcccagcattttgggaggccaaggcgggtggatcacttgaggtcaagagttcgagaccagcctggccaacatggtgaaacccccatctctactaaaaatacaaaaattagccaggtgtggtgacgcatgcctatagtctcagctactgggaggctgaggctgaagaatcacttgaacctgaaagatggaggttgcagtgagccaggatcacaccactgcagtcctgcctggatgacagagcgagaatccgtctcaaaaaaaaaaaaaaaaaaattcattctgggctatttcttaacagatttaacagcctaagacagaggcaggcaaactttttctgtaaaaggccagatagaaaatattttaggctttgccgcccatatggtatctattgcaactgcccaactctgccatttagtagggaagcagccatatagatagtatataaacatatgtattgatgggaaaatgaaaatgacttcatttacagaagccggcactgggttacagtttgctgtcccctagcctaagacgtgatttttttaaggtagttcctcatggggtttgtacatatttctaaagatttgttaagttacacagttgatgcctgttagattataaccttgaactgtcatacttagatacagttgaccttgtcttttatccttgtgaccaattataattaaaacagtatgacttaacataatgcacgtactaaaccaatgaagcagctatacctatataagccattttaaaggaaaaattttatgcagtttcaggtttaaagattatttctttcagaaatcaggctgggaactaaagagaacaatataaaaacaaagattaatttctgagaagccccaaataaaagtttacaactgcgttttcttgttgtgactgagagatttaacatagcttggtgctttctttcccacagtatgtcttttaatctctctcataaacttctagggatccagattagatgatcaaagatgtgctccaccacctgctaccacaaagggtccgacagtaccagatgaagactttttcagccttattttacggtcccagggaaagagaatggatgaacagagagttcttttacaaagagatcaaaacagagacactgactttgggctaaaggactttttgcaaaataatgctttgttggagtttaaaaattcagggaaaaaatcggcagaccattagttactatggatttattttttttcctttcaaacacggtaaggaaacaatctattacttttttccttaaaaggagaatttatagcactgtaatacagcttaaaatatttttagaatgatgtaaatagttaaccttcagtagtctattaaggcattaatacttctctggacatgcgcgtttgagggtggaggggtcctgtaaggtgcttcatcgtctgtgattactgcttgggatgtgttctttggcagcttgtgagattactttacctagtgtttataaagtaggaagttaagtgaatcatagattagaatttaatactcttatggaaataattttttaacatcttaattgacaatggcgtttttttatacataaccatggatgtagtgggaaacaatgttgtttggtaaaaataatgtacttgatcaatgtaaaaaagtatataaaatagtcttactaaaaatctaggtttttttttcctccatgaaaatctgtttttttaggccaaagtcagtataaaagaaactctacttcttgggctgggcatggtggctcattcctgtaatcccagcacattgggaggctgaggcaggaggatcgcttgaggctaggagttcaagaccaacctgggcaacatagacccccgtgtctatgaaaaataaatcagcagccaggcgcagtggctcacacctgtaatcccagcactttgggaggccgaagcgggcggatcacttgaggtcgggagtttgagaccagcctggccaacatagtgaaaccctgtctctactaaaaatacaaaaattagctgggcatggtggcatgcgcctgtagtttcagctacttgggaggctgaggcaggagaatcacttgaacccctgggaggcagagattgcagtgagctgagaccaagccactggactccagcctgagtgacagagcaagactctgtctcaaaaaaaaaaaaaacagcaagcatgctggcacacacctgtagtcccaactgcttaagaggctgaggcaggaggaccacttgagcccaggaggtggaggctgcactgagctatgatcgtgccactgcactccagcctgggtgacagagcaagaccctgtctctagaaaacaagtatcttttgtgtgttttgggctgtttaaaaaaattatttaaaatggtctcttctgttccataatactgctgtaaaacaaacttttctaagttctaatataaaaacaaaaaacaaaacccatgtggttaggtcaagaacctaggacacataaacaaacagaaaacagatgaaaactcacaaaaattaaatatgaaagaaagatgtcagctagaaccttagttgtcattaagctttgtcttccttatcccagatattgaaggcagtttacaaggggatgataacaaagtaactaactaactgtagcaaaagacaagtatgggacagactgggacctggagtaacactggatcacagactgcaaaggcccacgcttggaacaagttgccaacttgtttcactctgcttgcttcagactgtgcacagctgggatgggatctggggatgtggacccctattctttcaaaaagtcattcaggtgatttggatgggcaaatagaactatttctctaatggccaatgttttttaagagtcataacctggaattaattacattaagtgctcagctaaaaaaaaaaaaaaagttctaaattacaacctggattacattatgtttcatgtatactataaggtatgatgtcctggatagcattttaaaaactcaggtaagtttcatggggttcttataagaaaattcagttaagacaatataccaaaccacaacgtaaaaagtttgtgtatacaaactttttgtattatttgtacacaaagtacaaatttgtatttgtacacaaagtacaaactttgtgtattattttgtgtatacaatagttcttacagcctgtaaacattcaacattattccatttaaacattgtttttaacagctgtctaccctgttctgattttcctaaaagcttcacactatataggctgggcacaatggctcatgcctgtaatcccagcactttgggaggccgacaagggcgggtcacttgaggtcaggagttcgagaccagcctgaccaacatggtgaaaccccatctctactaaaaaatacaaaaattagccaggcatggtgatgcacatctgtaatcctagctactcgggagactgaggcaggagaatctcttgaacctgggaggtggaggttgcagtgagccgagattgtaccacctcactccagcctgggtgacagagcaaaactctcaaaaaaaagtaaaatttcaaaaaagcttcacaatataaaccttaattttaatgacatattggctagtcaataaacaagtcttatctcatctcatctcttttctgataacaaacacccgatgtgttcaatttgctttcatatttaagtctttcctgaattgctgtcatcattcaacaacagttgcatgtcgccttgctagctgtcaaagtagacttcatccccaaatggatatctgtaatgaaagaatacaaaggtgaaattttatttaaaaattttttaaaagaatttggttttggattaaaaggcatgcaagcagcattaattccactcacagttacagtctatcacctggggcattcactacttttcagagtcagatcacagttcaaaagacagctctcaccttgggggcatattccccaagtcagtgtgaacatgtcttgtcccaagaggacactttatacgcatggatgttcacaaatttattctaaactgcaggtgtctgtcaggattcatttgttaaacatgtcctctgtgttaaaaatcctaaaatccttttgcatttcttagaaaaaatcacgtttctgatgaaattctaaagatgtttgcaatattaaactagaatatattaacatgtataattttgagacaaggtcttgctctgtcacccaggctggagtacagtggctcgatcataactcactgccacctcacgatcctcttgcctcagccctccaagtagctgggactacaggcgtgtaccaccatgcctggctagttttatttttagtacatagccttgaacaactgarcttaagcgatcatcctccctcaaccttccaaagtgctaggactgtaggcatgagccactgcacctggcctaaaattacattgttacaggcacgtaagtaacacttcctggatccaaaaatgtgtattctgcatttcaacaactgaacttaagcgatcatcctccctcaaccttccaaagtgctaggactgtaggcatgagccactgcacctggcctaaaattacattgttacaggcacgtaagtaacacttcctggatccaaaaatgtgtattctgcatttcatattaaaataaaaaagcaagtgcttgggatacaaatatctgcatgaaaatttaaagactttattcctgactggtatcacttttagtaagcagttgaacataacttgtagtgtgaatatggttaaaacaaaggacacctgatgtctgtgaagtctgctaaggacaggtacaaaatttatgcattgctttttaaaaagtttaaaatgaggaatgcttttgataatcagaaagrctaatgtaaagtgctgactgatgtcctgtctgcagttaaggaagacacccaactctcttcttcctcatcatggtattctctatgtatagatctctaaaaatgcaaacttcctatggacaagacaatatgatttgctataatatgaattaagatatggtaatatctaatagtctccactgctaggattctgagtaacacaaaaaataggttttataaaaagcccatgcacttcaattggtgggggaaaagaataaagtcattttcagtcgactgactctgtaaaacagattaccaatataacaagctatgttatctaaattgccctggcagtcttcagttttctctaagtaaacaaagtaaaaggaacaataaggatgcaggcgtagtaatagctgtggaaaagatgaaactacagcyacagtgacctgtgggcagcctgcgtagagataagctgaggtgtcagtcagactgatcctggtaacgatactccatggctgcatgaagatgctggaggcatcaagtgggtggccttaactctagtggattcactaggcaatgtaaattggttagtgggttcccgtaagtgcctgtaacaataaaatttctttttcaatgtccccaattcaaactggcctccttaactatccagaatcagtgatgcctgtcatctgttcatcttaaaataaacacttcttactttatgggatgtaaatatcaaagagaagatgaaatgaaaagcttttacatatataacgtgtttgttaattctaattgtcagtaaaaatgtgaatgttgaagttgaaatgtgaatgttgaagttggcacctttgtagtaatcagaattcttgcagagaagagaragagagtraagagtatactttacaaagctcgaaggagacttgaggctgtcgtttgtgctggtgttcctctagccacaggggctgctgaccggatcctgtccacgtggtccagccacacctcttgcggggctgtatgtgctgccttggtctgggctgcctgcggcttcagacttgagctgggccttttccgctgcgggtgaaccttctgtattccctgatgtgtcttggccagagacaggcttggccgactggctgctttcagtactgctttctttcggtgtgccttcccccaggattccacctgtctccttgggctttgtatccaaaacaggtgatttatgctataaagtacaaaattacattttaactgtttaatgtaatgtgaagtcttagtaatcaaacatatctaaaaagttcccacccaaatccgttgtagcaagctccaaactctttcaaatccagggtccagtgctgggttataattatataaatgttattatacctcaccaaactccacagtactcccacagaggagtgggaacgcttagcgcatatactgggtggtctagtggcccagcttagaaggggtcaagagaattggtcatcagtattgtcaacttctcttgcctggtgagaataattcatttgacaaatatttcttgagcatatattaagttctaggtgttagggatacagcaggaacaaaatacataaaactgttctcactggaacttatatttaggttagaagaaaatcacacaagtgtgatatgttgaattaaagaggctatgtaaaaaaagcagagaagagatgagtgctgaatgtgggtgggctggcagggtcaaattacagtttaaattagggtggtctgaaaaagtgatatggttaggcatggtggctcacacctgtaatcccataactttgggaggccaaggtgagaagactgcttgaggccaggagtttgagaccagcctgggtaacagcaagaccccatatccacaaaaaataaaaaatattagccaggcatggtcgtatatgcctatagtcctagttactcagaaggctgaggcaaaagaatcggttgagcccaggattttgaggctgcaatgagctatgatcactgcaccccagccttgaccacagagtgagaccttgtctccaaaaataataaaaatgagtaaaggcctgaagaaagtaaccatatgattgatatataaatgaagactgtagaatgaacagcaggtacaaaggctctcaagttcaaggaacagtcaggagcccttatggctaaagtagagtaagcacggagggagaagaggtgaccagagaggtagtggatgtgggggaaggggagaccaaggaggcttccaggccattgtaatactggctttcccctcaagtgagataggaagtcactggaagacttctgagataggtgacaggtaattactaactataaaagctggaaggaccatcttaagttgttttttttttttttttttttttttgagacgacgtctcactctgtcacccaggctggagtgcaatggcacgatctcggctcactgcaacctccgccccctggaatcaagcaattctcctgtctcagcctcccaagtagctgggattacaggtgcataccacatcacgcctggctaattttcttgtattttcagtagagatggggctttgccacgttggccaggctggtcttgaactgcagacctccagtgatccgcctgcctcggcctcccagtgctgggatcacaggcgtgagccgccgcgcctggtccatctttctagatacatgtagatatgtttatttttatatgaaactatgggaagggattctataatttcccagattctattatgctcataactgtttcaaaggtttaacagctgcaatttaaacatttcaaatgacaatacaaattcctctctcaaacagaaatggaaatgtccctttaaaagactgataatggtgaaaaacttcttcttaccattctacaggtaaaaagtatagtctagccagccaatgacactgaagatttggggaagcaatgtttttgatccctggccccagcccactcttccatccagctaatcctttagggctctactgtaccttccctagagctccgggccttcagtgatgccttctctctgatctcttcaaagatagaaatttctgtcatgctcatatgctggcttcccatgaaggttcatatgaattaccatctgctctaacaaactactgttaaattgtattttacataaaagttaaatctaattttatttcttctgaggaagctgaactaacttttgaccagaaaggggagagagtgagtggctgtatcactcatgatataattaagggtgaggggtaaaagagtaaaaacaatcagacctcttccagaaggatttagaaccagtaatgaagggacagcagaataaaagagttgctgacttacactgggtaccaccgtgggatgctctcgtgcctctgcgtctggtacatcaaatgcccggagcacttcagggctcttgttgccagtctgaaatctcaagtcaacatctctctctctcaaaatctctcttctaccctcatacgttttggcataagggccttgctcagtggggcccatttggcccctataatggaaatcggcatcacctgctccaccatcaggtctataatcaatttcctcctgccgtcttctatcccgtggccgaagtgcctggggaggttcgctctcaggaccgcctatatgtctcagcacatgaactgattttccagcaccatagcagaaactctgtaaggaaaagaaatacattttcctgaggactcaatggctaacttacaaaagttatgaggcattttattcagagtgctaacaaagttatgtaatttaacttacttgtggcatttatagacataaacatgttaatttgactttttttcattagagacctctttagattaatacaaggccagagtggccaataaaacttaataaatctttcagtagacattttaatcagctagacacatttcgattgaactataacaatggcaggctgaagcctagatatttaaattagaaggttctagtctgataattattcatgtttctagattcatgcccatcatataaggtaaatgctgaaaatatttaaagttgtatatcattatgtaaacaatcttctgtacattttctttttacaaatataaactaggcttaagttacagctaaaattcaacaggttttgattcacattccatgggaaaaagtaggcagcagttccttacagtgtggcccagggacccccgggggatacctgagactttcaggagatctatgagatcaaaacttttcataatacaaagacattattatttgtctttttcactgtcccctcctgaatatacaacggagcattccagatgctagagtgacagcctcactcagactcaggggatgcatgcttgcgtgtacagtactcgtatgttttaaatttgttttaactcctaatatgtaagtatcaataaatataatcaccttaagtaagagctgtttgtgggcttcaatttttaagactgcaaagaggtcctgagaacagaaactttgaaaatttctgtactagtttttcaaacactactatttgaagacaaaagcagcaaaagtcaaagagcataactttcctgagggagcacatgaaacaaaaacagatggtgaagactctgctgataatttcagtttcagagactaaactatgactatagaactaatgtcacctaacaaaaaaatacccgtcaaccacataatcctgtaatcacaagccaaaaaacaaaaccaaaaaagaaacgatttcaaagtgaacagagatagtgaatcttgtatccttagggaagagaatttcccttggcacatctgagttctttttgttttatgcgacaactgctttacttgggtaatagctaaaaaatcgataacaaaaaacactgaatagaccatggagggatgacgagtaatatttcttcttaatgtctgctcctggatccccaaactctttctcagcatacccatgttcttccacatccctttctggttctgtgtcaaactcaatgctctacccttctcactgctgcaaaaactgactagaaataagaagtccccctttctgggagacagaaatcaacttcctatttcctgtgtattaatttaccaaggttaacacatttaaaaagaggttattattctaaatcactgctatgacatatgcaatcaaactagagaactactttcttgattataaaaatatacaagtaagtataatatgtctgtatcatttagaggggcagaggggaggaaaaaaatctgtatcacttaaaaatcgccttctcattaagcgtgacttagcctgatttacaacatcaaagaagcccaataattttagcattgcctttttttctgtaaatcttgctaaatattgacagtgctaatatttaatactaaccagtattactaatattaatactaagatttaatataaatcttgctaaatactgacagtgcatatatatatataaatataaatatataatatataaatatatattatatataataaatatataaatatagacagatatataaatataaatatatatagatagatatataaatatacatatatgtataatttttttttttttttgagacggaatcttgctctgtcgcccaggctggagtacagtggtgcgatctcggctcactgcaagctccgcctcccaggttcaccccgttctcctgcctcagcctcccgagtagctgggactacaggcgcccgccaccacgcccggctaattttttgtattttttttagtagagacagggtttcactgtgttagccaggatggtctcgatctcctgacctcgtgatccgcccgcctaggcctcccaaagtgctgggattacaggcgtgagccaccgcgcctggcccgacagtgctaatatattaatactaaccaggatggctaatgccataattatcagcactggaagatgaagcagcgctggaatttccttcatgagtgctttaataaattccccagttccttttccaatatgcttcaatggctccgttacaaatgtggtgaatgtaactgcaagtgcctaaaacgagagaaaagcaacttaattttctcctcacaggactaaggtacagaatgcatcaaaattcattgagtactgatgctgaaagtatgttacataaattaaaatgctgttgtgccatttttaatgtgaaaatcactgtgcaaaagtattttttcttggacaaacgcttattagcaaaatgactcaaacactaaagttctttaaaatacaagggatttctgactgactttaagtaatttttacaaaatatatgctatacctttgttggtgggaccaaccaaatagggttgactagtaagagctcatagtatttttggcatgggtcatccttataggtccatgaacttctaaaccattctgtttagagaaacagacaaaacactgatcatttcttttaatgttgcatttcattcccaaacaagacattactttggttttgaccctccctgaccacccaccaatgagttttaaattatcttaagttttaagtagactccctgtaatgctgatttttaaatttttcatcttatgtccaaaatcatgttttaaaaatccattcaaattatacatgttttatgcagataaaaaattgtattttataaaaatgtctaaaaggtaaacactttaaaagcaatgcttcacaaacacaaatgagtacaggtaaaatgggaagtcgaaataagactggtggattgtatcaaagtcaatatcctggctctgatattgtactattaaagctgtgcaagatgtcaccactggaggaaaatggggaaagggtacacgggctctctctgtagtatttcttactgtgtgaatccacaattacctcagtaaatttttaatttaaaaagtcagttctttatggagtttacaaaataaagtggaatattagttctaatttttccaaatcaggcttatatacgttgggaaactagcctgagctagaggaggcatttcactgtccactgaagccaggaaggaaggctga

SEQ ID NO: 8872 - DNA, 14863 bp, Homo sapiens
ttacacaaaagtaaagataatagaataataaattcctatatatttgttacttagattcaatacttattgatattttcatgttttattcctttttatcttgtatacatagtatatcaacaaagctagtttacttaaacaaaactacactgtgttcatatactgtatatacaagatttattttccagatgtaataggaaaaaaaaaaaaaactaaattatttgcccaagaaatgcccacctattcaatatagttcatatgtatatatatctaggcttaatttacaaatgaaaacttgtttgctactataaatcagagtgttaaaattagacttatttatatacctcactgaatctcaattaactaagttcacaggtcagtttcaaaatcatcatttgtttaagatacattcattcattcccccattatgaagttgggactgtgcacagaataggtaaggcatattttatatacacatataaattaaatgtcattaagtggaaaaatctaaaatcaaattttaagacaataattttatgaacatcatagagataaattctttagctgttaaactgcaattcacaaaatttgcataacaatacccttcccagccttaactgatccctttattgtatattcactcaggagattctaggaaattcagtggaaagcaaccgctggaaactgaacaaggtgagaagagttttcaggtgctaccaaccataaagtaaagagaattcagactttaagttaactacattagaaatgtttgatgaatacctggagttttccactaatctgtcctaacaaagtatgaaagtaaactttcatgacttcatggtgatcactcagcaagtttattactaattagaaccaattcaaactcttcagaggaacataacagaaaccagtgtctgcattgtattctccgaaatgtcctgtagagatgataaattacagtagtcctcacctcatctgtagttttgctgtctgaggtttcagttatcatggttaaccacagttcgaaaatattaaatggaaaactccagaaataaataattgaaaagttttaatttgcatgtcattttgaatagtgtggtgaaatctcgggccatcttgctctgtcgcaccagggatatgaatcatccccttgtccagcatatctatgctgtatagacactaccctcctgttagtcacttagtcccatcacaggtatcagatagaaaaaacatagtatatataggtttggtactatctgtgatttcaggtatcaactggggttcctggaacatatcctctgtgaataaaggaggactactgtattagatatacaggaaagaaacaggaaaatgttgaccttattaaaaaaagaagttgataaaagcagatcctgaggtgacccagatattgaaattagcatacaaggaagtcaacgtaagttctgtaaatatgtccgagaatataaaggaaacaatgtttataatgagtgaaggtatggagtatttcagagaaatggaagctgtaaggaacataagaactccagaaagctgaaaagtaaaatacctcaatttaataattcactggatatgcttaacatcaggtagagatgataggaggaagagtagtcaacctaatgactacttttgtagtcatctggccataggccaggatttggtctacaggccaaagttttctcaaacatgatactattgttaaaagtaaatataatgagaatttatttatttatttatttgtatttatttttgagatagggtctcgctctcttgcccaggctgaagtgcactggtgcaagcttgacccactgcaacctcacttcctgggttcaagctattctcctgcctcagtctcctgagtaggtgatattacaggtgcctgccaccatgcctggctaaattttgtatttttaatagagacagggtttcaccatgttggccaggttggtcttaaactcctgaccgcaagcgacttgcctgcttcggccttccaaagtactgggattcctggggtgaaccactgtgcccggcctaatgagaatattttaaaatcagctagtaaattaaagatacattatatgtagaccaaagtataatgacagatgaatggaaatgatccaatctaaagaacggagaaagaaaaaaaattacttagcactgcctcagatacaatgaacgccctagcacacatgcagctggagtcctagaaagagaaggaaaaacactggtcaaaaaacaggttttaaacaaaagcctaaaaaaaataagtaaaaataaaaaaaatagcctaaaatttcctaaatgtggaataaaatctcaatttatagttcctagaagctttgtgaatcaagcaaggtaagcttgaaagccaaacatagacacatcatagtttatttaactctgaggttggaaaacttttctgtaaagggccagatagtaaaataagccatataaagactctcttcattcttcctcctcttcttcccccccctcctagttctcttcattctccccttcttctacttctccttttaacaaacctttacaaatgtaaaaacatcctttgcttacagatcatacaaatataggccatgagtcagatttggtctacgggccaaagttttatcatacatggtataagtgtcaaaaggcagatataaaaaaatttttgaaatcatctagtgaattaaagatatatatatatagaacaaagaaacaaataatggctatgttgtcataaggatgaatgaaatccagaaaataatggtgccacatctttaaagtgctaaacaaagaagaaaacacacacctctgtaactatgtggaaaatatccttcaataatgaaagtagattaaagacattttcagataaagggaagttgagaaaatttgtcaccagcagctctgcactaccaaaaaaaaaatgttaaaggaaatttttcaagcaggagggcaatatatataagctagaaccacagagtatggaaaatgggaaaggtatggttaatgtaaatttttttccttcttttcatttctttaagattgttttcatagttttgtgacttcaaacaaaaatgacaacattgtattgctggcttacaaattatgtgcaatatatgaaaacaatagtccaaaagataggactatatcactatatcatgagcttaaaatactaccatctcacactggtcagaacggctattactgaaagtcaaaaataacagatactggtgaggttgcagagaaagggaacacttatacactgctggtgggaaagtaaattagttcagacactgtgggaagccgttgggagatttctcaaaaaacttaaaacagaactagcactcaactcagcaatcccattactgcgtatatgcccaaaggaatatatatcattctatcataaagccacatgcatgcctatgttcattgcagccctattcacaataacaaagacatggaatcaacctaggtaccatcattggtggactgaataaagaaaatgtagtacatatacaccatggaatactacacagccataaaaaagaataaaatcatgtcctttgaagcaacatggatggagcagaaggccattatcctaagtgaattaatgcaagaatagaaaaccagatactgcatgttctctcttatgagtggagctaaacattgagtacacatggacacaaagaaggcaacaatagacaccagggcctgcttgaaaagggtgggaggggggtgaagattgaaaattttattatgcttattatctgggtgacaaaataatctgtacaccaaatcccatgacacataatttacccatgtactacctgaacctaaaataaaagttggaatggaaaattatacaaagaggtactgctaaaaagataataaaggaaataaaatggaatactgaaaaatatttgtttaacataaaagtagacagaaaaggaagaatgggaacaaaaattttgtgacacaaatgggaaacaaatagcaaaacccaatcatattattaactatattaaatttagggactaaacacacagtaattgtcaggataaaaaatccatctattttactctttataagaaatcttttaaatgaaaataaagataggttgaaagttaaacaaaatcagaaaaaacataccatacagagtaagcatatgaaaactgctgtggcaatgttaataaaaaataaagtagactttaggacaaaaagtgatatctgagattaagtggagatcttcacagttatcaaaatattaatttataagatataaaaatctaaagattcaaaatattctaaatatgtatgtgcctcataacagtgcttcaaagaacaggaagaaatactgaaaaaaatgaaagaaaggtaggaatccataatcgcagattggaaaaatccacatttatttgtttgccaagagagaccatgcactgagccataagttaaatttcaataaacttctaaagtttgacatcttagagagtatgttctcagatcataaacatccagtgtagaaatcaaaaatataatatttaataaagctcaaatatttggaaattaacaaaaaataaatcacaagagaaattagaaattatgttaaataaatgacaatgaacataaagcattcctgaattcatgagaaacagctaaagaactgctagaaggaaatctatatttaaaagtttatatgataaaagaagaaaggtgtaaaatcataatttaactttccaaattgataggtagaaaaagaaaatgaaatttaaaaccaaaacaggtcaaatgaataatataataaatagaacagaatcaataaaaacacaaaaaataaaaaggcagaagtttttttggaaaagattaggaaaattgataaacccctaacataagtgatcaataaaaggagaaaagcacaacttaatcattttaaaaattacacaggggatatctatatagatgctatagacttcaagaagataataaggcaatttttaaaactgccaattgccaatgatttgacaatttagatgaattgaacaaattacttgaaaaatacaatatatcaaaaattgaccctccctaaagatattaatacaaaacctatctaaccctatgtctaataaaaaatagccaatacaatgcacgaagaaaactagagactcagatagtttcactaggaaattttatcaagcattttaaagagaattaattttaatctgaagttactttagaaaacagaagaggaagtgcatttccccgatcatttgttgatgccagtataccccaataaaaaacctgacaaaaacattataagaaaataaaattatagaccaatatattttatgagaggatgtcaaaattcttaaccaaacattagtcaattgaatcatccaatatataaaaatgataatatatcataaccaaatggagattaattcacaaatgcaaagctgccttcatattttaaaattcaatttgcataaattgtccccgttaacagaataaaggagaaaatccttatgttcatttcagtaggtttcgaaaagcatatgacaaaatgcaaaaccattttgttataaaaactctctgcaacttaggaatagtaggggacctactgaatctgataaagggtgtccataaaaaaatatgcagttcacatcatactccatagtgaaatattaggtttccctttaaaattcagaacaaagtgaagatgtcagctctcgccatttttagttaaccttggcataaagattgcaaaggaagaagtaagcctgaatgtacttgcaggtaaaatgattgtttatgtgtacgtttctaaagcatgtagtttaaaactactagaattaataaagaaattaagcatggtgggtgctcccgaatcgatgaggaaagccgctctccccggcagatcctcccggccggggcgcctccatcaccctgcctgcgcctcggcacgctggcaaggagcccgggaagagacgccgggagcgacttatgaaaatatgcatcagtttaatactgtcttggaattcatgagatggaagcataggtcaaagctgtttggagaaaatcggaagtacagttttatctagccacatcttggaggagtcgtaagaaagcagtgggagttgaagtcattgtcaagtgcttgcgatcttttacaagaaaatctcactgaatgacagtcatttaaattggtgaagtagcaagaccaattactaaaggtgacagtacacaggaaacattacaattgaacaatgactcagctatacatttacatcagattattgggagcctatttgttcatcatttctcgtgttcaaggacagaatctggatagtatgctccacggcactgggatgaaatcagactccgaccagaaaaagtcagaaaatggagtaaccttagcaccagaggataccttgccttttttcaagtgctattgctgagggcactgcccagatgatgctattaataacacatgcataactaatggacgttgctttgccatcatagaagaagatgaccagggagaaaccacattagcttcagggtgtatgaaatatgaaggatctgattttcagtgcaaagattctccaaaagcccagctacgccggacaatagaatgttgtcggaccaatttatgtaaccagtatttgcaacccacatgccccctgttgtcataggtccrttttttgatggcagcattcgatggctggttttgctcatttctatggctgtctgcataattgctatgatcatcttctccagctgcttttgttacaaacattattgcaagagcatctcaagcagacgtcgttacaatcgtgatttggaacaggatgaagcatttattccagttggaaaatcactaaaagaccttattgaccagtcacaaagttctggtagtgggtctggactacctttattggttcagcgaactattgccaaacagattcagatggtccggcaagttggtaaaggccgatatggagaagtacggatgggcaaatggcatggcgaaagagtggcggtgaaagtattctttaccactgaagaagccagctggtttcgagaaacagaaatctaccaaactgtgctaatgcgccatgaaaacatacttggtttcatagcggcagatattaaaggtacaggttcctggactcagctctatttgattactgattaccatgaaaatggatctctctatgacttcctgaaatgtgctacgctggacaccagagccctgcttaaattggcttattcagctgcctgtggtctgtgccacctgcacacagaaayktatggcacccaaggaaagcccgcaattgctcatcgagacctaaagagcaaaaacatcctcatcaagaaaaatgggagttgctgcattgctgayctgggccttgctgttaaattcaacagtgacacaaatgaagttgatgtgcccttgaataccagggtgggcaccaaacgctacctggctccagaagtgctggacgaaagcctgaacaaaaaccacttccagccctacatcatggctgatatctacagcttcggcctaatcatttgggagatggctcgtcgttgtatcacaggagggatcgtggaagactaccaattgccatattataacatggtaccgagtgatccgtcatacgaagatatgcgtgaggttgtgtgtgtcaaacgtttgcggccaattgtgtctaatcggtggaacagtgatgaatgtctacgagcagttttgaagctaatgtcagaatgctgggcccacaatccagcccccagactcacagcgttgagaattaagaagacgcttgccaagatggttgaatcccaagatgtaaaaatctgacggttaaaccatcggaggagaaactctagactgcaagaactgtttttacccatggcatgggtggaattagagtggaataaggatgttaacttggttctcagactctctcttcactacgtgttcacaggctgctaatattaaacctttcagtactcttattaggatacaagctgggaacttctaaacacttcattctttatatatggacaactttattttaaatgtggtttttgatgcctttttttaaatgggtttttatgaactgcatcaagacttcaatcctgattagtgtctccagtcaagctctgggtactgaattgcctgttcataaaacggtgctttctgtgaaagccttaagaagataaatgagtgcagcagagttggagaaatagactttgccttttacctgagacattcagttcgtttgtattccacctttgtaaaacagcctatagatgatgatgtgtttgggatactgcttagtttatgatagtttgtcctgtctccttagtgatgtgtgtgtgtctccatgcacatgcacgccaggattcctctgttgccatttgaattagaagaaaataatttatatgcatgcacaggaagatattggtggccggtggttttgtgctttaaaaatgcaatatctgaccaagattcgccaatctcatacaagccatttactttgcaagtgagatagcttccccaccagctttattttttaacatgaaagctgatgccaaggccaaaagaagtttaaagcatctgtaaatttggactgttttccttcaaccaccattttttttgttgttattatttttgtcacggaaaacatcctctcctaagttggagcttctattgccatgaaccatgcttacagagaaagcacttcttattgaagtgaattcctgcatttgatagcaatgtaagtgcctataaccatgttctgtattctttattctcagtaacttttaaaagggaagttatttaaaaaaaaaaaaagaaattaaggatggctatagggcataaagtcaatattcaaaattctttaacaattacattaaataattggaaaattatttaaaaattttttttacagtcatgcaaagcaaaattctaaagattaatttaacaaaagacatgcaagatctctgtactggaacactgacatgaataaagaagatagaaataaatggagagatatgctatgttcattggttaaatgattcaatattattatgatgttattttcctcaatacttgtttgcttttaaagtttaatttcctttttgacaaaattgtatatatttatcatgtgtgacatgatattttgaatatcattgtatatatatattatatatatacaaattgtgaaatggttatatcaagctaattaacatattacctaacataattatcaatttttttggtgagaacacttaaaatctactctcagcattttttaagagtaaatacattgttattaactacagtcaccatgctgtacaataaatatcttcaatgtattcctactatctaactgaaattttatattctttgaccaacatctcctcaagctccattttccatatttgtatatagagtctaagcaataatcctaatattttctgtaattgacaagttgattctaaaattgtatagaaacacacacaaaaaagcccctactatagacaatcttgaaaataaaaaataaagttggtacattatattacctaaattctagacttactaaagcaatgaagatagtatggtattagcacgcagagggaaaaatagatgctaggaaaaatagataactgaggttctagaaattgatccatgtaatatgatcaattgatttttcaacaaatggtgctagaacttcaggttaaccatataaatctggttacttattcacaccacacacaaacatttacttgatatgggtaatagctctataagttaaaattttggtttttaggataaaaaaatatttagactttgaacatctacttcataagagaagatacaggaatggtcaataagcccttacgattaaaattaaatccataatcagatgccatttcacacccactagatgactaaaatccaaaaagatagtcaacatcaaatattagagatgatatagaatgactgaaactcatataactttttggtgaacattttatacattattactaatttggcaaaatgttgacggtttcttataaagttaagcatctacctatcctatgaaaaaagctttctattcctaagtatttacacaaggtaaataaaaatatgactataaaataactagtataaaattatttgtaggagctaagctaaaactggaaatgatcctaatttctatcaacaggagaatggatttaaaattttgatatgttcgtgcagagaaatactactcagcaatttctttcaaaagaaaaagaactactgatgcacaaacaacatggataaatcttaacatattatgtcgagtgaaaaaagactcactagtatgtactgtatgatttcatttttatgaaattctctaagaggcacaactaatttacgttctaaaaatcagaacagagtttgcctaggggtccactccttgactggaaggagccatgataaaactttctggagtgatggaaaagttttatcttacatcctcaaagatttaggtcagtttcaactacgaaatgttcctacttaccttttaatttgaagttcaactgtttacagaagctttcaaaattattatttttttgtataaaacatttttgtatgaaaaagcaaaaaaataactctttatgaaagaaaaagcatactttacccctttgggtctgaagaagccatcagtacatgtctcgcagtttataccagcagtgttttgggtacaattaatgcagacaccccctccaatgtactttccacgtatattcaaactcagatttcttctggcaacattttcatcataatagcattcttcagcttttccatgacaattgcatgctgcattaaggaaaaataaattaataaacatcaatttgatttcagatacatttaaaaatcatttctgttatacataatagattttttttttgagacagagtctcactctgtcgcccaggctggagtgcagagtggcacgatctcggctcactgcaacctctgccttccaggttcaagcaatcctcctgtctcagcctcccgagtagctggggacaacaggcatgcaccaccacacccagctaatttctgtatttttagtagagatggggcttcaccatgttggccaggctggtcttgaactcttgacccatgatccacccgcctcagcctctcaaagtgctggaattacaggcgtgagccactgcccccggcctagacttttataccatacgggaaattacatttagcgtacacacacacaaacatatccagaaagtatctggatgtattggaggtattaataaattcacacattttaatagaatttgaaatgattaaaacatataaattaagctcaatcatatgcaattgccaatatttggttttgactaacgtgcaattttatatggttcaacttacaatttcctattataacaaataataaattattcaatgatggcactgaatgattaacagctaggtaatctgtaatgaattactaccatatggaaatttctgtattagagcctgtgggtaaagaaaagtatgtataatataattcctttcttttaatactaataacaactaaaacataggttttctcaatgccagacactgttctaaatgctccatatttgttgctactgattttaatcctcaaaaatgcttttaggaattaggtattattattattaacctatttttgtatactagaaacctgagtccagagaagtgaaataacgtgtaaaagatattctaatcagtattggaaaccaacctctgaagccagactccagagtctgcactgctaaagactgccagaatctcttcacatcctacccggtgaatgaaataagatacatggcaggtgccaaggaattaagacaaaccgagagctagtttactggtggctaagatcatgctattttgcaaccaactgtcttggatgtgggtgtgctctcctctacttagcagtcatatgacattggaaacttcttaatttcacgaaggctcagtttccatataatacatggagtggtcaatagtaattactagattgggatatttaaaagcacaagtgagataatgcatgtgaaatcattagcgtaatgtcttataaagaagttagcaattgatttttcttcttttcttcctccttgtctttttcatgttacattagaagaattccaagaagtgaaaaatcactttctccagaaaggattgggtaagactcttctaaatatgaagaatttatattaggatagaaccagggaaatatatcgatgcagtctccttcctacctgacatgttgagtttcttaggagtacttacatttatttccacgtgtgtgtgtgtgtgtgtaggtgtgcttgtatgcatacagctcaatctttttatttattctacaaaagggaaggggcatttgtatactgtttagaaccggttctttttactaacagtaaatcatggagccctttccatattagcatgtgtatcccctaagggtacacagggtactacttgaatgaaggtatttatcaggtccctattaatgaacagttacacagtttccatgtttctccctttacaaataacaccacacacatactgggaggacaaggatgccgggtggagggaggcgctctaatgttagaaaagtttcctatttgccagttgagtgactttgaggcaaaaactcgagtcctagcatcactttagtacttgtctcatacatgttttgagaatgcttagcagaatgcctgaaacatactaaatactgagctcaataaatgttagtagcagtagtggtagcacttgtataataatgacgaggatcatgataatatgcctgtacatctatatgaatatatctatagggtaaattcctggaagcataatttctagtcaaaggatatgtaaaatttaaattttaatcgcttaaaaaattcccctccaggaacgctatgacaaatgacttttcctctagtagatatgataaaacactttctccatagccaccaaccttgtgtgttatcaacccttgaatacaattcctggacataataagcattcaaatatttgttgagtagaagaataaacactttgataggtgaaaaataatatgtcattgttttaattgatacttccttcattatgagtgtcattatctttttacaaagttatatgtcatttctgaggaatacctgttttgatctttctaacaggttaacttttttcttattgatatgtaagatctcttaatatagaaaggttattatccccttgtcatgtttgttgtaaatacctttcccaacctgctgacatttgatttagaatatagtagttttgctatgttaatggagagtttcaaactttagggaacacatagtaatcaatacaaatcactaggcattgtaagcagttttatatctttagggcaacatacaagaattccttttttttcttcagaaagacagtgatatggtttggctctgtgtccccacccaaatctcatttgaaattgtaatctccacgtatggagggagggaggagactggatcaagggggcagctcccccatgctgtcctcatgatagtgagtgagttcgtacaagatctgatggttttataaggggctcttccccattcactttctcctctctctcctgtaccatgtaagatgtgcctgctccctcttcccctttgatcataagtttcctgaggcctcctagccatgcagaagggtgagtcaactaaacctctttcctttataaattacccagtctcgggtagtatctttacagcagtgtgaaaacggagtgatacagacagggtctcactatgtggcccaggctggcctcaaactcctgggctcaagagatcctcccaccatagcttctttccagtagctgggattataggagcatgccactggacctggctatgaattcttaaaagctttgttgtaatagtgtatttcaaaaaacagtcaaaacttctgctgccagtataagcagaggaaaacataaagtaacatagacttattctcacactatttagaattcgtgttgtcaagagtgtttagaactatgagctactatatgtaaaaccctgatgccaaataaacggtccatcacacactctgtgcagccaggaccctacacctacagccccactttctgtctgtaggctgcagcctaccccgctctgtctgtaaccttcaagaatatggctagtaactgatcacaaagccatgttttttctctatcatcagcaacttactatttcacagaatgtccaagatatatcatatgaaactgttgtttagtaaaggctcagcaactgaatgaatattctatgctttttagagatattatcttgccttatgtaagctagattgatgaaaatccaaattaaactcaaatgaattagaatgtgattattcattttatggagggatttgtcatgtcatggaaggatttttctaaatattaaggtgattggaatatgattcaacttggaaaagaaaatttttacttaagctttcaggaatgtactcattgctgaaagtgtgatttttatgtatggctttatggctaagatccccatcttgaatttctgcgtttttaaaatgtttgtttttcagtttggaaatacgacctcccctcttccctacagggaaagaaaaaaagtgtttcacaattccactattttaaaaatgtgtacagtagcagtttgaaatgtcttgccttgcttagtctacctctattgctaacaagttgctcgattgtttttgttttgtatttaaacgtag

SEQ ID NO: 8873 - DNA, 34263 bp, Homo sapiens
tggtggcaggcacttgtaatcccagctacttgggaggctggagcaggagaatcgcttgaacctgggaggcagaggtggcagtaagccgagatcgcaccactaccctccagcctcggtgacagagtgagacccagtctcaaaaaaaagaaaaagacacaaattgactagcccaacgttatattgctggacggtggcagactcaggacttgggccccagttttgccactttagcacaggttcgtcggggtttataggggggactctttgctgataggaagttttcaaatagcatgtaagagaacagtgtagaagtggaatatgtgaaggaacgtctggtgggaagatatgtgaagctggcaagtagggaggttgaagagaactcacttcacagaagaattcattgccacggagcccacagaaccaggaaatccaggacacctcctctgagctgctcatcttcacgtcagctagaaaaagaacagtgtcagtaaagctcaagttctccttccctgcctctggtatcctccctcctcccacattcggccctccaaccacgggagaattcggaaccaccctttcttaaagcaacccaaactctgaagcactcctctccagctcctctaatttacatctcagccccttttctttgaagttaaacattctttggggtcccaccacttgaaagaagccaacagatactttgacccaccagcccgacccacatccctggagctcccgaaggccagggccctctctcctctgtgtcaactccggcagggacctcgactcaggctccctaccaatacaagtctctgcatgacccccacgcctttcccaagggtttccaagtttatcattctcaagcaagaaccgggctcctccttttctcacgggttgggggcgattgtcaggtccctttcaccggaatccacacatcccccctccgctcctcaggccacctctccctccttcgtgccggacctggtcgcttcctcccccgcccccacatcaaagtccggagaccccatgtgccgctcccagcgacaagggactcggagcagcgacgacttcagactcaccggctggacggggaccaggactggggtggggtagggaagttgctacttccagggaacggcggcgaccgctacagcgcaggccgcggacccgaccgcggcaggcgaagtggggtggggggagtggaaattagggagggtggggaagagggcaacacgcaagcgccaagggtcaggtgccgcggtggatgccgggacacggagtccccggtagagaaagaaactggctaaatgagagaaagcgaactaccaatcccaggatgacccgcgcacgacctggctgtcacgaaggcccggaggagggcgcttgcgggcggggcacaacgagaagccaccggaagcggaagccaggtatggcgttcggggcccgggagtctgggcaatacagttttgtgctcactgggtgaagaggctgacttagggcggggaaaggagggagccaggctggatctctttccgcagctctcctcacgttcccctctagtcccggcgcggcgctgctgcccaggggactggcctatcctcggccaatccgctgggtccttattgcctgttgggcccctagtgcgaatcagtcccgccagagacccttgacgggcatactgtttcctccgggctcctgcctcatgaggggagaggtgcggcttggctccgtgcgtagggacttgggtggggtggggtgggcggtgtgagaactggaacgtcccagtgcgctaacctgaggtggtgccagccattctgctcgtccctttgcacttctccatttccccttaggctctaagtgtgaccttcgaaccctggtcagagtaatggtgaggggcaggcgtgacgttatttcattacacggcttctcggcattccacaggtttccctccgcctcctgagggcctttcctaacccacagagtggattcctggctccagaaaatgggcttggagcgggggccacgttgaggaaggcgaagggcattgtgggggcgttatgtaaaagtaggaccccaaccgacagatcctagtgctcgcgccacctgggcgcgcggagctttgctcgtttactattgaaaaagttccagcgcgggaaactgaacccggagctttgcgcacgcccgagccctcaagtaatgtgggttgtggtttttgttgttgttgtcgccacgcatgcgtcttcgtgccgtgtggctatttgattgtgtcaactcttctgattagaatggcgccattttgcggtacggaagctacacagcaacacgtataggagactctccccgagatcttctagggagtgacccatctatttttgtttgggaagaggaaactccgaaatgggatcgcggaagacttaaagggccaggctgatttttttttcctactggtatgtcttacggggtgggaaagtggtttcagaaagaggctggtgtttattgttggtgaggatgggggtgggggccggacgcaggacctctggacaacagtctcatggagttttattaatctttactaaggagcaaagtcggtattgtagggttccatgtttttacgcaaagtctctctcccttaggccctgcagagtcctaagttgtggggttactttagtggcaggaaagtgtttttgactactttttctcatcccagcaggtctctgaggctgtggttgctacagggtcaccacgagcttggcttacttgtctcatccttcccttgcctggtatcattttctcagttctcccaaaagccatgtcccggcccttgctcatcaccttcaccccagccactgaccccagcgacctctggaaggatgggcagcagcagccacagcccgagaagccagagtccaccctggatggggctgcagcccgagctttctatgaggccctgattggggatgagagcagcgctcctgactcccagagatctcagactgaacctgccagagaaagaaagagaaagaaaagaagaataatgaaggcaccagcagcagaagcagtggcagaaggagcatcaggaagacatggacaagggagatcccttgaggctgaggataagatgactcaccggatactgagggcagcccaggagggggacctgccagaacttaggagactgctggaaccgcatgaggcaggaggagctggggggaatatcaacgcccgggatgccttctggtggaccccactgatgtgtgctgctcgagcgggccagggggcagctgtgagctatctcctgggccgtggggctgcctgggtgggggtctgtgagctgagtggcagggatgcggctcagctcgctgaagaagctggcttccctgaggtagcccgcatggtcagggagagccatggagagacaaggagcccggaaaaccggtaaggggaaactttagctcagacccatgtctcattgtgttctgcctctcccagccacaccacaccagacgccccagcacagtgctgaagagttctttccttatcctcatgtgtaggttgacagggtagtatagtcaagtggttataaacatgagctccctggatttaaagcctgattccacttacttgggcaaacaacctaatgtctacatgttccagttttctcatcttagaaatgggggtagtaagaattgttgttaggattcaatgggttaatatatgtaaaatgctagaatagtgcatgccgcatagtatgcaatacatgaatgttagctatagtcattatgactaatgtccctccccttgcccaagagtttgctaggtctggttaccatttttttctttcaactattctgctctggatcccacaatggtttaaagaaatttgtttttaagacaagtcaagtgcagtagtgagaaggaggggaaaagtggagtaaggagtttgatctgtaactgagtgaacaattaattcagataactcaccaccacctttggaccagcctggatccctcactgttaagtaggaaggaaggcaatttgtcccttttttttttttttttttttttgagacaaagtctcactcatctcactctgtcgcccaggctggtgtgcaatggtgtgatttcagctcactgcaacctccgcttcctgggctcaagcatattttttgtagaaagcaggctttgccgggacatggtggcatgtgcctgtaatcccggctacttgggaggctgaggcaggagaatcgctaaggtggaagttgcagtgagccaggatcatggcactgcactccaacctgggcagcagagcaagactccatctcaaaaaaaaaaaaaaaaaaagcaggcgttgccattttgcccaggctggtctcaaactcctgagctcaaagccatctgcccgcctctgcctcccaaagtgttgggattacaggcgtgagccactatgcctagctggcaatttgttccttagcagaaaagctgaaaagatcctattctaccctgccagccccctctgaggcctcaactcttccccttttccttcccctgcccttaatgctttttcttctttctctgcaggtctcctactccctccctccagtactgcgagaactgtgacacccacttccaagattccaaccaccgcacatccactgctcacctgctgtcactgtcgcagggtcctcagcctcccaaccttccacttggggtgcccatctccagcccgggcttcaaactgctgctgagggggggctgggagccaggaatggggctgggaccccggggtgagggccgtgccaatcccatccccactgtcctcaagagggaccaggaaggactaggctacagatcagcaccccagccccgagtgacacatttcccagcttgggatacccgagctgtggctgggagggagagaccccctcgggtggccacactgagctggagggaggagagaaggagggaggagaaagacagggcttgggagcgggatctaaggacttacatgaacctcgagttctgactttggtaaagtctgaccctagtctgctgctgaagtctgaacttgggcctctgacctgggccctttgacttccccttcctgggatctgctcagatgcagatcctgaagtttttggtcaataggctctgtcttcgtgagagacgggctgagagtcagaaataaatcaaccatttgtggtttattcacttttctggaagctattttgaggaagccaaacagaagcctgggagccacatgcaagtcccacctgagtcagaaggggcagcctctccaggtggcatgataaggtcacctccctgccaatctgggttcactttcaggtcccagaccctcctgggagtcccccacctattctttcaacccccctggaccaagaattgcccagcttcgtgcaagtctcacttcccccaggaggagttccctgactacagccaattcactgatttcacaaacataagtccatatactatgtgccaagaatacaggtaaagacattcccaaccctcaaagagttcacagctggagagggaaagtgccatgttatcaatttttttcttttttttttgagatgcagtttcgctctcattgcccaggctggagtgcaatggcatgatctcggctcaccacaacctctgccccccgagttcaagggattctcctgcctcagcctccccagtagctgggattacaggcatgccccaccacgcccagctaattttgtatttttagtagagacggggtttctccatgttggccaagctggtcttgaactcccgacctcaggtgatccgccggcctcggcttcccaaagtgctggggttgcaggcatgagccaccactcccggcccatgttatcaaatattataatgcagggtgataagggaagtcaaggcctctagagatgagaatgggtagggttttgctggaagaggccagtgtgataggaaggcccacgattatcaagcttgtacacttagttgaactgggaccagaactctagcccccaaatctaaactttaaacttctttgttccacccatttgtctacacttttctttcccacacttccccactctcccaccacccacccccttgtcttgctcatgccgggtggtaggcacaagaagagctcactgttgtgaaatccaggaattcaaatttgcagacgggcaggggagggctgttcaagtcgcaagactcctcattttttcttttctgggaaagcctttcatgaagtcttggatgcgaaatggaggagtggtgggggatgtggaaaagaacccaggggcagggggctgtagggggcgaccgagtttagggaagcatgagaaacccgggaaaatggggagctgggtttatattaaggtcctggtccttgctaatctcggtttggcggtccggcgcgcacagacagcgcggggtatacgggggcggtctattcgcagggtccgccccatgagctgcggcaccgcccccgcgggtccttccagtcctggtgcagctgcttccgggcttcgcggctcccggcggctccccaaggccgcggccccgacgctgggcccgggagcggtccccgcgcacagcgcccggacgcgtaggtcccgaagtaggcccgcgctttgcttcgtaactggggatctctgaggacatcttagttctgaccttgtggaggccgcgtctctgctgcgtgttcgcgggccagtcgggccactttgtagaaatcatagccctctaaatcaagggacgaacgctgctggctggagtttgctggacactttcattccacctcctaacaaagagaattcctattccttgaggtcccttggggcagcagttaaagactacacgatccaggagcacctaggacctggggccaccttcctgcccgctttattggatggagcactgcctccccagtttctgggacaccttggggtgtggccttggtgagtgaaacttggggtgctgcctgctgggaaggaaatccggaaacgcagagaggactctctggtggtgacccaggccttgtcagatctgagattcttggaatctcagattgtgggggtgtggatggtgaatgaatttgggtatgcccccctttaccccagaactgaagaggaagcaaactacttgccacacttgaggctgcatgactattcagagaagggaggagccacttctgaattcagagtaggactgcatcaccaggcaaatacctgttctgagccagaaagactctggcttctgaggagatcctgagagtctgagtagtgccaggaagcagcctcagaatttgggggcccattacacaccccagccatgttcctgcgacggcttggtggctggctacctcgcccttggggccgccggaaaccaatgaggcctgacccgccttacccagaacccagacgggtggacagctcctcggagaattcaggaagtgactgggatagtgccccagaaaccatggaagatgtggggcatcccaagactaaggactcgggggcattgagggtttctagggctgcttccgaaccaagcaaggaggagccccaagttgagcagctagggagcaaaagaatggattccctcaagtgggaccagcctatctctagcactcaagagtctgggagactggaggctggaggggccagtcccaaactcagatgggatcatgtggattcaggtggcaccaggagaccaggggtgtcccctgaagggggactgagcgtccctgggccaggagccccattggagaaacctggtaggcgtgagaagctgttgggctggctgcggggggaaccaggagctccctcccggtacttggggggcccagaagagtgtctgcagatctccaccaacctgaccctgcatcttctggagctgctggcctctgccctgctggccctgtgctcacgaccactgcgggcagccttggacacactgggcctgcgtggaccgctgggcctctggctacatggcctactgtccttcctggctgccctgcatgggctccatgctgttctgagcctacttactgcccaccctttgcacttcgcctgcctctttggtctcctgcaggccttggtgctggctgtcagcctccgggagcccaatggggatgaggcggccactgactgggagagtgaggggttggagagggaaggtgaggagcagaggggagacccgggaaaggggctgtgaccgtggggtgggggcaaagggtgaagagagtgtgggctttaggagaaaagtgtgaggcatgacccaaattgtaagcatagggacctcagggatggggaagaaacccgagtacgagggtgcagggccccccttcatacacaggagagaacagaactatttagggtgtttgtgtttatggacagtgagggcactgctcttggattcaccagctgttatttttgcttttacttttctcccaccttcagttttttttttttttccacctccactttttaaaagcaaaaaaaaaaaaaagtatgatggtggtgaataaagaccaaagggtcctctctacctttgaaaactctcctggggtggaggagaccagggcaggatagacagacctctgcagtaagagagtggttgggaaacccagggtgttccttggatctcaggatctgagccatcgagggaagagtggggctgctaggcaagtggattagggggtctggatagggccccacaggtgacagggagcctgcagggcggatctggtgatcatgggagccagagggagtggggacagtgcaggcagtattggcaggagggccagtgcagaagggctggtagctcaggcagtgtgggggaagcactgaagcctgtagtccccacttgggggctaggggtttgctcactcagcaataaataactgtgtcacatcaaatcctaaatataccactacaaagtgagagttactgccactctgttcttactgacaccgtccagctgggagtttaggtggtagaggatccagggggaatgttgaaatgggaggagtgggaatgacgtctggagacaaaccccagaatgagatgaggattgaaaaattatctttattatcttgagtgggagctggagctggaagtctccagcttctccctccaacaactcagctcccattgtacccatctggggacttagatgaagttacaggtcagttattggacagctcacaggcctctgtgatggggggagggaaaaagaaggacagaagggaagtccagggagaaaagcaaagttgatagtaatggggtgggggagaacgtgttctttcattccctgtgtcaaaggggagtctctaaggctcttttccctccacgtatgaccctctgccccctttatccagtgcaaactcagaaacctctcttttgagtagcccagaacccatcctgcctccctcaggtgacatcacagctcttagccacatccctctggtgacatcacacgagcctctttcaccctgtaacaccagaagacttggtgagtcctaatcctgttttatgagattttaaccccttaccttgattcctaggagtcaataagaaggctttggagtccaggcaggaagtcagggacttgaattcctccacacacttttcgggaggatgtggtgagcgatctggaagggcaaggtggggtcaggccagtcaaaacccctggaagcacctagctcttcctgggagggtgtcataggacccagagtgaggagttctcctgccctcccttgtttccctccaacccttcctgccttgtatccctactcactgtagaggagaaagcgctggtaaccctggcctgtctcattcagcatgattccacctgggcatgagctggaaaagagctcagtcttcatgtcagggcggcctgtcaaggcaggtgggagaagtatgagaacagagatgcagaaccaaactcaagggagggtgagggctgggaagaaccaaccttcagttctgagatctgtgctcccttcagtcaggtggtagatccatttccggggcacacagagcccatctttcctgcagaggtggtggtggcaaggaggaaagaatgagcatcaccccaaccatagtgtcccagcttcttttttttttttttgagacagagtctcactctgttgcccaggctggagtgcagtggcgccatctcggctcactgcaagctctgcctcccgggttcacgccattctcctgcctcaacctcgtgagtagctgggactacaggtgcccaccaccatgcccagctagttttttatatttttagtagagacggggtttcactgtgttagccaggatggtctcgatctcctgacctcgtgatctgtccgcctcagcctcccaaagtgctgggattacaggcgtgagccaccacgtctggcctgtcccggcttctatttactccattgtatttgttattgaagcccagctctccttgggtttcaagctaccaagcattggttaggcacatctttctccagagggcaattaatacagccactgaattccgtgggccaagcatagtagatataccagctaagaggccagctcttggtgggtggattctcacactttgggcagagactgaacccagtgatgcttctgcctccttaccactcacatgcggatggtagcacgaaggtggagctgcatcggggcagagccagcagccatattgaagacaatgttgtccacagggtcaaaagttgccaactcctccttggtgggagctgcccctgcgataaagtaccactggcccaagtggacctctgggaactggagagacaatgaagggagcaaaagagggtgggttccagcacaggatgggttcaacctcttcatcagtcaaaacagcaagatttaggggtagaggtgttggctgccttcctctttccaactggggattggatccatgacaaagagtcattaaatgacttttcctctttgcccctccccagtcaacctgggtaaccaccccaccccccaattctgccatgcctctgcattgatggccacagtactgatatttttcttcttgctttcattatcacaacactcacacccccttcctctcttcctttcccaagatggtctccagtcatcctaggccatccacccaagtccctcagagcctccaccataggcttcccccaatctcagtccatacctccttcccatccacgcccagagttgtcagttgactgtgctcagggcactggtagatggagttaaggataataccatagaagtagagcagagctgcccaaatttggtggaacatcttcaggcaggagggagctggtgctctgtgtgccttaactgctctctcccctactggctgctcagtccactctgctttcagctcccttgcgttcgacccttgaccctttcacctgctaatgagtaacttcaaccttgttttccaacccaaacctggattacttagtgtttgggacttcctccccctcttccggatgcaaccactccatagtacaccctggcatgtccagggtttctcaggagttatgaggagagctgagctgtccagggagaagcctgtggtctttgaacctgtatctgagctggttatttgttgcactgtgcagcactgaagggaagtagcttgactgggcctctcattcattcacttagcaaactgttttgaatcccaagtcccagttgtttcccaagaactagctaatccccggggacataaaaaaacgaataagacatagcccctgatcttgaagaagtcgttagagggaaaactagctgtgtagacaaaccattgcaatacaacttggtaaatgctttagaacaggtatgatgcaggtgctggggcacggtggattgctctctttagtttacaattagaaaaatatgtataccctggcagtgttcactgacacattcactcaacatttattactacaaagaggctatgtaatctggctgttagagaggatagatgttggtgtcaggcagaatgtgtccaaaccctaactacaggcagggcaggtagctcatgcctgtaatctcagcactttgagaggccaaggtgggcggatggcttgagcccaggagttcaaaaccagcctgggctacatggcaaaactctgtctctacaaaaaatacaaaaattagccgatgtggtggcacacgcctgtagtcccagctactagggaggctgaggagggaggattgcttgagcctgggatgtcgaggctgcaatgagccctgattgtgccactgcactccagcttgggcgacagagactctgtctccaaacaaacaaaacaccaccaacccctaactgctatgtctgttttttcatctgtaaaattggcaaatcatcaatcttataggattaaatgaaataatgcacataaagcccttagcaaagacttgcacatggtaagtccaaagtatatatttgctataattaatagtaatgtttgcaaagcacttagtttctggtgggtaataagttctcaaataataggcagtaagaattgccaaataggttgtccttggatagcaccaagtgactggagcagttaatgctgtgagagatggatcttcctcgatagattatttatttacttatttatttttaagacagggtctcactctgtcgcccaggcatgactttgacttccccggctcagatgattcccgagtaggaggtataggtgcacgccatcacgcctagctaattttttgtagacacggagtttcaccatgttgccccaggctggtattaaactcctgagctcaagcagtcggcccaccttagcctcctaaagtgttgggattacaggcatgagccaccacacctagcttgataaatttatatcccatggactgccacaaaaaatttgccgagggctgaggcttgcgatttagttaaaaaacaaacaaaatttgggtgaccagtatattagagtttattaatactgttctattttggtgtaatgtttgaatttttttttttttttttttgagatgggagtctcgttctgttgcccaagctggagtgcagtggcgcgatcttggctcactgcaatctccacctcccgggttcaaagcaattctctgcctcagcctcccaagtagctgggattacaggcgcccgccaccacgccaggctaatttttgtatttttagtagagatggggtttcaccattttggccaggctggtcttgaactcctgacctcgtgatccacccgcctcatcctcccaagtgtgagtcactgcgcccggccgaaaatttttgtaataaaaagctaaaatgtggttaggcacagtagctcacacctataatcccagcactttgggaggccaagtctgcaagaccaggctgggcaacatagcaagaccccatctctataaaaataaaattagccaggtgtggtggtgtgcatctgtggtccctactagggaggctgaggtgggaagatcggttgggctcgggaggcagaggctacagtgagttgtgattgcgccactgcactccagcctgggcgacaaagcgagaccctctctcaaaaaaataagctaaaatgttaacagctttttattggggcagtaaagtacaagtgctcgatctggagtcctgtaggcctggatttgtcaattctgacacttatgttcgtctaagtgtactcacttaaaaaatgttaaaagctcgttaaaaggctttttaaaataatacacaaaacccgtagtatatgggctggcacaagtgctcattaaacagctgcttattagaactcttaactaaaatataaccaggacctgggtataaactacgaatcccagaaaggttggacaccccaacagcgatgtgtctttctggaggactcgcagtttcgcggggccgaggcccttggcccagggcaggttaagagaagagggcacggagaggcggtaatgcctccacccccggccttcggaagcacgctggccggcctttaaattccccacggtcagggtcttgtctttctgtccactcggactccatttgctcccaattctcaaactcggaagcgcctcttttcttgacaagtcgtgcaacttagtagcacgtttacttttcctaaaacgtgtcatgtccccttggccacacaccgacgaatgtgacgcccacagcccttaaaacgcccacccggcagaaccgaaatctagcccaaccaagcaaccgagaacaaaattgaccagtgccgcccccaaacgcctactgaaagagtaacttccggaggcacagaagaaagggcgcagcgagggcaatagggtggagaagagttttagctggctaggacagtgccgcctgaaattatcagcctgccaagatttaaacatagatgaatgtggcataatcccccatctccaaagtccaaggtccatacgaccgtccatagcccctctcgaggcagtggtagagtcccagctggtgactgtttttcaggcatttacggtagccacctcaatcttctagcgctcaagcgcgcgcacagacgtgaacgccgccagaggggggagggggtggggcgatgcttaagtgtccacgcatccgtagtgcgacgcacgcaggcgtagtacggtcccccgggcgacagcggtggcggctcctcggggtgctcggctccctcccacmtaggccggccccggcccgactcgccctcagaaactcactgtttggggctgcggactttctcgtcgtgccccacaaaagtaaagcttggggacctggggggagccggaagtatcgcttcgagatccccaaatactatcggggaaacggaagtggccgtcggtggcaggtttgggggagaccggaagtgacggtccgtggggaagtcgggggcggagccgcggggtggtgkgtgtgtgtgtgtgtgtgtgtgtgtgtgtgtgtgtgtgtgtgtttggctgtgggttagttgtgccgttctgctggaacaccgtgggaaggcagtagacgcgggcagtcagctagcaggtcygtcgccccgtgagtgccgtttcgggtctatagtgagttaggagggttcgatgggcgtggcgcgcgtgcgcgaaaccactttctccgcagagtgtggggcgaccaccgctttcgcgttgtcccaggattttccgacctctggggcgcttgtcctgccgtgaccggtgatgacactagtctctggtctcgtgcttccttcctaatctgactggctccctgcttattgtgattggcgtcgtggagcccctcccacctctcgtcctccagctccctaagccgtcgatctcctgccctttgtgtttctctccctgtgccccggaatcagaagggggatggggacaggtgtgaatgtgtgtgtgtgcaggagawactttttaggtattggggcagggattaatgctagggagtctttcgggtacactctggtctgggcaacagcgggccytccttccttcgttcttctttagagacctgtcggccatggagcctaatgatagtaccagtaccgctgtggaggagcctgacagcttggaggtgttggtgaagaccttggactctcaaactcgtacctttattgtgggggcccaggtgagacacctcactagttctggaagacacctttagcttttcctcgtttaggccccttagcctgagagatgagcttgattttctggtcaccagattttctttttttttcttttttttgagatggagtcacgccctgtcttccaggctggagtgcagtggcgcgatctcgactcactgaaacttccacctcttgggttcaagcgattttcctatctcagcctcctgagtagctgggattataggcgtgtgccactatacccagctgatttttgtatttttagtagagacggggtttcaccatgttggtcaggctggtctcgaactccttacctcaggtgatgtgccctcctcggcctcccaaagtgctggtattacaggcatgagccaccgcacctggcctcagattttmtttttattgatccctttgttygtattccagtagaacgttttctgatgttttgtgagtgaggctgattttgttctgtcctccacatggatagaacttaatgcagagggaaatacagaggaaggaagaatctgtgtgtcatcatcatgggtggaccccaacccaaagggacaggcatggctctggcctttgggaagggaaacagcacaggaaccctaagcaagtgtgtcttactgatagacattggtcaggtctatgctgtgttyttaaagggtagaaatcagaacccataatggagataggtccttgatagactgttgagtgaaattactaatttttatggcatagcttgagtctcttgagcttaaagccttggacatagctatctgtgtctttactcctgtaatacttggagacaaattgcatgtggggtggtccatggttttctaaaatgtgataytacctggatataagaaagccatatatagacttgtgattagatgtatataaatactctggtacttcccaagagtcagtttgtagttaggaaaaatatttctctttttgcttttttttttttttttgagatggagttttgctcttgttgcccaggatggagggctggggcgcaatctcagctcactgcaacctctgcctcctgggttcaagcaattttcctgcctcagcctcctgagtatctgggattacagacgacgcctactaccacgcccggctaatttttgtatttttagtagagacagggttttaccgtgttggccaggctggtcttgaactcctgacctcaggtgatccacctgcctcggcctcccaaagtgctgggattacaggtgtgagccactgtgctgggaccttttttgctttcttatcttcttagtctttcttcaktaacctgataccagaccccatcttctttgccattttttaatcttggaaatcacaggagagtctggtaaataaactggtatcatcttgtgtttggaaaggggtcactgatgtctctagacacatactcccttggatgccagacagataatataatgtccatgtgktttttttttgtttttcatccgtgttatttttcctggatctataacctgagcttcattaagtttatttatttaattttttgagatggagtccctctctgtcacccaggctagagtgtagtgatgcgatctcggctcactgcaacctccgcctcccgaattcaagtgattctcttgcttcagcctccctagtagctgggattacaggcgaccaccatgcctggcttatttttttgtatttttggtaaaaaaggggttttaccatgttggccaggctggtctcgaactcctgacctaatgtgatctgcctgccttggcctcccaaagtgctgggattacaggtgtgagccaccgcgccaagccaaatttattgtctgtattttgacagctgttactttagtttaagggtttgcacagtaatgatctcacggtcaagacaaacgggtagtgattctgtggtggtttttacccctcacctccacaactcggttgtctgtctttgttcttcctctttcctccattctttccattcctgtgcatgcctcttcttttcagatgaatgtaaaagagtttaaggagcacattgctgcctctgtcagcatcccatctgaaaaacaacggctcatttaccagggacgagttctgcaagatgataagaagcttcaggaatacagtaagggggctggggaggcagttcagaggttggggctactgtctggagggatgaactgaggccatgggtttacctgttcatactatgttttggtgtgtgtctatttttctgcagatgttgggggaaaggttatccacctggtggaacgggctcctcctcagactcacctcccttctggggcatcttctgggacggggtctgcctcagccactcatggtgggggatccccccctggtactcgggggcctggggcctctgttcatgaccggaatgccaacagctatgtcatggttggaaccttcaatcttcctgtaagcttatgttccacaggggagggcttttgtgggtagctttggttgtggtagcaccagggaattaataagatagatgcttccatctttagattgggttcagggggccctgtggtgtgctattggtctcagtctttaaggagaaaaggaggtagggctccagggaatgaattggaggtgtggaggccttagtgttggcttctcccagaacaacttcccttaccctttccccagagtgacggctctgctgtggatgttcacatcaacatggaacaggccccgattcaggtattgaggggcctccgagggtcagggaaggggatctgggagaaggaggctgggaggtggggtggacctggctgagagatggctgggacctgatttagtaggtggtagaactcatggcttcatctgyaacctaccctgataaaccttctctcattgtagagtgagccccgggtacggctggtgatggctcagcacatgatcagggatatacagaccttactatcccggatggaggtaagtgggcaaggctggctagggtctctctccaccctccctctcccttttctctcagcctgggagttagggcttcactggccacatycacagggtttggccttcataatctagtcttctctgcagtattcattcttttgggcagaaaaagtatctttgtgaggctctctcatttctgccaatcctcttggtgcctggtatctggggagtttgtttcagacttagtctcatggcatctcttttcaattaaaggattctactctcttaacttgtggaggctgggaaaccaacttgtggaggaaaggaaaccacaatctctactctttgttagaaatttatttacaaatattacagatgctgtggccgggtgtggtggctcctgcctgtaatcccagcactttgggtcgccatggcagggggataacgtgtggtcaggagttccaatccagcctggccaacatggtgaaaccctgtctctactacaagtacaaaaattagttgggtgtggtggcacgcgcctgtaggcctggctacttagaaggctgaggcaagagaatttcttgaacctgggaggcggaggttacagtgagctgagatcatgccactgcactccagcctgggcaacagagcgagactctgtctcaaaaaaaaaaaaaaaaattacagatgcttattatgcatctaatttgtgtcagtcttatgctagttgctagcgagtcggagataaaattgcagagccatgccttcagggagtctagttaggatactttctctgttcagtctcctgtagagtaatcctctgcagcagtcttaccctgcctttggtatcctgactctcccctaccttcagtgtcgaggagggccccaaccgcagcacagtcagccgcccccgcagccaccggctgtgaccccggagccagtagccttgagctctcaaacrtcagaaccagttgaaagtgaagcacctccccgggagcccatggaggcagaagaagtggaggagcgtgccccagcccagaacccggagctcactcmtggcccagccccagcgggcccaacacctgccccggaaacaaatgcacccaagtgagagatggagggaatctttagtgggtggggaatcctaagtgaagtatggggagaaggaaatgaaccatggcaagggagggaaaggattacttggaggtcttagttgaagggttagcattgaggggcgaggaggggctctctcggtataggtaaatgacgctaggacaggcagctgagaagaactgctgctctccctayggcaaggaaatccaaatggtatctcctgagcctgatcggaattctcctctgagttcacgaaggcctgctctctttcttagaattagtctttcaccattgtaggtgcaggattgtggtggggagggtgggagcagttcattttcttctccctatcctctcatgggtgggagtaaagaatagaagctttggctgggtgcagtggctcatgcctgtaatctcagcactttgggaggcagaggcgggcagatcacctgaggtcaggagttcgagaccagcctggccaacatggtgaaaccctgtctctactaaaaaatacaggccgggcacagtggctcacgcctgtaatcccagcactttgggaggccgaggcgggtggatcatgaggtcaagagatcgagactatcctggctaacatgatgaaaccccgtctctactaaaaatacaaaaaattagctgggcatggtggcgggcacctgtagtcccagctactcgggaggctgagtcaggagaatggtgtgaacccaggagacggagcttgcagtgagctgaggtcgcaccactgcactccagcctgggtgatagagcgagactctgtctcaaaaaaaaaaaaaaaaaaaaaaaacaaaaattagccgggtgtggtggcaggcaacttaatcccagctacttgggaggcagaggcaggagaatcgtttgaacctgggaggcggaggttgaagagaatagaagctctgctggtccagagaaggattgggccagggctctgggagaccagggagaaagagggcacatgtggtccctgttgactgtgagggtgggaatctgaggaaggctttggctcattgccccttgggtttgtccacagccatccttcccctgcggagtatgtcgaggtgctccaggagctacagcggctggagagtcgcctccagcccttcttgcagcgctactacgaggttctgggtgctgctgccaccacggactacaataacaatgtgagccctttgatggccctgccctttctcctcagccccagtactcccaaaacagaacaggctgaaatrcagataactctttccctccctggaaaaacattgcaacagggccaggtgcagtggctcacgcctgtaatcccagcactttgggaggccaaggtgggcggatcatctgagatcgggagtttgagaccagcctggccaacatggtgcaaccccatctctactgaaaatataaacattagctggatgtagtggtgcacacctgtaatcccagctactcaggaggctgaggcaggagaatcgctagaactcgggaggagggggttgcagtgagccgagattgcactactgcactctagcctgggtgacagagcgagactgtctcaaaaaacaaaacaaaacaaaaaaacacacattgcaacaaaacartttctctctaaacctgtaagtgattttgtcctcccttacagagaaggtgataatctttgctgtaagcactgtcctcgtatcgtaccccttgtgcccctgaatgaatttagaaaatgtaaagtacaggagatcagtatatgatgacttactgattcatagtagtgttttaataggatgttccttatgtgaataagatataatttatttgcaaagatttggtctacatgtaaacttccaaggatataactgaaagttttggaggacatggtattctcagtaggcattattgcttttattagtgagatggactccagcttgatattttctgcctttttgtgtttggctggttgtgcgcagcacgagggccgggaggaggatcagcggttgatcaacttggtaggggagagcctgcgactgctgggcaacacctttgttgcactgtctgacctgcgctgcaatctggcctgcacgcccccacgacacctgcatgtggtccggcctatgtctcactacaccacccccatggtgctccagcaggcagccattcccatacaggtgggttagggggagtctggcctgagggagagtgaggggtgttgatagagtgacccagggtagctactgggcctgaaggaggttaggaaaggaggagactggaaacatggtgatgaaggctggagatactttagaggtttatcatgaggttttcttggttaggctcttgtatttttctcacatctgcctgtccatctgtctttttcagatcaatgtgggaaccactgtgaccatgacaggaaatgggactcggccccccccaactcccaatgcagaggcacctccccctggtcctgggcaggcctcatccgtggctccgtcttctaccaatgtcgagtcctcagctgagggggctcccccgccaggtccagctcccccgccagccaccagccacccragggtcatccggatttcccaccagagtgtggaacccgtggtcatgatgcacatgaacattcaaggtgagaatagttgctggcgagaagagcaggatcagcatgatgagggaggttcatgctgaggtgtgagggaacagggtggggaagggagaggcacatgctggtggtggtagcctggggaccagagcagaagcttaagtagacagatgtggggggtgtgggggttggtttgtctttggaggtgtgtttgtgtggtgaagggagtacctctccctgtttagatggagggaaaggcaggctttctgattgggggattatgggcctgaagtatgcctgatctcagaaggatatagttaggccttggccctacctacctcagggccactgtctctgtctccctgcccagattctggcacacagcctggtggtgttccgagtgctcccactggccccctgggaccccctggtcatggccaaaccctgggtaagagtgagggcatcagggcaggctgagctctgggtagagaaagggaagggctgwgtgggtgggttgaaggggtccaggttcaaggttacatcagacccgccccccaggctccaccctcatccagctgccctccctgccccctgagttcatgcacgccgtcgcccaccagatcactcatcaggccatggtggcagctgttgcctccgcggccgcaggtaatgacctggaaggggaggcttgggaggtagggcacagtccatggtggcagctggctggcaagggcctggccctcagccctcttcggtctgtctcttctgccacccacaggacagcaggtgccaggcttcccaacagctccaacccgggtggtgattgcccggcccactcctccacaggctcggccttcccatcctggagggcccccagtctctgggacactggtgagcaagggtcggggakttctagtgcgtaacagtctagggagagactcctgtggtggtgcatggaagggcaggtctgaarttctcccttgctctctatccagcagggcgcyggtctgggtaccaatgcctcgttggcccagatggtgagcggccttgtggggcagcttcttatgcagccagtccttgtgggtgagttttcattcttccccactcagagtttaaactcctttcctagtctgctcactggcactttccagttctttccatattttcttggttcctgctttcctggaatggggctgctgtagtgtcttgtgtcttcaggtttcagcttttttttttttttttttttttttttttgagatggagtctcactctgttgctaggctggagtgcagtgtacaatcttggctcactgcaacctctgcctcccgggttcaagtgattctcctgcctcagcctcctgagtagctgggactacaggtgcacgccaccacgcccagctaattttttatgtttttagtagagaagggggtttcaccatgttggccaggatggtctcgaactcttgaccttgtgatccacccaccttggcctcccaargtgctgggattacaggcttgagccatcgtgcccggccagcttttttcttttttttttaagttacagagtcttgctctgtcacccagactggagtgcartggtgcaatccagtgagttaaagctcactgtaaccttgaactcctgggctcaaacagttctcccacctcagcctcctgagtagctagcagtactagctcctggctagtaattgtctttttttttttctggtagagatggggtcttgctatgtggcctagactcctgggctcaagcagttctcatgccttggcctcccaaagttgctaggattacagccaagagccaccatgctcagcccagctttctttttttggtttcttacagctcaggggaccccaggtatggctccaccgccagcccctgccactgcttctgccagtgctggcaccaccaacacagctaccacagctggccccgctcctggggggcctgcccagcctccacccacccctcaaccctccatggctgatcttcagttctctcagcttctggggaacctgctagggcctgcagggccaggggctggagggyctggtgtggcttctcccaccatcactgtggcgatgcctggtgtccctgcctttctccaaggcatgactgacttcttgcaggtgagtggctggcttgccattcacctcatcttcctgtcccccggcccagccaggcagtggtaccttcttgccattayataaccactgggtaagagcccctagtgacatgttaggggaaggggccctrggaattcattgactctgaacctttcattttaaagatgaagaaaatgaggtttagaaaaagaaagtatagtaattagtgtcactgctttctgacarcctgttcagaggaagaggtaggtaagttgtgctgcctgactctgttaaatacctaccatacttctgctttaagcagtgaagatcagaatgtaactccccatcttcccagacccgttggtttgtgccctcttgatgccgtattatttccgtgtgtcttcattctcacctcactttctgttctttgttctttatttgccaggcaacacagacagcccctccaccacccccacctcctccacccccaccacctgccccagagcagcagaccatgcccccaccaggctccccttctggtggcgcagggagtcctggaggcctgggtcttgagagcctgtcaccggagttttttacctcagtggtgcagggtgtgctcagctccctgctgggctccctgggggctcgggctggcagcagtgaaagtattgctgccttcatacaacgcctcagtggatccagcaacatctttgagcctggagctgatggggcccttggtgagcaaaaaggatgctttggcttgctccaggaaggggcagccagaggaatgtagatggccttggtttaggggtrttgccaaggtgggatgaggttgatgatctggttgtgggtgggcaggccaggtggtaaaggccattgctaacatctgcccttgtcccccaggattctttggggccttgctttctcttctgtgccagaacttctctatggtggacgtagtgatgcttctccatgggcatttccagccactacaacggctccagccccagctgcgatccttcttccaccagcactacctgggtggtcaggagcccacacccagtaacatccgggtaaatgaaggccaggggccccagaactctcctcttttgcacattttattccttatttctgactgcttctctgccaggtaaagctccaattgcccccacacaagccctggacttgttggggtcgaggtggaagtcttgggaggactgaggctttgaactaaacctgttctgtttcctccacagatggcaacccacacattgatcacggggctagaagagtatgtgcgggagagttttgtgagtaacccttctctattcctttcctctcctgggtctggtcraggcagctgcctcctccactcccagtcttatgattcttgattttgggatctttgtgttatcttgtctctcagtccttggtgcaggttcagccaggtgtggacatcatccggacaaacctggaatttctccaagagcagtttaatagcattgctgcgcatgtgctgcattgcacaggtcaggggctggccaggcgggggcaagkggggcctgttgcatgtgcagggctgccacgtgccagcattccctccttgtattttgcccacagatagtggatttggggcccggttgctggagttgtgtaaccaaggcctgtttgaatgcctggccctaaacctgcactgcttggggggacagcagatggagcttgctgctgttatcaatggccgaattgtaagcaccacctagccccagatccttagccttttgtttcctgaggtttccattctctgcagttttcatttttcttttctaaactgacattctgtaacctggatctaatctatttctaaaggtggttgagggttttgtgttctaaatctgctttctgtccctcagcgtcgtatgtctcgtggggtgaatccctccttggtgagctggctgaccactatgatgggactgaggcttcaggtggtactggagcacatgcctgtaggccctgatgccattctcagatacgttcgcagggttggtgatcccccccaggtaagggacctgttgggcgatggggtcagggtacttgagagaactggagagatctgagaggaagtatggtgttctttaatttcacagccrcttcctgaggagccaatggaagttcagggagcagaaagagcttcccctgagcctcaggtactctagagagggggaggttgaggggccagataatgtggagtggagggctgggggagaaaggtttggaggctaaaaattctgaagcctggctcttcccgccatctgacacccagcgggagaatgcttccccagcccctggaacaacagcagaagaggccatgtcccgaggtccacctcctgctcctgaggggggctcccgggatgaacaggatggagcttcagctgagacagaaccttgggcagctgcagtccccccagtaagtgtcaggaagtaatccagtgggtcatggcagctgaaagtcaaggacattactattttctcttttcctccccaggaatgggtccctattatccagcaggacattcagagccagcggaaggtgaaaccgcagccccctctgagtgatgcctacctcagtggtatgcctgccaagagacgcaaggttggttttcctcttccctaagcctctctctctrtccaggtttccccgtcatgcctggaatcaaactatgtagagatggtgggagctcttgttattcagtctcccctcccctcgtttaatgaggaaactttttctgggattcagacttgctcttggttgttgcataaccatacaggacttgaccttagtctgtttgctagcagtcctgtattagttgctcagctgcctaatccccatgtgcttagatcccattttcctttaaggtgggtttcctcttgtggattacctagctctgaatcccggatggcttgaccccttctgcctttcgttttgaagagcacgttcaagcacattcactttagttttggctagtgccaaagagaattaggaaggcatttctgctgtaaaaaccacatcctggactcttaatttcccctctctccactagcatggagactcagtggagtggttgactcatggaaagggtgagccggatggtggcactggatctgacgttgatcctcttttccctcccaaccccctgtcccccagacgatgcagggtgagggcccccagctgcttctctcagaggctgtgagccgggcagctaaggcagccggagctcggcccctgacgagccccgagagcctgagccgggacctggaggcaccagaggttcaggagagctacaggcagcaggtgccaccttgaagcagaatagggatggtctagtgggaggggttgggctagggtccctcttccctggatcccttcagcgatgaactggtcagcctggtgctaccatttgttttcccctttggcatctgggaaggcttgacagtgccaccccgggctatttgacagygtgcttggggggggaaatgttagcttctgagggatggccttgtgtgcttgctgggatcatrgggacttggccagcstttctccaacctgcttrctttttctctttagctccggtctgatatacaaaaacgactrcaggaagaccccaactacagtccccagcgcttccccaatgsccagcgggcctttgctgatgatccttagctctttgctctatggcccttcctcatcaggggaccgtttcccccctcttccttcacagtatttaagaaataaaagtcggatttttctggctgctttctctctacattgtctccattaggtagtgtgtcccttaatcttgtgtgaacttttttaaattaatacttccttggaacactgttgtgttctactcagcacgctaaattgtacaagccagttttgatgtttgtttttttttttttttgagacagagtattgctgtctcccaggctggagtgcagtggcccgatctcgagctcggctcactacaacctccacctcccgggttcaagtgattctcactcatgcctcagcctcctgagtagctgggactacaggcgtccgccaccacgcccggctaatttttgtatttttagtagagacagggtttcaccatattggccaggctggtctcgaactcctgaccttgtgatccacccgccttggcctcccaaagtgctggaattacaggcgtgggccaccgcgcccagcctgatgtttgtattttttgtgcgaaagcactttatatataaataaaaaacctgtattttgagttgggagcatattccaggtgcacactagcatagagctctcaaattacccatcaaaaaaagtttctgagcagctgcagacctaagtatagtctttagcataactagcatgcagcgttaccatgtgaaatcccacttagtttgacaatgctggaattggtctatccaattcaaagagccccttaagtgtgctccaacattgaggccttaacagagatttccccttagttcatcataaagaactgaagtcccatggctgcaaattctttgctagtccctttgagatgcagttgaagtcccttctaaacccccccatcccctaccttggctagtttagtgctctatcaactaagcatggcataagcttagaaaattccagctagacctcttggaacatgagctcacggacatttaacaggcctgctggagagtccatgtgaagacactggttgataacccagtaatgttacagatgtcccaccaaggccctagatatgcaaaggaagccatattgggaccagcccaggtgtcagctgcagactgataaccagttgacctcgctcactggcacaaaaaagcagatttatccagctgagctcagcccaaattccagactcacaaaaatttaaagatccaatacgatggtcatgtttttagtttcaacagctcactggaataagtaatgaatatttccctgactgaaactacagatcactcagcaccatgctttaagacaatgcaaacaactcatcccccaaatcattgtagaagtttttttttttaaatccttttattactcttttttaacaaacagccccagggacaggggaccaggggaagggggaggaggggaagtgaggccccagccccacaacccctccccgcccacccctttcccccttatatatttataatctatatacaagccccgggggtagggggcaagaggaactccctcagcggggtgggggcaacccaggctccttgtcccctcgggacccaggctcctctgcccgtcgggagggcccttctcgaggtggcggccctgtccgctcccaaggcttaggtatccagcgcagggcatctggtggggaggcctaggggacaggcatgtgttaaagagtgagtcacagtgagaggtcagcgatgagacggaaggacaggaaatcaggtggcaactcgaatttagagttggggccacaagggtttctccttcacctgctggtaaaggtcgacgcgctgggtgcggaagactccactgtaggtggaaggcgtggccttgagacgggaattgaggccagagaaggacctaagggaagaagggcgtctaaggcaagcctaggatccagaccctggttccaaagtaaggaagcacttggaaagtccacatccctattccgtttcaccttccagttgggggagtccgtgatgatccaggtcccccaaggttgctgctcagtttttgataatcctggaacggctttagttccactggatgcagctgaggggaaaaaaatcatgagctgcctaccttgaaatacagaatccctactcccaagtcttggcgctccctagcccctcagttcctgtaccttacctctgctcgccccaagctagcggggaagggcctggcaggtgaaggcagcacccgagtagcaggagcaggtgggggccgcacagccaggctggggggctgcagagcagggcccacaggtaacagagaaaggggaggtggggcaggaggtggtgctggcggcagggagccaaagttcaccacaggcagctgtgagtctaccatgggtagaagcatctgtaacaagaaatttgggtgtgcatgttgggggcagggaggaatgtcagaaaaccagggaaaatcaaagccagcaactggacagagaaatcaaatgaaggggaagtgtgaagatacaatatacctgctgggcaggagcccctgaagggagaaagccactttggccaccaggctgcagaggagtagaataaaaatccgaaggggatggcagatcctggcgtacctgtcgggaaacagggagaaatatatcaacccccacaaaatcattctccctaccctatcccccaatatctaatacctgcccccctcttacctgaagcaacgatgtgtcaggcaaaggactggggcagaaagccggagagtagaggaaggaaggtggagggtagagaactcctccagccggcaacttccccagctctgtagcttgcattgtggagaaatccagaaactggcccttgagagctaccccagagagcagtgctgagggaggggctgggccggggggtaggtataggggctgtgatctgaaaataaattgtggggagaaaagctgttaggaagccagagtcctagcaatgccttaagtccactagcttctagtaccctagaactgtgtcttccccttccctctccccgaaacacatctccaagtacttctgtgatccacaggcatcgagtcttacctgtaagggtgcagtgagggtgtcccagggcggaagcctccactgtttggatgtaattgagagtccatggctcccccagagatctgcaggagaggagcacggttgaaacagctttagtatctgtggtcaagaaaaaagatcaccatcccacccatagaagcaaaaagtagggagaaaaatgatgtgacaaagtggtatctcacaactctgcaacgtagaaaggcttgattataaatacataccaggcagaaaaaaattattattcactgaaggggtcatgcaatgggaagcggggcctacctgagaactggaaggcccagcactgccatagaaaacctcaggatacaggcgctggcctgaggagctgggctccgggacacagtgcccagaatccaggttcttggattgtggctcagcagaggcagcagcactgggaagcagctcccagtctcgtgatacaggaatggcctgggaaggagaggcctcgtggagagggatgtctggcatcctggacgccctggtcactcccagcaatcttccccagaaatcttgggcctttccaccaaactcttactcccacttacctcagtgactgatgctgttagctccttctctgctttcaagctgtctcctaccactaggcgtaagtctgagtcctgtgatcacaagaaggcaggagacattgtcccgtgacagacatgtgtcctctatgtcccacctttagtccttcccttctctccacccaactcaggatacccagatccagcccacacagaccttgtcactagtgccaaactggactgggggaccaggtcgatgggatggccgaatggggccaggctctgtgcctcggtctgtacgctgtgatcgttctgtgccaatggggccagggggcagaggctgctcccggggcagctcctggattgggcacacagtaaagtgcattgggggagggaaagggaaatccaaattggaatgcccagaacacacacgcagagagaaaaagcagaaaaaggtagggccaaagtcagattcctggaaacattccccttatccttttttggtcttttacctttctgtccccatcgtggggggcaggtggtggtctcctaggaggttcagagccaggtggaccctcacaaggaacagcattcaggggtgaggagcctccaggcctcttggggggtccctctgctgcccccttgagtcctccatcaggggaacttcgctggctgcagggacctgatgacacctgagaatccccactcaggtccaccccactgtcagactgactcatctgagaggagtggagaaggagctagttaagtcagggtagaaagcaccccaatacctgactgatgcacacatacaaactgcagaaaggggacagccaagtgagagaacagctccagactcaacccagagcaggtggggggtatgaccagtgctcaaaaaagtcccagctcagacacaccctcccaccctcactcacttctgtgccagccacatcctcaaaaggactcaggggctccatccaaggctccatggagctgggccggtaactctttcggctagtggctggagaagggagcaccaaccagaagagaagtgaggagatgacagttcagaagcccctctcattcttaacccttctaccatagtcctttcactcagctttactcaccagtatgtaaacggttccagatgtgaggggtcagggcctctgtgcctgtatctctggactctgcctgagggcctgggccctcaggcttagagcccaagaatccagagctatgaggaggtggcaaagattcctacagatgagaagggccagaagcaaaacatgaattgggtgggaattgggaattataggaagccaggacagagtggggtgacacagggtgtggggacaacaagggagacacatgggagactaatactgagaattctggagtaaaaacacagtgaaagaaacaggaaagaaaacagagaaaacataacccagaagaattttcacgagtaagagtgcagtgaagcacaatctcaaacccatcccttacctcctgtagcagctctggttttctgggaggccgctcccgacgtttagggggaaagggactaaccccggcagagtcccgaggagtcccacccacccctctcaccattggccccggctcctcaaagtgggggtctgggaaagagaaaaagggtcagcatctgcctggctctgccactgaccctaacttttcctctctactccacctcccaattcttctacccttgctccctgcagaaacgcacccagcagcagggcccctaggccaggttctccacccgctccctccagcacttgaccttctctggggatggagatattcccacccataacccctccagcttaccagaactgaggccgctgttgaccctctggggctcgtatcgggttgggggcctaggagaggggccctgaggggcttggggaggcccaggcttgtgccttggatgaccccctggtgcagttacactcccttgacggctactaagctgggccagagcctgttggatgccagcagggttgctgtggataacttggtccaggcggaagacagcagaactgctgggaggtgggggaggcaggggaagccccgggggacgctcctctggaggacgactggagaaaacagagcattagctccagtatccactaaatcgttactttttcccacaagttatgtttcccaacttctgcttacaacctattctcttccctattaaagtccaggtgtttttgagtccttctaagggttcctatgcatacagatgcacagactggaaagcaaagaaccagcaatgaatacataggtgggtgttcttgactctaacaccctaccaaccgctttccagttgccttagccagacatggaaatcctactgacattctagagcccatggcccctcaggccacaatctccactccacccaaacttatctttccctcaggctttttccccctcctccaattttta

SEQ ID NO: 8874 - DNA, 60754 bp, Homo sapiens
ctgccttctgagttcaagcaattctcctgcttcagcctcccgagtagctgggatcacaggcccgcatcaccacacccggctaatttttatatttttagtagagacggggtttcaccatgttggccaggctgctctcgaatccctgtcctcaggtgatccacccacctcggcctcccaaagtcctgggattacaggcgtgagccaccacacactgcctgaagatcgtgatttttaaatggctgtgtgtgccaggcacaattctcacagcaaccctaattgttcactaacaaattaaaattaaaaaataatttttttcttttcgagacagagtttccctcttgttgcccaggctggcgtgcaatggtgcgatctcggctcactgcaacctctgcctcccagattcaagcgattttcttgtcttagtctccctagtagctgggattacaggcgcccaccattacgcccagctaattttttgtatttttagtagagacacggtttcactgtgttggccaggctggtctcgaactcctgacctcaagcaatacacctcagtctcccaaagtgctgggattacaggcgtgagccatgtaactcagaaggcagaggttgcggtgagtggagatcacgccactgcattccagcctgggagacagagggagacttcatctcaaaataaataaataaataaaatcaagccaccatgcttggctggaatttctttttttctttattttcttctaaaacatcctgtcataacatgttcattaacaaataccgaacattctggttagtgggtacaaaaatagagttagaatgaataagatctagtatttgggagcacagcagggtgactacagtccacaacaatgtattgtacattttaaaataactaaaggagtataattggagtgcttgtaacacaaagaaaggataaatgcttgaggtcatggacacccatttaccctgatgtgattatgatgcattgcatgcctgttatcaaaatatctcatgtaccccataaatataaacacctacagtgtacccataaaaactaaaaatatatatattattatccagcttttttttttttttgtgagacagagtctcaccctgtgacataggctggagtgcagtggcataatcaaagctcactgcatcctggacctcccaggctcaagtgatcctcccacctcatcctccggagtagctaggaccacaggtgtgcaccaacacgcccagctaatttttacatttttttgtagagacgtggatctcactatgttgcccaggctggtcttgaactcctgggctcaagtgatcctcctgcctcagcctccctcccaaagtgctgggattataggcatgaaccacagcacccggcattatgagcattcttctgtacaatgcacccttacagcacagtgaatacagtcagacaaagtacctgtcctcaaagggcttatattgttaagagagaaacatactaaatctataagcagaaaaagtaacgtcatttcagatactgataagtgctatgactaaggcaagcccatttgatacaacgggctgggaggggtcacttcagatgctatagtcagggaaggccactgtagagaggagaccatgcaactgaaccacaggtgatgaaccacaggaaagcattaaattgtatccatgttaaagataagaaaataaaggtgcaggaagttaattgagttgtccgaggtcttacaactagtaattaacaaatcaggcttcagagctggctctgactcctaaaccctccttcttcagcactatgctagaggcaaagagatcttagctattacaggatctcccaccccatcttgccttcctgctatcctacaacagcctttctcaaattctactttgaactccttgctaattcctaaaaactgcttagaggcacaaaggggaaccccaccacctatcaacaggtttaaggaaagtaccaaatgtctttcaggaaacttcccaaacattaatgaatcatttacatgctgcttcacactttactacgtctgatgccttcccccttggaattttattttatttcgagacagagtttcactctgttgcccaggctagagtgcagtgctgcaatctcggctcactgcaacctccacctcccgggttcaagcgattctcctgcctcagcctttcgactagctgggattacaggtgttcaccaccatgcccacctaatttttctattttagtagaggcagggtttcaccatgttggccaggctggttttgaactcctgacctcaagtgctccacccgcctcagcctccaaaagtgctgggattacaggcatgagccaccacaccaagcctccccttaggaattttattacttatttacttattcattaagatggaatctcactctgtcgcccaggctagagtgcagtggtgcgatctcggctcattgtaacctccaccttccagttcaagcgattctcctgcctcagcctaccaagtagctggtattaaccccccttggattttttttttcttttttttgacggagtctcgttctgttgcccaggctggagtgcagtggcacgatctcggctcaccgcaacctcttcctcctgggttcaagcgattctcctgcctcagattcctgagtagctgggatttcaggtgtgcaccaccacgtccagctaattttgtagttttagtagacacagggtttcaccatgttggtttggccaggctggtctcgaactcctgacctcaagtgatccacctgcctcggcctcccaaagtgctgggattacaggcgtgagccactgcgcctggcccccctcggaattttatttggccctaaccactctgtgacgtttctggacaggaactaatcacctcagcttacagagaaaccgaagcacaaactgatgaggtactggtgttgcctaaatggctttgatcaaggtatttaaactagttggttctcaatttcccaaattttccataaagaaaaaagagagggcattgaaataataatccttaaagtcctatttgggaacaacatttagggaaataggtttgtcattgggtaaaaccttaaaaacatttaaaatgtttttcttgttctttttaaattcaatttgttttccttgtagctttggactatggctgagcagataactcaatttaacttccttaggtccttccatgatcatttattaattcaaaccactgaacctaatacaggtagaagattggtttctggggagaaactcctttaataacagcttggttagttgaaaagctgaattgcatgtaaagtagctacttaaatagcacacaaaaaagtctttcggttttcatacatgtgaagactataatttggacaagggaaaaactgaaagttacttgtactctctaaagttttcccagcaaagaaacaggaatacaattaatagaggatacatacttaaaatatatcttaagagaaaatttatgtattttgattcataattgtctcctaaggcctggtatactttgcttaggctcctagtctttagaaagcagcaataaaattacatttcttttaaaagtatttgtaattcagacttttattagccttccacttaatacgactgttttgtttttaaaaatttttttaatagagacaagtgtcacaccatgttgctcaggctggttttaaacaccaagcctcaaggggtcctcctgtctcagcctcccaaagtgctgggattacgacatgagtcaccatgccccgcccattttcaatcactacatttacttgttgtgactagttacagctttggacttgaaagaatgccaagctaagtcaaacaaaatgtgtctgcttggtaaaaaggaatctaaaagaaaaatatacatataaagaaaatgtggtcaagctcgttggctcagccctgtaatcctaaagaggccgaggcgggaggatcacttgaggctaggagttcgagaccagcctggccaacatggcaatatcccgtctctactaaaaacacaaaaattagccaggcatggtggtgggcgcctgtaatcctagctactcaggaggctgaggcatgagaatcggttgaacccgggaggtggaggctgcagtgagccaagatcctgccactgcactccagcctgggcaatgaagcaagactttgtctcaaaaaaaaaaaaaaaaaaagtaaaaaggaaatgtgtctgcattctttgatgttttctggctaaaaactattttttaaaaaaagcaattagaaacctacaattaccttgtttcttaagatttttagttaatatggcttgtgttgaaacatactcaactgaaataaaatggggaaaaaacacctctgaagagtagcgtatttgtttggtactttgaaaaaagccaaaacgctagaaacgggtttttcatctattctaatctccacttggaaaatactacctatacacagacataatgaagatttttttctttttctttcttttctaaatagtgatagggtttcaccgtttcccagtctagtctcaaatttgtaggctcaagagatcctccctccgtagcctctcaaagtattgggaatacaggcctgagccactgcgcccagcccacagtcaagatttagtcagcagtaataaatacctacgcagggagaggatgtgtgcttgtcatctgccttctggaaaattaaatacaggcacaaaggattcttcagctacatgtctgatcctgccctccacaatacccgtctacagggatgtttacagggatgtgttaatccccacgtaatggggattgcctattgaaataacctcccagtaaggatttttttgggcaaaatattctcgtttggcaatttcgacttactgattcttttgcaaagtcaacttgtttctgggcaaactttaaaaataaactcctaaggtagcatttagctagcagctagcacatcctaaatcgtgtctagatttaacttacacaatatgtgctttgcttttttcctaatttgcaacagaaaatagtaatcagctggtagtttcagaaatcacccttttgctgagtcttaaatttttttttattccagggaaacgtgaagattgtggggcgctatttttttttttaaagcaaaccacacagcatatctggccacctaaaacacaaagtgtttgaaactaaccgtaagatttcctttctgctcgcccaacctgtcactggaaacgcagtattcatttgtaaccagctttggagcagggcttttaaaaataacgttttcttgctaaagtccccaaaaatctcttgattcttggtggcaatgtccagttgagtctttgcacacactgtatttttgccaactgggtcgcaactttgcgagaactccgggggacctcgtaggaagccaggttggcagttatttttttctccacttgccactaggttgcactagatttaggatgctggggaatatgcgccatttaatttttaaaaataaagtaggaccatcacgtgacgagacccgagagaggaaaaaaaaaaagccgaagggacagggtttttcattgaaatcccgttcaaatcgccttccctccaaagcctgaaagagctgaattctattaaatcctggttggcaggttttttcctcgggtccacgtcacgagctcattctccgcttcaaggttcctttcgactccacaacgtgaagccagggggaaggcctccttaaactgggggttttcgccaaaaaagccagggtcaccccccgggaaagtccctatttaggggtttatcgggaggggactgagcctgacgaggctgcagggccgcgaggccccgccccccccggggttcccagcatgccccgcgcggacaggacgcggcggcggaggcggggcgaggaaggggcggggcgaagaggagagaagggcgtcggttttgcgacaggggcggtgcggtgcggaagcggaagtgaagggtgcgcttggcggcggcggcgggagctgcggagtcgggaatcaaaacaaagggcctggggggggcggggggaaggcggcggggccggaatgtgagcggaggtggagccggcggcagaggtgagtttgcagacagtcctgcgaccagaccccggcaggctctgctccgaggccagcggggcgggacggaggacagtgtcccctctttccccgcctattgctggtgggatggtggtggagaggggaggttagctaactgggacgcgccagttgggccccccacgaaagagttggcttgtctccctttcgggtccattcactactgtcactgttggcgccgctgttccccttcgagggcatttggctccccgcccgcccctgtctgacccctggtggggccctccaggagtgaagtgcacagctggaaggttaagagagaaggaaaggggcgggtgtttttgcaacacactcccccctccccggccgttttgcattctcctcggccttttagcaacacatagggtgtagtctcagggttgacaatgtctagggcttcagccactctcactagtagttgtaacgcgacctcgtgatacaccttttagagtttctcaagcacctttccggtattaccaagagctgtccaattgcatttgtgtcttttggacttctctgagcggtaaatattcttctcttttgcatatcggtgtattgaaacctaaactgttttcctatttattaagctttattcgttcaacagttatttattaaaatatgccaggcattgtactaaggacaggagttggaatagtggataagaaaacatagtctctgctgtcatggagtttatagcctaatgggggagaaagataataaaataagctaaaaaggccgttttggacagaagagctatgggggagaaaacggtaatgggatggggtggtgtggggtcaaagactagattgggtgctaaggaaacaacatttgctaaatgttccccgtggattacctcatgtaatccaaacaacggccttgtaaggtggtttctattattatcacacccattttagagatgggatctgaggttcagagaggttgtgagttgtccaaagctgcaccgcagtcaaattggagaccaaaatgcagacagtcgacagagcctatgctctcctcattgaattggtcaaaagacttgaagagagtgacagaaaggagactgtcgctcaagtcaaacagaacctgcttttggctacctaagttgcttcgtggatggtatttgggaagttttcagggtgcaggcacctgaaagtttttacttttaatcgcttgtattgagcagtattgaaggcaccttgatgtagtggaaaggggtgaacaagcctaatcttgtgtcaggctcgctacaaaacttcattaagtttctttttctctctctgcaaaaatgtagctaatttctcccctgtctatttcacaggattattgcraaaattatataagaggatcccaccgtctgggtttttttcatcattatattccttgtgccaagcacaggcctgctgcatagtagatactaagtaaatatttgctgaatgaagacataagtaatgttaagtgaaaatactttataaactagattatactgtgaatgttagctcactttcaggatttggctttgaagaagtttgagagaatgtttaagttatgaacactgtgaatatcacagattcttacgattttgagaggagttttttgggggacataaaacctgtatctaataggaaagacaagaatcgtaatttactatcagtggtagcagttaaatccatctccaaattaaccactcccaatagtgtgtagtaggtaatgtttactttgtatttacagagtagggagcattttggttggcacaagagatacagtggtgaaaatagacagtggggttcatttatctaattttttttttctctgtaatgcagtggcggggagaaattagccacattttgcataggaggaaacagaaacttgaaaacaaaaatttttttagagatggaatctcactctgttgcccacgctgaagggccagtggcacaatatagttcactgtagcctcaaattcttgggctcaagagatcctcctacctcagtctctctagtagctgggactaggcgcatgctgccacactatgctaattttttgaactttattttattttagagctgtgatcttgctatattgcccaggctgacaaaagagccacgtagtaaatataggctttgtgggccatacagtctctttgcagagactctctttgcaactctgcaattggaatgcaaaagcagtcataggcagtatttaagtgaatgagtgtgtctgtgtcccaattaaactttatttatggacactgacattttaatttcatgtaattttgtttgttggtttttgagacagggtctcactccgtcgcccaggctgcagtgcagtggtgcaatcacagctcactgcagccttgactacgcagtcttaggtgattcttccaccatagcctcctgagtagatggggctacaggcatgcaccaccacgctcagctaattttttgtagccatggggttttgccatgttgcccaggctggttgggaactcctgggctcaagcaatccacccaccttggcctcccaaagtgctgggattgcaggcctgagccacggtgcctcgcttgcatttattgttaagacctgtaagagtgttgttgctctggcgtagatataacacatctgcgacttgagatttttctatcagttagatttttggtggtatatcagattgcactttcatcattagtaaacyaagaaattggttcaatttgttctrtagcaaatcaaattcaaagtccacagaggccacttagtttggacttttcatgctcagatcaagaaaccagtgcaagaagttgctcttaagtcaattttaaaatcttacatatagttgtcaatgaggatgtggtggtggctcttttactcagattagatgctctcttctgttaacttttgactttcctgagcagcatctttagggagagagagccgaaaagaattcagaaaaactgtagaaaaaattgattccagccaagtgaggaggtgaagtctcactctggaatatgcaagtttccaagatatggctacctctctcaaacatggttacatgtggaaaggaaacaagactcatggagagttcattttttatttgaagagctatgaaacatraagaatggcagattatagattttttaagaaatcaggttgttgcagttagattttaagcataaacagtcaaccaagtttaccaaattttattaacccgtaatatgctctgatattttgtgtttttttctttctttattttattattattattttgtttgttaagatttgaattgttggccgggcgcagtggctaatgcctgtaatcccagcactttgggaggccgaggagggtggatcacttgaggtcaggagttcaagaccagcctggccaacttggtgaaaccccatctctactaaaaatataaaaattagccaggcatagtgacaggctcctgtagtcccagctactctggaggctgaggcagaaaaatcgcttgaacccgggagacrgaggttgcagtgagctgagatcgtaccactgcatgccagcctgggcgacagagcgagacttcctcttgaaacaaagatttgaattgttgagagccataggactgtaaatatagctgtggtttcacattttagtatgttgtaaaatttgtacttatgcaaggaaataacactgaaatcttactcattcttaacagggtggaagaatgaaagaaaagaaagatgaaaggatgttgaatcactttgcatggctgtatgatggaaggaaacggaactgagaactcctgcagtagaacacgtggatggcttcaacaagataatgatgctaagccatggctttggaaattctctaattgcttttctcgtcctgagcagacgctgccacatagtccccaaacggtaactatatgcaagactaaggatgtagcagattcctcatccaaatagatgagagaggtccatttggtctgggatacagtctctcatcctagagtctgtgccacatttttctgtagatcttgcctgtattgcctcttataccacattataatgtgagagcacagcacaattttttaactcttctatttcactttgagtaacagtagatgccttgaatatttaatgttaaaatttgggaaagatttcttcctcattaaagtcacaggtaacaaagattaaaaatccacattgtggagtaaaatcagaggaaaatacaaaatatgttgtattttactgtagccctcttgagttttgagtctataatctaggaagggttgggaagagcttatccactgcctgttttttatttcgagatttctcttgaatatttacttctcagtatacatttatgtctctaacttcttgcttactcattgtgattttgacattttcttttttttttttgaggtgcagtcttgctctgtggcccaggctggagtgcagtggtgcgatctcggctcattgcaacctctgcctcccaggtttaagcagttctcctgcctcagcctcctcagtagctgggattacaggcctgtgctgccatgcctggctaatttttgtatttttagtggagacgaggtttcgccatgttggccaggctggtcttgacctcctgacctcaagtgatcctcccgcctcagcctcccaaagtgctgggattacaggcgtgagccaccgcgtccagccaattttgacatttcctgacttcatgcactcatgttaccacctttctatttcttattttctattgtatgygggattcaagtgagactgtaatataattttatataagggtattaacaacttttatttgattttattttttgagacagagtctcggctcagccccctaggctggagtgcagtggcacgatccgggttcactgcaaccactgtccctagttcaagggattctcccgtctcagcctccctagtagctgggtttacaggcactcgccattatgcctggctaatttttgtattttagtagagatggggtttcaccgtgttggccaggctggtcttgaacttctgaccttaggtgatccacccgcctcggcctcccaagtgctaggattacaggcgtgagccaccgcgcctggccgggtattaataactttttaaaaaccagtttaattctctattttctctaggttttcactatatagttgtctttgttgcaagacatcaagtaatttgggtcattttaggagtgttttattttagagacagttgacagtgagggttggcatcaaaagcaaggcttcctgggatggggtggtagatctggtcctcatggagtcacacaattcagaattacacggtcaactttacagatcttgaaactcaattttgtcagtggcatgcagaatggagtaggttcaggggatcaactcatartaagcctgcctgtatgagcctgatctgtataaatcagaataccagtgtgttaatttcagtctgaactataattaccaagagggcagttcattggctggtcagcccgttgctgttatctcccttttagggaaagtttagctgaaaattcacatttcttccagatgagcctatgctcccaggtgagtgtagaatcacagcaaagggagtggaattttaggcgtcagatggaccctcatatgctgtgaacggtgagcacgtctcagtcactgtagcagggccccctcttcatcttaatgtctcttgcagtcagcctgtgaaggctgatgaattcagtcccctttcagtggctaggtactgtgccaggtggtctatgtgctctatcttattttatcctcctagcaactctaggaggtatattgtattcccagtttatggatgaggaaaccaaagtgtaggttaagtaacttacccaaggtcatacaactattgagtatcagattctaacccaggtctctgccactgatgctctgctcagaacctttgtaatatactggcttcctgtgtctgtgttggagtcatgtggcaaactatttgtcttggatctttttcttggatagttttctaattctctaaatcttttcactggctgcaatataattgtcattatggctttaggtcatgatatcttagggtttatgaaatgtcatcagcaacacggatgggccatctgggtagatggctgatctcatctgtgtttgaaactttactcttttcctttgggggatcttactraaaccccttatggcctgaccacagaactattaagtattgtcctcaaaccactgtgtgtgttagccatctttattgaatgctgtttgtgaggggttgttttcataccacctattttgtcttcagaagattctgtgaggcaaggggaaattaccaaaaggaagttactgaggcatggtggctgctaaagatgtaaacaggccctcccaccccagtctgtttcaattcaggaagaatgtagtcttaattttagttgtgtgttccagtgttcatgtcctgcagacctctctgaagaatgttcctggttttaactagctgtgattccattttgttcagttatgatttagtgatgtaacagaattgaacactatttctgtttgtgcatgcagtaagatatgagtaaccaaaaaacyacggacctcataaaattaatttatgttctgattttcttttctcagaaagagtacatggagaacaagaaagttgctgtggaactaaaggatgtaccatcaccccttcatgctggctctaagctttttccagcagtcccacttcctgatattcgttctcttcagcagcctaaaatacagctttcttctgtccccaaagtaagctgctgtgctcattgccctaatgaaccctccacttcgccaatgcgttttggtggtggtggtggcggtagcggaggtaccagtagcttgattcacccgggcgcactgttagactcgcaaagcaccaggacaatcacgtgtcaggtagggtcagggtttgctttccagtctgcatcttcactccagaatgcctcagctaggaacaatttggcaggcattgcaagtgactttcccagcatgtgtctagagagtaacctgtcttcctgcaaacacctgccctgttgtggaaaactccacttccagtcatgtcatggtaatgtgcacaagctgcatcagtttccgagtctgcagggctgcacctccgctggctatttcccctgttctgatttcacaagcggggctccagggcatttggaagagcacatttcacagtcggagctaacgcctcacttgtgcaccaactctttgcaccttaatgtggtacctccggtttgtttaaagggctcactttactgcgaagactgtctaaacaaggttcgtatctttttatttcttaagttgggtgcagctgaggattgaggaatgacttttgaagtggatttatcttgaaaagtattatacatggggttgaagattctcccatggtataggggaatctccccatcagcataatttttgctggttctgaaagaaacaaagggtaagatgggagatcattcaaaaaagtagagagtcattatttttgtagtttatacttttagagcctcttgttgcaaacaagaggttggcaaagccttcgtgttctatgtttaaaggctaaagcacgatggattttttataacttacattcagcttacacatgggcccattcatgtaaggtagataactgcatgttgtctttttgcaataatgtgggaaacctgaagcttggcctcagtcacattggtgttcaagtgagactttgctaccctttatgtaaaatatgtgtgaggtcttcgttgcagcagactcatgccccagaatgtaaagatctgaccacgtgaatatctttcttgatcatgtcaagtcacttctggaaatgaatttatgaactgatagctaatggttcttggaaagattatttgaaagtccyttttattagaggctagcaagtggaaaggtaaaacacttagagtgtattttcagttgttgtatataactccagcttctgaaatgatgtatctgacacctcctcctttttaaaaaaaatttaaaacagccagcaagaaatagcataatcgatgcggctaaagtctggccaaatataccacctccaaatactcaacctgcacctcttgctgtccctctgtgtaatggctgtggaaccaaaggaacagggaaggagaccacgttgttattggcgaccagtctaggcaaagctgcttcaaaatttggtaaatgacagtatggcataaaatgtgcatatttaaatagctttcaatatctcatactaacattgcatttaatcacctttgaaggattccttatggttctaaagctactgtgtatgtgagtctccaattccatatcttggtagaaatctttttattattatggaccaggaagtcatttgccctttatgttgggccgaggctatacacagaagctgtgtatagaaaaattggtagtatatcaggagaaataaaagtgctggaaaagacttggtgtcaccttaggttggaaatcacacttgttgatggtatactccctagaagtgcttagaacaatttactaatggctgattaaaaacagtatttgaaaaccaaagagttctcagttaaaataatttccctaaaaagtagttaatgcgacgttttgaaaacatttttaaaatattaaatcagatgttaatgcagcgttaactcaaaatcaacgacagtaacagcttcaccctttgtcagctcctcagtgttggttactaccaagtaggtagataagtgtgggctaagcttgaaagtcgggtcctggagctgcagtatccggtcagttagtgtgcttgtgttcagagaagcatcactgcttaatgtcagagtggctcatgcttggaggtggatttattgtgggcttaaagttacttgacttttagatttgtcttctcctgaaaaacagaaataatctcttagagtgatactttttgacagcttgattgcttattaggtcaaccagtgaggttggtagccttaaaacttggcattcattaataatttagtttttctaccactgagaatgataggtagtttattatcttattgtaacttgccatttattttccactacaagtaattgaaaatgttaacatttcttaagggtcaccagaagttgcagtagctggacaggtgctagaaaacttaccccccattggagttttttgggatattgaaaactgctccgttccctctggccggtcagcaactgctgttgtgcaaagaatccgtgagaagttttttaaaggccacagagaagcagaattcatctgtgtatgtgacatcagtaaagaaaacaaggaagttattcaagagctgaataattgccaggtaaaaaaaaaaatttaataattttaatctacagtagaggaataagcagatatttgtttgtttgtttgttttgagacagagtctaagtgtcacccaggctggagtgcagtgacgcattcatggctccctgcagcctcgaaccctgggaccccagtgatcctcccacctcagcctcccaactagccaggatcacagatgcaygccatcatgctcggctcattttttattttttgtagagacgaggtctccctatgttccaaccagaaacagaaactaagaacccatgactgtattctgtcccttggacacccctggatggctttcaggatccagggttaggtggtggaggcttgtctcaaactcctgggatcaagcagtcctcttgccttggcctctaaaagtgctgtacgtgtgtgtgtgtgtgtgtgtgtgtgtgtgtggtgttttttttttttttagaattctgattgaaaatttgtttaatgatattgcatttgtgccaagttttcaaataaaataaattagcaaaagatcacttccaaagtactagaaataatttaatcattctttcagttatgctccctaatttatattttagttctatactggtataatggttatatatgtattatttcctttgattttcattactgctctttgaaccaggcacgtagaatatataattcacaatttacaaattaaactaaggccctgagaggtgaagaaacttgtttaagatcacttggccaggaagagcaaagatccaaatctagatttgtctgacccccagagtctgcttttaagctgaaactagaatttgggtcttttgactcttagataattaattatattgatagtccatattgcttgtctaaaatgatatacccatgttctttacaaaaaccagcaagttattattgtgtattgcaggtgcctgaggcaactttctcaaaataaacctttccttcctttggggacttatatgcgagcctgatagttttaacagaaataaatgcattttagctcccttaggggatatcctccctcctctctctaccacctcaccccagatcctgaaagccatccaggggtgtccaagggagagaatacaatcatggattctcagtttctgtttctggttgggctagtaaagcaccttccttatctctcttttctgcttattagtagggacggaaactaaaaactatggcttccagctgctaaaagcccaaaacaaaacaaaacagaaaacaacaacaaaaggcagattgcacaagcttgcatgggtagcatggacagttgacataaaacacagccttaaatcttattttagtcatttgtctgatctttaccacctcyaaattgttggcagaagctattagagcaaatttaactgagttcaaatttcacttcctatattctacttattttctgaaaggaggatgaaagaaatgcaaaaacagaagattggagatgagagcagggttagtcacaaacccagttcatatcaagaaccaatgttgagattactgagatctgttgtaattttttaccattcccaatagtaataagaatttttttctcaagaattacttattaaaatatgggcagacatcagtgatagactggataaagaaaatgtggcacataatacacgatggaatactatgcagccataaaaaagaatgagataatgtcctttgcagggacatggatgaagctggaagtcattattctcagcaaactaatgtaggaacagaaaaccaaacagtgcatgttcttgccttataagtgggagttgaacagtgagaacacatggacacagggaggggaaaaacacacactggggtctgtctgtcggggttgggggaaggggaggaagagcattagaacaaatacctaatacatgtgggggcataaaacctagatgatgggttgataggtgcagcaaaccaccacggcacatgtatacctatgtaacaaacctgcacgttctgcacatgtaccccagaacttaaagtataataaaatttaaaaaataaaaaatatgggcagaatgtgtagcaattttctagcctcagctcctgcttattcacccttattataaattaatgcaggtaaccgttgcccacatcaatgctactgcaaagaatgccgctgatgataaactgcggcagagtctccgcagatttgcaaatacacacactgctccagccacagtggttcttgtgtcaagtaagtacagaaacatctgctaatttcagctaaactcactgtgtgggaaattatcatagaagccagcaacatgtgaaagtaaaatgtatccccaaagaggctgaagtacatgagacatgtttatggttattgttgagaactgtttagaaaaaaaattgggtctaggtggatttctgtatttcctccttggaacttgagttattgtgggaccaggtttattttttattttatttttttgtttatttattttgagatggagtttcgcttttgttgcccaggctggagtgcgatggcgcaatctcggctcactgcaacctccgcctcccaggttgaagtgattcttctgcctcagcctcccaagtagctaggattacaggcatgttccaccacgcccagctaattttgtatttttagtagagatgggggtttctccagttggtcaggctggtctcaaactcctgacctcaggtgatccaccctcctcggcctcccaaagtgctgggattacaggcgtgaaccaccacgcccggccgggaccaggtttattaaagaaaaatgtgatttttttttttttttttaccttgtgctcagtattaataatttttaaagtttaagttaattttcaaatttgagtctccccaacatatttgctcctttttaatactgaaagtaacatatgtgtcttggaattcttttggtaagattgtcttacattcttctgatgtgaaacgtgtttctttcctaagaaacgrgggaagcaattttgaatatagtccagcctttcctttcttctcagtgggtgtcaatagagttgtctgtctttgtcaagtgtttctaatgtttggggatggggttggtctgtaccttttctttcagctgatgtcaattttgcattggaacttagtgacctgagacacaggcatggtttccacattattttggtccataaaaaccaggcctcagaagcactgctgcatcatgctaacgagctgatcagatttgaagagttcatttccgacttgccccccaggttaccactaaaaatgccagtaagtgggtttgcgttatttttgccattttccaatattacattgtggaggctgaaagacagcccataataagggrgttgccaggcccagatggggctgttctttgtaagaggtgggttagattttgaagtaaggcttagaaacyttcggttcttctcacaaatatacagataattggtatgtatgaagtttgcttttatttatttcaaaatatcatatgaaattgacttgtagatttaccttcccaacttgccagtgtcttcaaagctagcagtgttttgtgtcaggtggatagaaataacggattaaaagtcatgattctttttgcttccaagtattatgggtagagaatatggcgagggttctcacatacttgtgtggttggcaccaaataagtggagtcaattgtgcatttttttcggtatttaatccttaagcttcagcgggcctctgagtctgtgctttctattgtgcattccctgtggtgcatggacacaattagcaggagtggttattgctccacctgtgtgtagcctgtttatgccatatactgggaggagggtgtgagcacatttccaggactagcatttctgatagacttgacttgggataagaatgtttattgcagtgctgggctgtgtttaagccgctggcgaatatgtgtgtaactctgaaagaattaatgataatggagaaggagccatggtgtgggtgatccaggagagtgggcaatcccatacgttaaatgaaagtcttcacatataatttaataactgagagttacagaagtacgttagacatgatctcatgcaaagtcttcatttaagggagaaagaaatcagctcttagaaaaagtaaacrtgtcattggtgattgcagcagttaagagagtgggccccgggtatcctgattccggcacttgcctgctagtcacctgtgtccccgatacccaacaagccccctgyggtctggcttaagttgaaactcatgctatggacagttgagagttgtggataccagaggcttacccagggagtaagcatatacaggccttaccttaatcttttgaggctctttcctaactcacctttgtcattatttgtttttagtcacttggctgtagttacatttcttcccttctgcttctgtttgacggtcacttttctaactttgaaggccttatgtaaatacggtgttttttcctgggaggtgaaggttgcagtgagctgagatcgcgccactgcactccagcctggtcgacagagcgagactctgtttcaaaaaaaaaaaaaaaagtaaatgtagtgttttaggtaagaacttgcccactttggagattcttattccttatggttaaaaaaaccaaaacaatgttttgataattcaaaccatttagttttgctggatgttttttcccatccactagagtgataatttaagatacatttctttttatgttctttagtctgttcctttaattttaataaattaaacatacattggtactgcctgggttttgagtcccaggtgtaataggaaaagtgtagattttgttgataattggtcagtacccctcaaataaaaagaaaagcctctgattagaaaagtatggtgtgggccgagtgatgtggctcacgcctgcaatcccagtactttgggaagctgaggtgggcagatcaccaatcacctaaggtcaggagttcgagaccagcctggccgatgtggcgaaaccccatctctactaaaaatacaaaaattagccaggtgtggtggcgggcactggtagtcctagctgcttgggaggctgagacaggagaatcacttgaacctgaaagtggaggttgcagtaagccgagatcacaccactgcactccagcctgggtgacagagtagactgtgtctcaaaaaatctaaaaaaaaaagaaagaaaagaatagtatggtatgatcattgtaaaaacaaacaaaacacaatatttagaaatgtggaaagtgaaaaccccacaattctaccctccagaagtaaccactgttaatattttggtattgccctccagatttaaaaaatgtacgtttaaaaaaaaatgtgtcacatatacagtgttctgtggcttttggaaaaaaactatgtcagagcttggatgtcttttcatgttaatatatattaatataaatctgccacattttaaaaaccagaactttggtttgaaaagtacttgtatggctggtctttatttaaccagtctacctgttagtggacattttgtttatacccagttttgtgttttgttttgttttttaccatttccagcaaggtaatttatatctttaggctcctgggctgacataccatagggtaatttccaaggcataagagttctgggttagaactttactagcaagatccatgtcttcctccaggaaggtggtactaatttacactcataagagtgtctgttttaaatgtttgccaggccagtaagtgaaaaacagcatcatcttataattgacttttaatctttaacacagtgcaaaatatccttttatgattatcgttgtttgctttttatttcttctgtaaattgttcacatcctttgcctgttgttagtgatttctcttatggtttctggatttaaccctttatataattatcttaagttttctcctggtgctttaatggttctgctttttaaaatattattcttatttaaaaaaaatttttttgagactctgtcacccaggctagagtgcagtggcgtgatctccgcttactgcagactccacctgccgggttcaattgattctccttcctcagcctcccgagtagctgggattacaggcgcccgccaccacgcctggctaattttgtatttttagtagagagggggtttcactgtgttggccaggcttgcctcgaacttctgacctcaggtgatcacccgctttggcctcgcaaagtgctgggattacaggcgtgagccaccgtgcccagcctctggctagttttttgtagacgaggtttcaccatgttggccaggctggtcttgaactcctgacctcaagtgatccacctgccccagcatccctaagtactgggattagaggagtgagccacaatgcctggcaatttttaaaaatttttaatagagatggggtctcactgtgttgctcaggctggttttgaactcctgggctcaagtgatccccccgcctcggcctcccaaagtgctgggattacaggcatgagccaccatgcctggccagttcgttcgttcgttcgtttgttcgttctttctctctctctctctcttttctttctttttctccagttctacttccttctttctttctttcttttttttttttttttycacagaatctcgctctgtcgcccaggctggagtacagtggtgccatctcagctcactgcaacctccgcctcctgggttcaggcaaattattctgcctcagcctctggagtagctgggattacaggcgtctgccactttgctcagctaactttttttgtatttttagtagagatggggtttcaccatgttggtcaggctggtcgccaactcttgacctcaggtgatccacctgccttggcctcccagagtgttgcgatkacaggcgtgagccactgtgccaggccaagttctacttcttaatacataaatttcaacttatctggaagaattatgactacccactgccaaataaaacttccagcctaactrctggcaatctgctgttgaagctgaacaggctctaaattgttgggttttaaaaaaatttttgtttacttaagcctatagctcctagtattcccaggcattctcctatgcaaaaaccaaccaggactgaccctgctcaccttctggctctataagttattattcagcagacctgcagaataaatagacttttaaaaaacaacttygttgagatatgatttacatattacaaaattcagctcttttaagtgtacaataatttttagtaaattgagttgtacaattttagaatatttttgtcacctcagtaaatctattatgctaatttataattaatccccttccccactcccaggcactactaatctttctgtctctgtagatttgtattttctggatgctttatagaaatggaatcatatagtatacagacctctgtgcctagcatattcttttttatttttattttttgagacagtgtctcactctgtcactcagagtggagtgcagtggcacagtcactccagcctcaatcttcctgggctcaggtaatcctcccacctgagtagctgggactgtaggcatgcaccaccatgcccagctaaagcatattctttaaaacaatattcagttactttgtcaacactaaataatttaccctctcccatctaaatcactgtcatcttctcttcaaagttgttaactgaagtttggaggtcacccattgttcttattttgaaattgaatgtgtgcccttgaattaacctgacgtaacacttctttcctctgtattagcagtgccacactctgctctatgtttataacctaccagcaaataaggatggcaagagcgtcagcaacaggctcagacgcctgtccgataattgtggtgggaaagtgctgagtatcacaggctgcagtgcaattctccgcttcataaaccaagatagtgcagagcgcgctcagaagcgaatggaaaacgaagatgtctttggtaataggatcattgtgtcatttactccaaaaaatagagaactctgtgaaacaaagagttcaaatgcaattgctgataaagtgaagtctcccaaaaaacttaagaatccaaaattgtgcctcatcaaagatgcaagtgaacaatcttccagtgccaaagccacgcctggaaaagggtcacaggcaaattctggatctgctacaaaaaatacaaatgttaaaagtttacaggtaattttgatayctcttgctttctgaagtttatggtaggtttggtttgtttctgtgttttacgtgcccgcttgcttttggcgtgtccctttttgatttcagtgtttgatgatactcaaagtcaatcgytttctgtaaaggatctaacacatcttgggtacttaaaatttaaaccccactgtgcttgtgtctttgaaggagctgtgccgcatggagtcaaaaactggtcatagaaacagtgagcaccagcaaggtcacctgaggctggtcgtacccactcacggtaactcaagtgctgcagtgtcgacgccgaaaaactcgggggtggcagaacccgtttacaaaaccagtcagaagtatgtgaaactactctttctcatagctgcttcttgaatgtgaaggaagacatatgaccttttgccttcaattttccccttctgttagaaaggagaacctcagtgcccgaagtgttaccagttctcctgtagagaaaaaagataaagaggagactgtattccaagtgagttacccgtctgcttttagcaagttagttgcatccaggcaagtcagtcctctgctcgcatctcagtcttggtcttctaggtgagtccagcttcttgacccatgggggtggttayatgtaataggaaggattatgaaatagtatgtttgttgaaaagaattcagatagtactgaaatgcacaaagtaagtctcccatcactcttctgccagtccccctctcctcaggtaatcatcgttaacatttaggggcaatgctttcaccatttcttcttcctccatctggaaattgtggtaagcagaggtcagaaagagaagcctgttggagagtccctggccagtgcaggggggcatgtaaagatgtccctatgttcgctgtgttgaggaaaaagcccaaacgagccgtgcattggtggttctgattcatatggttctgtataggaagctatttggaagtaaagttttctgtaaaccatggtaattatttatcactgtctctcacaccaaggaattcttgatgcttgggagacagagaagccgtaaggccgtgttgcattcccatgagctccttttagcattgtgtttgttctgctgagttggtggcagatcactgtagaaagtgactatggatcagccgggcgtggtggctcacgcctgtaatcccagcactttgggaggccgaggcgggaggatcatgaggttaggagatcaagaccatcctggctaaccggctaacacggtgaaaccccatctctactaaaaatacaaaaaattagccgggcgtggtagtgagtgcctgcagtcccagttacttgggaggctgaggcaggagaatggcatgaacctgggaggtggaggttgcagtgagctcagatcgcatgactgcactccagcctgggtgacagagcgagactccgtctcaaaaaaaaaaaaaaaaaaagagaaagtgactatggatctataaaattacatctaaaaagccacataaaagttttccttatgtgcagaaagaactgtaacatgtaggcaagaacgtttaactctttcagagacacagaggaggttagacgccttaaattggtatcacaggctgatttcctaaggataatgcacaaagcagaaggttaattcatcaggactgcctctaattcctgcctttagctttaacccaaaggaagaatatatattaattggttggcggtaattaggggtcagtagatagtacttttgacaatgtctgaaatcaatgtgtatttaagattaaaaacacagctgggcacagtggctcacgcctgtaatcccagccctttgggaggctgaggcaggtggatcacttgaggtcaggagtttaagaccagcctggccaacatggtaaaaccccatctctaccaaaaataaaaaaaattagctgggtgtagtggtgcatgcctgtagtcccagctactggggaggctgagacaggagaattgcttgaatccaggaggtggaggttgcagtaagccgagatcgtgccattgcactccagcctgggtgacagagcgagactctgtctcaaaaaaaaaaaaaaaaaaaaaaagattaaaaacacatttgaaaaccaaatgtttggtttggttgtgttgtggaaaatctgcttctgtatatagtttcaaacaaagcctaaatgataaaatctaaatatacagaacagttttttaaaataatgtcaatatgtgtgttttaagcaggagtatgtctccaaaccttttaaacagagcatccccgcttgctttcaacattgcaaattcgagcagcgaagccgactgcccagacccatttgcaaatggtgctgatgtccaagtcagcaacatagactacagattatcccggaaggagctgcagcagctcctgcaggaagcatttgccaggcatggcaaggtaactttttccctcttgtgcttgctttgttatactctctgatggagtctctagtcaagaggacctaatttgatatacataaccacagccgggatagaagtgtgactgaacaagtttgaactccttccttttccctttggtctgctcagggtggtgctataaatccagtttttacaatgttagccccagagagcaagacgcctagcagtgaaaagctcttgtcttaggcagaaattgaaatggcaatttgtggccaggcatggcggctcatgcctgtaattccagcactttgggaggccaaggcggccagatcacctgaggtcaggagtttgagaccagcctggcgagtgaaaccccgtctctactaaaaaaaaattagccgggcgtggtggtgcacgcctgtagtcccagctccttaggaggctaaggcaggagaattgcttaaacacgggaggcagaggttgcagtaagctgagatgacgccactgctctctggcctgggagacagagtgagactccatctcagaaagaaaaaaaaaaaaaggcaatttgataagtaaaacattgatggatttcagttagctcttcctgctgaaatacaggtaggattctaaaataatgttggctggtcttgtttatgccttattatatttgactcattttttaggtgcaattttgctaaaaatgcacctttttagtagattcttaaaaatggccatgtcctgggttttgtagagtctagaaaagaccccaaacactcttcccatgtgttggcctctgagcctgccttggaaacctgtgtgtgccagagcacacaggcaggccgggccagtgtcacatctctaaaggtcaccctatcctcactttcttacgtcctggtcagcagaagagcagagttcagacatactccttcatggaagcgctgcagtcgacaaatgtgttccttcatggttcaccttcagttttaagacgacagggttctgggcggacatagcgtttagttttcgcttttcctgttgtaggtgaagagtgttgagctcagcccccatacagattatcaactcaaggctgttgtgcaaatggaaaacttacaagatgcgatcggtgcagtgaatagcctccacagatacaaaattggcagcaaaaagatcctgstctcacttgccaccggggctgccagcaaatcactctctttactgaggtaagaaacaagcaagctgtttatttcaggaaataacatttgacccagaaacaattttagaaataataaaaatagattcaatcacattcccacccccttgtgatgattgcatgtggaataatgcttattctagattgatacagttagaaacaagccatttgactcttgtctaagtcattaatcaaagctggaatacagcttaaacttgacaggcacttgggagtaaaataatacgcaacatgttcaaataggttctaaaaatagtagacccctacaataaaagtttataagcctgaaaagtctaaaatattaccttgagatcttaggtagaaggtagatttgtgtgtaaagactagatctacaaatcttcaagctctccatttgcagatatatccttagtgtcaaatagatactcagccccataagtctaccttaagactatctcagtctcaagcgtctggtgatggttttattcatagtaaaatgtgatacttctttgggtctccctgtttcggggagactggcaaaacaggacccactcctgagtgtttccttggatgatcagagatcttttttctaacttgtacttcactattacttaaattacgagttacgggttttttttttgttgttgttctcagaataaaaatgatgcttattgaagaaaatttggaaagtttagaaacataaaagaagcaggggaaaaaaaaccatccacaggyctatggcccaaagccaattgcacttaacagtttggcatcttcttttagttttgtttggattttttccctttgagcgttttttggtgcctctggttttttaaaactgtagttgagattatgttgtattcagttgtgtatccttatctatgggaacgccaatcacatatatctaacaaactgcagtgtggcaggagatatttaagctcttctcccttttgctctgaattcatcatgcttttctgctccactggtgtggaaaaccctatgattgatactaattctactgtgtaacgtaatcttctttcattgccttgtccctaaaatcctttctttaaatttttctggaaaatacattctgacataccagaaatccgtaaatttattttgcatatgcactgggttaattttatgaactctgtttatataacttgtaatatggaggaaatggtctgttccctaatcaaacttctgttttacagtgcagaaacaatgtctgttcttcaggatgcccctgcctgttgcctgcctctgtttaaatttacagatatctatgaaaaaaagtaagttaggtatattttttctttatccagtcagtactgattggtggcttacatgcacaaaaccatggtaatgactcttgaggaacttcagcctggtagaggagaggagacagagacactggcattcagatttacatgtcaatgaatgtttagcagacagttttaaaacgtcttttatttttaacaaagttagacctttggtcctcagtgttgtgcttatttttcccctaattgactagctttagtttgttttttttgtttgtttgtttgttttttaatttttttggagacagagtctcgctctgttgccgaggctagagtgcagtggcacaatctcaactcactgcaacctctgcctcacaagttcaggtgattctcatgcctcagcctcccgagtagctgggactacaggcatgtgccaccaagccttgctaagttttcgtatttttagtagagacagggtttcgccatattagccaggctggtcttaaactcctgacctcaagtgatctgcccactttagcctcccaaagtgctaggattacaggtgtgagccactgcgcctggccaagttttagtatttattggatgaacatttttaagcactagactataagctccaggacagcagggactagctctgccataatactgtatcctaagcacccagcccatagtagatgcttagcagggactagtgagtacaagaccaaggcactgcagagaaggcagaactgggcaagacttaggtcttgtccttgaggagcttatgtctagcgggaagagaaaatgctcgtgaatccttatggacagtgaagaaaactgattggaaaggaggagaaaaagctttgagaacacagaggaagggaagaacaaggaacttggccattatcccacaggtaatagggagccactgaagtgctggaggaaggaggggaggggaaaggtgtggtgatgggaatcatgctgcaggaagactcttctcgtagcagtggtgtctgagagggcaggaacaggggagagaaggaggcagagagggaaagtagctacatcagtccaawttcagagcagatactgttgggacagaactcgatgttacagaaatgtcaaaatgtcaaatgtcattgaaactagagtgggtaactaattttttttattaaaaacaatttttattgagccagggtctcactctgtcacccagggtgtagtgcaggggcacgaccctaggtcattgcagcctcagactcctggactcagatgatcctcccatctcagccttttgagtagctgggaccacaggcatccgccatcctgcccagttaatattttttaatttttgtaatgagggggttttgctatgttgcccagggtggtcttgaactcctggcytcaagtgattctccctcctaggcctcccaaagtgctggaattacaggcacgggccaccacgtccagccagagtaactagttttatgtagcaagcaaggtaaaagggagaggtcattttgattctgagtgttttgccttgcatgactgggatgatggttgcacagttaaactggaaatagggaaataaagcatggcaaggaggtacagcaagtttttggtcttggttttggacattcaggttttaggggccattggagtagctgggtggagaggtcacatagtcttctgcacattgagggacttctttgggagagaagtaggctctggagatagggcagtcatttgcctttaagacgattgggacagactagagagcagataaggttgggagggggaaggagaaatagagggcaggaatggatggaatgccaccagggccagggatgtgggcgagcacccaggatgtgtgccaagagagcacatcaggaatggggggatccaaggccatgaggaaatgcatgaggtgtggggatgaggcagaggccgctgataacttttgagtcatcactacagagtcctgtggctaaaatccagkagggaaggggctgagagactcgggggtaacacagcagaagcagctcctgagcagctggatgtttccattacagggacagggtagagtacgagactgagaatgagagtacaagggagagtgtgtctctccgggaggtggaagaggaccaggggctggtttggtagatgggaatctgagcatatgtaggacactgggaagaaaacactggtcagacagtgagaagaccagggaacacttactgagcacttactatgagccaagttctgtccaggcctaaccacacttaatcctcacattgaccctgtgagataggcgctatcatcaccccattttacagatggaaaaagtgaggccccgattggtcgtggaacttgactaaggtcacacaggttgaagtggagtcaggatgtgaactcaaatctgccagcctccagggccagtgcctttaagttccaagtaagaaagatacaggtcaggaggagaactggggagtccagtgtcagagggtgtgtggatcatgcagttgaggcataggagagttgagagggtcacggaaagcacatatacttctgagaggggagaatggggatggtgagaagtaacacagagaattggaagtgaggggagctgcatcgagagaggtttccaactcaagagaatttggtgaggtcacttaaagaaactgggcaggggctgggggtggctttcaaatgaagtgagcattgtcatggtcggagccagagacgactcaggagtaccaagcatcactggtttgctagtgaatgaatttgtagtagaattattccagttttacctttgaagagatggaggaaccattcttggttattgttctttatttaaacaggatgcgtgtttctgtataatcaaagaaaaaccttctaagtcagcgtctctcttctcttgcttttaggtttggacacaagttgaatgtgtcagatctatataaattaacagacacggtcgcaatccgtgaacaaggaaacggacggctggtgtgtctcctacccagcagtcaggcccgccagagccccttggggtcttcccagtcacacgacggctcctccacgaattgcagcccaattatatttgaagagttagaatatcacgagcctgtctgcagacagcattgttccaataaggatttcaggtgtgccgttcgtyttcctttagaagtaattcttttctataagattgtggaacatgttaggatgaccttgtgaacatcttagacccctgcggaatgtcagcttccaattgtgttctcttttcttcagcgaacatgaatttgatccagactcttacaagattccttttgtgattctttctttgaagacatttgcgccccaggttcacagtcttctccagacccacgagggcaccgtgcctttattgaggtgaaccatctcaaagcctttgtcgatataatgccctagttctgctttttataggaagcctgccctttctgcccacatctctttacaaataagtactctacaatgcttcatcctcatgtgtttagccttcagtcaaagtacagtcatgcaccacataacaaaattttggccaaccatggactgtatataggacagtggtcccataagattataatcacatattttcactagacctttcgatgattagatacacaaataccattgtgttatagttgctcacagtgtgtagtacagtaacaggctgtccagatgtgtagctcgggaaccatgggctgcaccagcctaggtgtgcagtgggccgcagcatctaggtttgcataagtgcacctgatgatgttctcaggtgacagaatcacccagcaacacattattgagtacatatccccatcatgaagcagcacgtgactgtttatctgaaatgggatccattcactcagtacttcaacaagaaaatgtgtgtttgcgctacattttagaaacgtaaacgtgaggagggcagattcttccacagaggggagatgtatcataagtgctgcagtcgaaatctccacaagtgttgagagtacacagcttcaaatatgcatacatttcaagacttgtgagagaaaagtattcttcagaagttcatttaatcactccatgagccacaacagtagacttaacacaaaggccaacacaggactcagtggcctgcacgtccctgctgatgtggaagcagacgcgtaactgacttggagcccagttgccctatttttaatccccctcctggaaaactacccagaaaatgccatcagaatgcatcagagaggccagtgcctcagtgcttgcctccctgggtccttaattttaaccttcaaacctggtggtgggcattcagacaaatgattaacacatacattaaaccaaagccttctgtttagcaagcgcctccttttctgttattttgatttaacctttcctttttttgttgttttttcctatttcagctttccagattgttacattgcagagtttggcgatctagaagtagtgcaagaaaaccaaggaggtgttcccttagaacacttcattacctgtgttccaggtgtaaacattgccactgctcagaatggcatcaaagtggttaaatggattcacaacaagcccccgcctcccaacactggtaggtgtcaggtattttgtcctggagctaccacctgtccactatgagaccagaggaggctattggcttttattttaaacagcagcacaatttgccaagtgtgaaaacaccatggatgtgtcctttgatcttttgaaaattcctaaaatgcttgaggggttggcgttactggactttgttttattttttatttatttattttttttgagacggagtcttgctctgtcgcctagctggagtgcagtggtgcgatctcggctcactgcaacctctgcctcccgggttcaagtgattctcctgcctcagcctcccgagtagctgggactacaggcaccagccaccacgcccagctaattttttgtatttttagtagagacagggtttcaccatattggccaggatggtcttgatctcttgacctcattatccacttgcctccgcctcccaaagtgctgggattacaggcctgagccacagcaaccggcctagactttgttttttagatagggccttgctgtgttgtccaggctgctcttgaactcctgagctgaagatgtcgtcccactatggcctcccaaaatgctgggattacaggcatgagccaccacacctggccagtttgaaagtaccaacataagctatgtaaaaaatttgaaactcaaatttcacatttacagatccttttagcaacctaattttgtgaagcttttggcttgccagttgactgaccttttaaaaatagtttcaggggctgggcctgttggctcacacctgtaatcccagcactctgggaagctgaggtgggtaaatcacctgaggtcaggagttcaagaccagcctggccaacatggtgaaaccccatctctactaaaaatagaaaaatcaggcatgatggtgggcacctgtaatcccagctactcgggaggctgaggcaagagaatcacttgaacccaggaggtagaggttgtggtgagctaagatcaagccattgcactccagcctgggtgacaagagtgaagctctgtctttttttttttgagacggagtcttgctctgttgcccaggctggagtgtagtggcacaatcttggctcactgcaagctccgcctcctgagttcacgccattcccctgcctcagtctcctgaggagctgggactacaggcgcccgccaccacgcccggctaatttttttttttttctgtatttttagtagagacgggtttcaccttgttagccaggatggtcttgatctcctgacctcatgatccgcccgcctcagcctcccaaagtgctgggattacaggtgtgagccaccgcgcccaggattttttttttttttttttttttgagacggagtcaccctctgtcaccaggctggagtgcagtggccggatctcagctcactgcaagctccgcctcctcggttcataccattctcctgcctcagcctcccgagtagctgggactacagacgcctgccaccacgcccggctattttttttgtatttttagtagagacagggtttcaccgtgttagcaaggatggtctcgatctcctgacctcgtgatccgcccgcctcagcctcccaaaatgctgggattacagacgtgagccaccgcacctggccgaaactctgtctttaaaaaaaaaagtactttcaggtatttgaaggaaataccacttaatgcagatttaccttcgaaagtcattttggtccacgttttggactttgataaatgtgaaaataaatttaaaagaccaaggtatttggacctagacttgggtgagtgtctgagttacgggcatgtcctgagttgcagatatccaaggctgctgcccgtgaacgacactttacttgttgccttcctgtgtatacacacatacttcctcctctttgtccccaacacttttgcttctcccacctcccttaccctacaggaaaaaaggtgaggataaccaaggaattctttctgagtcagcctgctcttaggaatgtgtgtactcaggtttcttacgggacacctcctttcttttccctctgtcttagacttctcaggggccatagattatgccactcctcctttctcctaagccatgagcccacaagcctccrctttttattttattttattttattttatttatttatttatttatttatttattgagacggaatctcgctctgtgkcccaggctggagtgcagtggtgcaatctaggctcactgcaagctccacctcctgggttcatgccattctccttcctcagcctcctgagtagctgggactacaggtgcctgccaccacgcccggctaatttttttgtatttatttttgtatttttagtagagacggggtttcaccttgttagccaggatggtctcgatctcctgacctcgtgatccgcccgcctcagcctcccaaagtgctgggattacaggcatgagccgccgcgaccagcaagcctctccacctttctataaagatttccgtttgattacttatacctttttaataggtataagcagtcaagatggtgcaaaaacctgttccttacacccttttatgtcatgctaatcttacaacattatcactttctgtggttttctgggtaacgttttcagctccactatggattaattttgctcttctgggccacctacctgatgaccatttataactttgtggaaaggtacgttccacatgaccaagtttcagaaggatcttggaaatataactagtttctaaactgggagcttcttgtgtactttgacttctgctataaataacactatagtagactctgctttaccttggccgcttaactttgaggattagtgggacagcatttgacagcccgtgaataagttagttagctagttattggactatgagacctgaatatagaaactgagacgtaaagcagctactgtatttggttttgtttgcttccccatgatcgaactcaagccagggactgcagggccattttcccttctttcagctggtgaaatctgtgctttctgtcttatacacgttctttttcttctagacccttggcttctgcgttcgaagagtcctgtaggtaacccccagctgatccagttcagtagagaagtgattgacttgctgaaaagccagccatcttgtgtcatacccatcagtcatttcatcccatcctatcaccatcattttgcaaagcagtgccgagtgtcagactacggatactccaagctgattgagttattagaagcagtgcctcatgtattgcaggtaaggcgtgtcacgggattacttgtttacaggcaggaatgttcctccatggctttggctgcctccatcaaagaaacagtttaattcctaagaagtcagttctgggcagaacatccactaaaaactttcttcagagggcaggaataacacacacaggcggcttctcaatttttcagaacgctgctagtttccagttttagaggaactccttggaggactgaggagtattttccctctaagctctatagaccttcttcatcccagcacagctttctccagaactgttcatgattacaaggaagctcccatgaatagccacatacttgtatgttggtgcctatgtgagagtcaagggcttaacctttcttctaaatttaactagttggagacaagttactgggctagagtgtagcactggatcctatgaagacttttaccagttaactcacagtgttataacagcttcccactcactaaaaacggcttgaaaaacttgtagaccaatttgtctggacaaccaatacagttttcatttctgtactcacgacttttcttttcaaaagattacacttttcatttttatactcaacgactgtttgggagaaggtgtgccaggccaaaaacgataagagtttcagaaggccttggacatttgttccttttgaccaactacattttgttgatcgacatgtgtttcaaattgcacacattctacataaagggagtcatgctctgaggctagtaacgagagggtgagccagcagcaaggaagtcgctgtctgctgaggtcttatgtgtataaataaacyatttgctttgcagattcttggaatgggctccaaacgtctgctgacccttacccacagggcccaggtgaagcgctttactcaggatttactaaaacttctcaaatcccaggccagcaaacaggtcattgtgagagaattctcacaggcttatcactggtgagttgatgaaaagaacagaaatgaaagtaaatattttaggacattttatcttctgccaaactctaaatagttatctagtatttctattaagcattcttttggaaaacttgtagtagttttttgtttttttttttttttttttgagacggagtctcgctctgtcgcccagtggcacgatcttggctcactgcaagctccgcctcccgggtttatgccgttgtcctgcctcagcctccagagtagctgggactacaggcgcccgccaccacacccggcttattttttctattttttagtagagacggggtttcaccatgttagccaggatggtcgcgatctcttgacctcgtgatccgtccacctcggcctcccaaagtgctgggattacaggcgtgagccccagcgcccggccggaaaacttgtagttcttytaccgatgatactactcattccgtatccacttccgttgttaaaacctaggtgtttctcaaaggactgggatgtcactgaatatggtgtttgtgagttgattgacatcgtatcagagattccagacacaaccatctgcttgtcccaacaagataatgaaatggtgatttgtatccccaaaagaggtatgtgacttaacatttgctggaaggatattgtctatctcctgttattttaacatagtgtggcatggaagatgtggttttccctccctgtccgtgcttcctgaagattccacagaaagcacagtgtgaaaactgctgctctttggattctgtgttcttcaaagtaggtgaagctgttctcaagaacaaaagcaggctggctttttagaattgactctaaggggaaaaaggggcatcatcagcactttgctcaaatgccttctgcagcctggctgtggctacatgagccttagtcatccagttgagaatctgtcaccgtgcctgttggctttgctcttctgttgaactctgagctactttatttactgtgcacacttgagaagggaagacaactcgaatgtttttttttcttttgcctttcaaattttaatagttgaagtcagaactgcacaggtccagttacgggtagaaagtacagtatttgagggatgcgaaactcatggatactgggggccaatttttcgtgtctgcagtttccgcggggcagaccgcaagacttgagtaggtgcggattttggtatccaggcagggtcctggacccgatcccttgagaacaccaaggggtgactgtatggtcgtatcctccttctattatctggttcttaaacggtgctcctgcagaacattgatgtccatgaaatcatagaattccagggcccattctcacttaaaaattaatagaaacaatctcagcttaagctttccctcctgtttatttttgttcaacttttgaagcctgattctctcttctgctagcaagttttaactgaagatcagatgaataaacaaaaaaagtggggatattcagaagygtgatttcatgggaataatttctagagtacttgcttaagtacagggacctgggtgtgtgtcatgttaatagatatggggcaggggctagaaaattgtttctagcttataagatgacattgtttctagcttataagatgaatatatatgaatttcataatataataatatcataacttcctggtgttctgccctggaacatgtttgagaaccacttgcaaagagggaagagtatatgtgtttgttttaggttgtgtgtgtttggaaggcaaggatgatatcgtttataaattcccaaaaggatttactctagtgtggatgttgaacacaaatgggtagaaaaaaactgtgattttatgttttttggtttttttaaaagaacgcactcaggatgaaatagaaaggacaaaacagttctccaaggatgtcgttgatttgctgcgtcaccaaccccatttccggatgccctttaataaatttatcccttcttaccatcaccactttggccggcagtgcaaacttgcgtactatgggtttaccaaactacttgaactttttgaagccatacctgatactttacaagtgagtgaagaaattctaattttataaagtatttttctgaacaacgtataggaaatactttttcacgttccagacctgtttttctgggaagtagggagttacgaaagaggatgaaaatctaagctattccagtcagagaagccatattcctgactcattagtatttttagataaatatggctttttccttcaataaaggattattcaaacttgttttgggggtaattattgaaaaaaagattcagtaggttttcttttttttgtttgtttgtttttgttttttgagacggagtttctttcttgtcgcccaggctggagtgcaatggcgcaatcttggctcactgcaacctccgcctgcgggttcaagcagttcacttgcctcaacctcccgagtagctggggattacaggtgcccgccaccatgcccagctaatttttctatttttagtagagatggtgtttcaccacgttggccaggctggtcttgagctcctgacctcagttgatccgcctgtctcagcctcccagagtgctgggattacaggcgtgagccaccacacctgctgatttcttacactgaatatttgttcattacttttatacttttaaaatccttcgtgttgaaggtaggtctgagtacatgaggtaacatcagtgctaagctgttcgctgttgctaagttaaaccaaatttctgttgttgattttattttctttttttactactgaagtgctttttaaaaattgttttattgtggcacaatacacataacatagaacttaccttcgtaactatctttatatctcctgtccagtagtggtcagcacattcacattgttatgcaaccgatcttctgaactttttcatcttacacaactgaaactttatacccattcagtaacgctgacttgttttttcattactagctgcatactttttttgctattctgtaaacacccgtgatttgtttattttccctttcctccccccgtgtgttttcaaaggtattggaatgtggagaagaaaagatccttactctgacagaggtggagcggttcaaagctctagctgcccagtttgttaaactccttcggtcccaaaaagataactgccttatgatgacagatctccttacagaatatgctaaaacttttggttatacatttcgtctccaagactatgatgtcagttccatttcggctttaactcagaaactctgccatgtcgtgaaggtaaatgtttttttttttttttttttttttccctcatgggataaaactcacagtgacctaattctcattaggacgtttgcgtgtgctgtagcgtttctttatttacaccttgaactacttaactgtcacagcattatgactcgttttgtgtcattagtgcttattaggtaatagaagccttggtttggaagttgagagttttggtcttcctcttgtgtgtttctgaatggccttgccaaagcaatgcctttgtgaactgatgaggtcactcttcaccccagggttcggtcatgaggtgcagctgcctcagcactgctggcctgagcttgactccttccagtgtgagttttgcctgtgacgttcttgggagcccgtaatyacacagtgtcctctccctccacattctcacccacttaggagtaggcttaggagcaagcgagggtgcagagtggcctttgtcactggcagagctgtagtagagagggcagctcgtgctgtttgctgtcctggactgcacttgacccttcctgtcctaggcagagcagctgccagttttcggcctcctcccccacagraccagaagaagtcactgccaggaggaaggaatggaaagggaagcatgaaggacggcaccctcagttacaggcccattactagctgcacacatttctgtgtcatttaattccgtaaacagccagaacgggttcactctccctttccttcccactgtggggtttttttggagttggagtcttgctctgtggcccaggctagagtgcagtggtgcgatcttggctcactgcaacctccgcctcccaggttcaagagattcttcttcctcagcctcctgggtagctgggattacaggcgcccgccactacgcccagctagtttttgtatttttagtagagacagggcttcaccgtgttggccaggctgatctcgaactcctggcctcaggtaatccgcccacctcagcctcccagagtgctgggattacaggcatgagccactgcacccagcccccactgttttttaatgtattggactgcagctaagaagacgttcttaccttggcagaggtaggaasgctcagagctctccttaggtactgattggttggaggaggaggtgagagagcaggaagcacaaccaggagagccgaacatccctgagccaaggcagaggaatggccagcagcatcgcaggagggctggtcagagagggactgcctgacttccaggtttagctcagtgggaagagtcggtgctgctggccaggtcagtggcagtgttggttgtgtagacagaagccaccttggagtgtggtgaggagtgaggagaggtgagaaaatggcccaggtcatctggacagcatcctggtttgtctgcttgtgaagatggagggctgtggcagcagctagaggctgtggggctgagggagcaagggaggatttgggctgttggttttcctacctggaaaaacttgagcatgtctgaaagccattgatgtggatctgtctagagagagaagatgaacatacaagggcgagaaggggtaagacaggagggccttgaggtgtgggagactaggaaacagcacacagaggaaggaggaagtatacagggcaataggctgggggcaggcatgggcaggtctgatgtttatcatcaggaatagaagggagtcctcttccaagagtggttttccactagagagagggactgatctctgcttagagagagagaggagaggcagggctcaggacttaggagtggggagaaggtccacagttgtcatggtgagtggagagtggcttgatcaggatgtcacgtggagtgcaggggtatcgagagctcactgcaagttggcaccgtagactctgggagagcagcagttggggtgtggctatgcaggtgtcggttcagggaaagcaggtggttggattcaaggtgggagtttaccgatgggcgtcaggaaaaggcatgggatgagcgaatttaaatattgacaagaatgtcagtgccagcatgacaaaagaggagagtgaagcaagggagtgggctggcaaattgggagcagataggaggcagtgatgctgctgaggtttgagaaggggcggagttgagcgggtagagtctctttctgcactcccaccccaacagcagctccagacttgcttttgcaagtgggatgctcaggaggtttgaatgatttatgttggatggggtaatgacaggtttgcactgtgaccctggagatgggtgtctgcagtgaaattgaacacaggaggatgtcgtcggagatgacagaggcaaggcattgaaaggctrtacggctgtggtgtgggacaggtccctgggtgttcagttgcccaggatgatgaaaggggtggactcaggtggataggaagaccccacgccatgacctagggctttgctgggtgagtgtgatgggtgggcagctggggtgtgagcagcaagaatggggagagctgagagaggctccgtggtgcctccctggctgcccactgggtctccygggagcttctccaaccttacctytcagattcttatagaattagtcccagcacactctgagcattggtgtttttaaaagctccccaggcaattctaatgcatagccgggattgagaatcaagggatggatccaagtcgcaccagaggagcaggctctggtttggtttctttcctaagcagctgtagtgatggtgggggtctgggtggctaagatgactgggatcccctggacttgtatcggttggttgattaaacccgcttctgaggaggaaatctatacagtcccataatcatgataagtagggtgggaccctgccagcctccctcctgccttggctctgggcacatgtcagaaccagataaagatgccctggtcttgggatggctcctcaagtgccacccacctctctctgcctctcagaatccacggtccaaagagtgccaacwtgtggtgacttagccctgccaagacctttggccctggcaggaaaaccagataaagggggcaaacaagctgtcaggatgagcattggtttgtgagagcagtgccggagccgtgtgtgtgccaaagctctgcctgtttttgtgccaggaaaggctcacgccacagcctcaccctcgccacccacagcctgctggctcagtcaccagatgcgtgtttcttcacatggtgtttggtccccaagtgacaatctctgtcttttttgtaaggtttccctctcagcgcatttaaccgcttaaaccctttatctccttgagaatctgaaataattgaggagtggacagttactagtcagatgaaaataccagctttgtggtgagtaatagcagactagaaaaatgcagcttgccttgtaatcagagtaggccctctctcacctccccagcccgccctggggacgcatatgggcaagtcgggtctgcacagaagccatgtgagtgttgcttagagtctagcctccccatccctaccccccttcgagcacagcaacccacacttcacaagcttggaccactggccatcagctggccagtctgtgtccttcttatagtggggtttggaaagaatgaatgaaaaataaagagaatgatgcaatttcctcccccattattatcttgttgagagttttcagttatggaccggcagggggaggacagtttctgcttccatgttggtctggtgtcccaaagacgctaaaaacaaacccacttgctttatttcagtgtaagagaaaaaaattagagatttttcatctgttggtctcattaaccaaaatgaagtgagctgagttgggtataacctagggtgtctctcttgagctctgaaaagtgtgaattctcgttttccccaggttgccgatatagaatctggcagacagattcagctgatcaaccgaaagtctctgcgatctctcactgcccagttgctggtattgttgatgtcttgggaaggaaccacccatctttctgttgaggagctcaagagacattacgaaagtacccacaacactccccttaacccctgtgaatatggattcatgaccttgaccgaactgctgaagagcctgccatacttggttgaggtaggcacgttaatggctctttagaactatcattgaaaactatcgattgggcatttccggattacctgatggtctagattagagtgtgtagagctggaagggacccgagagaccatttcatggatgaacacgccgagacctcaggcagtgaagcagccctgcctaaatgggtggcagaagccagtgaaagcctggtctcctcatcctggcactggggtgtgtttgtcccrttctaggatgaaagcctggtctcctgatcctggctctggggtgtgtttgtcccattccaggatggatttcgctactgttttatctttctgaatgagatggtttatgtggtggcttgaagagagagatgagtaaggtgagggcagaaaggaaggttggccagccagtcccccwggcagcctttcaagaatggcgctccaagattgagagaatcttaagagaatactgcatgcaattctcgggcgacagatataaaaacctagagtaaataaatgaaatcctggaaaaaataagttaccaaaattcactcaagaagttaaaaattagaccaattaccataaaagagactataaaagatcactgaaatataccagtgaaaaaggcatcaggaccaagtgagataacaattgaatttcaaccaaccctaaaagaacagataaatctaccttttaaaaaaccattctggggcccggcaaggtggtacacgtctataatcccagctactaagaaggctgaggctagagaatcacttgagcccaggagtttgaggccagcctgggcaacatagcaagaacccatccccaagaaaaaaaatactgttctaggctgctgaaaaagaaaaaaggaaagcttaccatttatttttacgaagccaaaataaatttaataccaaaaacataagatagtcccttaaaatgatcctaaataagatattaacaaatgagctccagcaatttaaaagaatgatatgccattatcatctaactgtgggacacatcattaaataatgaaaggatatacatccagcattttctaaactctgttaatatctatcctaagaacaccagttctggacaggtgttaatgcatatttcaggacaaaggactttccctgtccagctaagattgggaatatcctttctcttggcgattccatagcatgttaaacactttgaaaaggtttgtggtaaagaaatctgcttccttaccctgcatacacaagggttttgtgtttgtttcttgttgcttttgatgtgtttttaaagaatgctagtgtcatcctcttatcacagtgtttcttggaaaactggtttggaggtgcagtttaatggccccagtgttcactgtgtgtaccgtgatttgccaacacagtttgcctcccccgatttcttccctactcacacactgtctcttcagaccgctgcagccttcgacttgcaaatagaactgaagtttgctggaggctatagccttctcttggaggaaatccttgaatatatccctcctccttttctttctcctcttccttctttcctctcctccycctcctttcttcttctttgtcttttttgtcatcttcatcttcttcatctttgtctttgtccaattcgtcgtcttcgtcttctttatcgtcgtcttcgtcttcttcatcgtcgtcttcgtcttgtcttcgtcttcttgttctttgtcttcatctttgtcgtctttatcttcgtttttgtctcgtcgtctttgtcttcatcttctttgttgttgtcttctttatctttgtcgtctccttcttcttcgtcatctttgtctccttcttcatcttcatcttctcatcttcgttgccttctttttcttctttgtcttcgtcttcaactctgggccttttccctcagtgggagrccttcactttccacggggcagggccagtcactaatatttctaatgctgcgttttctttttaaccaggttttcactaatgataagatggaagaatgtgtgaagctcacaagtctgtatttgtttgcaaagaatgtgcggtctttacttcatacttaccactaccagcagattttccttcatgagttttccatggcctataccaagtatgtcggagaaactctgcagcccaagacctacggccacagcagcgtggaggagctcttgggagcaattccacaggtgggcatttttctcagcttccgggagagcatcttctgaacagccacaggctaactgtcctgaacagaaaaataaaatgctgccagaataatggaacggcaggcattttgaattgatcctttcaaaacatactgttggtctaaagtaaatgattttagcatttctccttgatyctttctgtaaacctttattaaatccctrtatgccaggtgagtaagtttcaggctgtaactctagaaaggtgttggttaatgggagagtcaagacccccaagcaggcaactagtcagggcggtcagggcagtgggcgcgctgaggagggccgtgtcagggcccacttcccaagcctggggagcctgttgcaaaaccttcaaggatgtgcctgagggaagcacgtgacaaggaggggagagagcattctgggcaaaggggatgatgacatgagcagatgcagggttgtgacaagtggcatggagtgtcgagaggctaasagggagctgagagctcggttagggagggcgtggctcctccaggtaaggagggaggactgtgttggagagagctggagcccaggtttgcatttgaaaagcaccccagtggtgctgtccatggtagagccgagagaagcaggcatggagaagggaactgggctaggatcctggccactgcagaggtctgggtcagtgttagatggagggattgagccagagtaaaaatagtagaatagaggaagtaggaaggacccaggcaaagcttgcctgggagctgagatcagtgacctggcgacgghgtgcacatgtagggggcctgggagcctagctccactactaccactctgcttggctgagatggagagcggcaccatcagggagaggactttaagatgctgataatgaacttagtttaaagggtctgagagattgctcttaattcttttaggtggttgttcagtttctgcaaaaaaatggcaaagagctctcatgtgagaactaccttaatttatatgccaaagctggtgtttggaagacagtctttttaagaattataaaggatatttctgaaactgtgtctcatgatttttgaactactctgctttttataggggtatgtttctgtcagcttctgttgctttaaaagctaaggagagagtagagaaacatgcttcttggcagtaactcagctcctaaattctagcctaaggcaggctccgtaggtcacactcttcctgaatgttagggcttctgtcccctccttttccgctgcttaaccagtagtatgtcttgtgtgcaggtggtctggataaaaggacatggtcataagagaattgtagtgttaaaaaatgacatgaaaagtaagtaagcacccatcccctccccccttaaaaaatcacggttctctcactgacatttctctctgacgggtgctctttgtcctgtaggtcgtttgagttcactcagtctctcccctgccaatcatgaaaaccagccctcggagggcgagcgcatcctggaggtgcccgaatcgcacacagcctcggaactcaagcttggagctgacggcagtggtaagagaggaaaagcagagacataggagcttgtgaaattctaggagaaacggctttggggtcggggagagcgagggaaaggactccagcaagtcatccaatctgctgaagttacatagccacacatttttcaaagcagttttggtatttagttagtaacaggataaaattgacctttatctgttagcattgcatggttgactggttaaagtccctgaaggatgttggcacccccataatgatcatcttaccccagttcagatgttgaagaaaaaaattattccgacacttattataatggatattcatgacacttgcaacaggggagagagagccaactcccaatacatagcctaggagcagagtgagggctcagtgggtggaaaattactaagaggattcttgctataggcatgcaggccagccaaggatctagacatcagtggttgggaataaggaattcgatcagctgtgaagggtgaggggattctcactaaactgactcaagctaagactctagagcgagccggcaagttcagcaacagacatggaaggccaaggtcaggcctgatccggaagagggctcagggtgcctgactcatggctggtcaaggcgtctttgtcacaggacagccctaggcaggatttgatatactaatgcattaatattacccaaaattacactgagtcacatagatttcagatagatccacctctgtagtagatagaggccaattcttggaatgttatagcagttctaacttttctgaaggacttttgaattcatcgttataggtgagaattttgtcttcataacatgcggcgagatagcacgttaccgtcccctgtgcccttaggataactgagttacacagcatttgacgttttatgaagcgccctcctgggaatcatctgccgaagctgccccacagccttcagcagtgctgacctccgttgtgcagcggaggctcggaaatctcaggcagtcacgtattacagctcacccagagtcagcagctaggaagccacggaaccaggcccagggcttcggattctgagcttccacttgctgttaactacgtacaccccgtctcaggctgtcccttctctttggaagctgactgcaggacccttttctctggttgggtcttttgaggggccagtgttcctaagaacacggatcttcagaagaactagcttattaaggcgttccattaccaggatcttcctgttagtgggttttgggtttttgtttttttttttttttttttttaataccttaaatacttcttgactctcttatctttaaggcttagaaggaaaacttcaggtgtgagcccagggtgtgtgctgggggtgggcgtggaggtcctgtggtgtcacggccctccttgtttgcccagggcccagtcacacagagcaggagcttctccgcctgaccgacgactcccccgtcgacctcctgtgtgcgcctgtcccctcgtgcctgccgtcccctcagctgagaccagaccccgttatcctccaatctgctgatctcattcagtttgaggagcgccctcaagagccttctggtgggtgactccatgttgtcatggggattttcttcggggtttaaaacaaaaccacgatgagatactgatatagtaaatgacggaggtgggaagggactaccccttttcaggtggaaaacactgtgctgattattcgaccttctttccccacctgggttcctgcagaatgggatgcacagcctgaggttgcctggcgagcatcaggcaagggcgatttggcagctctggagggctggtggctcggggctgtgggcgagtccacaggggtgggtggggcctcctgggcttctgctctcccagactttgtgaaggttcagctgctctcaggcacacctgtcaccagatgtacacgtcacccatggtgggggtccagagggcccaagggctttataaaggggtgaatggagggaggtgtctgtggctggagccccggactctgcccagtgatataacagacaggaagctgagcacactgagtcccagcctagtgcaggcattggcactgaccctgtgctcagggctgacagacaccatcacatttaactcttaccacggctccaggtgagagccgtggaataaaggcagctgctttattccacaggctgcgtgactaaggcacagctggtgccgtcactagagaggcagtggccccgggctgctgggctagcaagggcagagccggcattggaacccaagccctcttgtcctgcggtgtctcctggcctctggagaggatggcccatctgccctgtacagatccctccctgctcttcatctgttggaacccaactcctccccactgctggtgctgctttccaggtcaccaggaacaacccgtggactcctggcttggcttttaccatcttggttgttcttggcagcgttcagcactgttgcccaggaaaagaactgaggctgttgacttggaaaataggagatggggaagtaactgcctgcggatagaaccagcctgtgcagtcagacctagaccatgccctgctcctgtgcagtgccccsctagggttggtggcacattgatgttagctcgtttgtggggttgtggcctttgtgccttcagtctgggcaagttcaactgcatgcaccggacaagagaggaaaataattaaaacactgtgggcagttstgtcagccrctcttctcttgagggtcagcctaggcagggagctggctctgctgtcccctctgccactctcaccttccatgggcctttgggagcaggagccctgtgccctatgcagtgggagtctaaggcataatgatgcatctctttcaagcagcgtggccctgtgtgtagagcaggtgaattacatgtggctcagccacagaaatggcagtccagaagcactgtgggaaagctggctgtgctcaacttcctgggttctgagggtaattctcactctgcgtagtccttccttatccccggtaatagacccatggggagcataggtcctctctaaatggagcaggccaggagctccctgacacccagatgctccgaccccaccccctaccacccacggcctcccgcctcaggaagtctctaagtcgtggatagctttatgggtccttaatatctggcaggcagaatgaatgggcagagaatccaaaatggaaaaacaaaaagttttaacctttgctcattcatttatagctcaaaatagagatctttccaactttgtaatccagtgggagaggtgggatgcagtttatagatacttgatttctgtgccaagttcactggccacacaactcatatgtaaactgtggcatagatgtagcatttagaagctttttattactattattatcttttgagaaaatatgagcaaggaagagaaaacccacacttcttacagttcctggatctgaatctgtttgcttttctgtgtttacagaaattatgattttaaaccaagaagaaaaaatggagattccaataccaggaaagagcaaaactctgacctctgactccagctcgtcctgcatctcagcagctgtccccgtgcctccctgcccctcctcggaaacctccgagtcactgctcagcaaggaccccgtggaaagcccggccaaaaagcaacccaaaaatagagtcaaattggcagccaacttttccttagcacctataaccaagctttaactcccatttggaatatagaattaggatgggaaaacactgtctgattctgcacacaaaagtgggtttcaaaaatacatccttttctgtgtcatgaaaaccccccgaagccattgacttcatcttacctgtgttctatcatgtttttcttttccattgaacacagctttgagctgaagtctttcttttcttcttcctttttctttcttttttcaattatttgaagaacttgtggcatttgttaaagaatccttaatatattttaccaaatttttagtaactattatgaaatacaatggtgttccaaaagaagaaagcactaaaaactcaactagcaggaagcggttttgcttccattgagccacgtcggtggtgtcatcctacatgtagcataatagagtctctcagcctttgcttactggtgtttccgacagtattaacccagtgcgtggcatgtctttgaagcaaagcctgtcccgctagcctgtgtgttcacacaccaaaggagaagggtaggcgaggggttcggagtgtattttcaggttggaatgtgaaggttcctggcttccatgtgacttgtaagtgtgccttgttttttatttaaactatgtctgtagttgacaaaagtggcttcatcacaaatttttttaaacgtttctactttggggttccatttaggagctttctagaaagttgaggatgtttgaagcttcccttctgtgttccagtttgatatgggttaggttaaggaaaaggagatggtctcgatgtcatggatttaaagtcagcatttggattacaacacacattattgtgtgtcgagaggcagcaytggaaagagcctgattttctaaaatatgcatcaagtgcataaattacaaatcagagctgagtggggaggtgcttcagcagcagcgggatcaatacgatttccactgggaagagacaggaattctacctacacataggaaggccaaggttgatccacttaaccttgttattgtaattttaaagctggtatcggtagctgggaagctttatgtgtgtgtatgtcagctcagcatcttttaatcgtgtctgattttactctcgttacttctcgctgttggaagcatctctgggtttcttgtggcgtctggtgtggaatggccttcctctctaggtgcctgaggtgtccgctgacgggtggcctctcacccccctctagagaaacctgacatttacaatggattgtatttgtccggcaaaaaaggcggattcattcatagagcagaaagaacctgttggcgtaaggtcttccactagttagatggtttcttttggggaaatgtttatatttggtaacttctagaaagccagaaaatggactctgatttcatagcattttgataaaatgccacaaaataagggctatagagagatttttacaagtcagattttttgttccccaaatcttttaaatkaagccagtgactcccagttctcaacacatggccccagtcaagacagaacaccatggaaaaaaccctgtaagtattatggcactctccgaatcctcctgaaggcatttcctctacagacatagtgttacaggaagtgaaatgcaaatgtgcaattttttttaaaggagcttttaaacaaagtaataataattggtgttgagaacatcagttgccttattctaagatttcataaggctgagtttgcacgcttggacttcagttctgctagcatgtaaagagtggtggactttaaaaccgtaagaggtatcattacaagtcacctggaacagactcaaagaacaggttctttgggcaacagacaaagaagaatcaagttctgtgctgtcccgtgagtgtgtctgagtaccattcactggagttgctgcttaggtctgggacgtgtgtgtgactcttaacaattgctgtctgaaaatgagagagaagacttcggaagcacattgtgttcataatgtactccacaatggccagtccaattgctatctatttttttatccagaggcttaattaaatgatgtggtaaaatgatgtttgagcattaagacaatgtaattctttatttctgggtggaaagatataccggattaaatttatctgtttaaaaaaatgacaaaagttatcaccaaaaccccctttcccatcttgcactgtttgttttggattgggtttgggggaaagagatgtttttcttagttgtctactttgtttgaacacttttgttgtggttcaagtgctgttttgtgtgttgggaccaaacagttgtcaataaactttacaagcgagcatctattttgagtttcccaagtgagtggttttgtctgtctgtctgtctgtggggaggaattacaaaccaatacagttctgccatctttcattttgggtctcctcaacttctctccccttctggaaatagaattgtgaggtggagagtaaatccgtctacatcttagaggccttttaaactcagcacacgccgaagcaggtggctggatggtgggcccttcgtcgtcaggatcctccaagttttccagcctttgttccagcttataattacatgtgggaaaatacagtaaccacaaaaaccttccagttagaaaactctattaattcctaggctctctcttcttgtgaaagaaatccagcgtgcccgctgtctcgtttttggtcactgctaagcatgctttttgaataagccaatttggaaaagagttattccacagatacagttgtgaagccctcccatcccctgagaccgccattaccccgtcacccctgccaccagcaccctctggcaagaatttaaaaggacccagaagagacttgagtaaattgcttcttgatgacatttttttcaagttcagcaatgttaaaagctgctaaagacctttccaaacatttcacgatggcaaatttgtgcagaaaaagttgagtagccatcgtgccccttttgagcggcgtcaggaggtcttgttaggtgtggactggggctggaacggtggctttgcatttatctttgtttgtttcccacctaggaaggtgattcagaggtgggggcctagaagacagctgtctgggggagagcagacctgtccgtagcagagggggctgcgctgattgaagaagatctgttccctctctgttccctttgccagaaggagcgttgcgctttgggattcaccttcactttctagctgcttccatgggcagagggtgagtcatggcgcagaagccctcagcggcctccacccacctgctgtccccattgctgggggggggggcggtgggcggcaaaacttcctcaattctcctagtgtccctggctgggccttaaactgacaaagacattaataggaaaaaagcaaacaaattttacttcataccagttttgcgagagtcttcataaggaaatgaagaccccagagaaatggctaagcctgagtggttttttgttttgttttttggttttttgagacagtctcactctgtcacccaggctggagtgcagtggcataatctcagctcactgcaacctccacctcccaggttcaagcgattgtcctgtctcagcctcccgagtagctgggattacatatgtgcaccatcacactggcaaatttttgtatttttagtagagatgaggtttcaccatgttggccaggctagttttgaactcctgagctcaagtgatcctctgggctcagcctcccaaagtgctggaattacaggcatgagccaccacgcctggctgagaacgcttttttttggggggggggggggcggggggaaaagggctagagagcttagaaggtgccaagccagagcaccaagagccagaactttccttagcaagatgaagagaagaatacacacgttccgggaaggaacgccttggaagtgggggagctgaggtgcagaggaagaaggcattgcagggtggaaggggccgttcttagagggaaatcctgctcagtggctgggctgctcagctcctcactccgcacgaggtggtgaaccaaccaggagcatccgcaggggagcagtaccagggccagcagggaacatattgggcctgcttggcaccgtctcttccatccgcctcaggcagctcatgtgatggcctccaaaggcttcccaggtgcagggcctgggcatgagggaacccccgctcctaccacccacctgcccccactgcagtttctggtatcagcaagtgcagacaaatccacactggggctgcagggtcgccgcccttggtatttcagcagccagagtctgatgcatcaagggcaggtgtggcaagaatcaggaaatacattttttttttttttgagacagagtctcactctatcgcccagactggggtgcagtggcacgatctcggctcactgcaacctcctaccgggttcaagcgattctcatgcctcagcctccgaacagctgggattacagatgctgccaccacacctggctaattttttttgagacggggttttgccatgttgctctggctcgtctcaaactcctggcctcaagtggttcacttgcctcggcctcccaaagtgcggggattacaggcgtaatataatatagatattatatatagatatagatatagatgtctctataatatctatatataaatagatatatctattatatataatagagatatatatctatatataatatatagatatctatatattatatatagatatatatctatatattatgtatagatataatatagtcacacagtcaaccatgcccggaacccccaagcccccactttttttttccgagatggagtctcactctgttgcccaggctggagtgcaatggtgcgatctcggctctttgcaacctccgcctcctggtttcaaccgattctcctgccttagccttccgggtagctgggattacaagcatgtgccaccacacttgctaatttttgtatttttagtagacatggggtttcaccctgttttttaaattctctaaaaggaagaggacactttttttgttgttgttgttgttgtgttgtgttgtgtgtgtgtgtgtgtgtgtgtgtgtgtgtgtgtgtgtgttttgagacaaagtcttgctgtgtctccagactggagtgcagtggcgcaatctcggctcactgcaacctctgcctcccaggttcaagcgattctcctgcctcagcctcccaagtagctgggaccacaggcgcccaccaccatgcccaggtaatttttttgtatttttagtacagatgggttttcaccatgttagccaggatggtctcaatctcctgatctcgtgatttgcccgcctcggcctcccaaagtgctgggattacaggcgtgagccaccgtgtccagccctgtttgcttttaaatgggagagacctgtttaaatccctccgatgggaagagaaagaacaattggggctacagtggtggggagggagggagatgaatgatgactctgtcactaacaacccctgggaccgtgggcagtggatttactgccacttcctcatctgtaaagtgagaagtgataacaggatctgactcactgtttcaagtgtttattctgcctccgcttgcaacctcttgcaacctccgcttgaaaagggtaatggatttactgctacttcctcatctgtaaagtgagaagtaataacaggatctgactcatcaggctgatgtgaggagggaaccagccagtgtgagcacattgctcaaggcatagagataagctacaataaatgttattcccattatcaacctcctccatggcttctaaaaggagcaagtctaggtgtgcaggaccccacagtctgcaaggtttcccagcttggaaggtggccctggtaatctggaagcgtctgtgacagcttaaataaattggattttttaatgttttctttttttaaaaaaatcagtaggaattacaggaacatacagtaggtgtacccagagcttagcggaagtaccagaggcaggattttgatgagggtttgatctcctctggttcgttggatctgtgagtgactgctgtataactggcctgaggtcagacctcgctgacccccccactcccctctcccctttttttttgagatggagtctcgctctgtcgcccaggctggagtgcagtggcacaatctctgctcaccgcaagctctgctcactgcaagctccgcctcccgggttcacgccattttcctgcctcagcctcctgagtagctgggactacaggcgtccaccaccacgcccggctaattttttgtatttgtagtagagatggggtttcaccgtgttagccaggatggtctcgatctcctgaactcgtgatccgcccgcctcggcctcccaaagtgctgggattacaggcttgagccaccacgcccggaccccccaagcccccccttttttttttccgagatggagtctcactctgttgcccaggctggagtgcaatggtgcgatctcggctctttgcaacctccgcctcctggtttcaaccgattctcctgccttagcctcccgagtagctgggattacaagcatgtgccaccacacttgctaatttttgtatttttagtagacatggggtttcaccatgttagccaagttggtcatgagctcctgacctcaagtgagcctcccacctcggcctcccaaagtgctgggattacaggcatgatccacagtgcccagccttgacccacattttttatggggaaaagagggcggtgggccctttgcagcctgagttttcactgcacgttggagcgggaggggtctgtggtgggtggaattgggtcctccccaaatgcatgtctacgtggagcctcagaatgtgaccttggttggaaagagggtttttgcagaagtaattaaggaaagggtccaaatgagatcatactgcattcgggtggccctcactccaatgactggtgtctttttaagatgagagggtgcacagaggcacatatacagcggaggcggccacgtggagacagaggtgaagactggagtggtgcagccagggaactgccaaggtgccaggagccaccaggagctgcaagaggcaaaagaagattcttccccacagagggagcagagcaccgcagacaggttgatttcaggcttctggcctttaggactgtgaaaggagacggttccactgttttaagtcacccagtagaaggtcattcattatggcatccccagtacacgaagagtctggcttcatgattggtctaggttggtgaaggaggacacggggtcctctgaggccattgtggtggcactgagtagcccaagggacccttttcagcatcagaatggtgggaagtggtgtgcagaccaaagccgcgaacacgcagagtgggaggactggggtctagcagcctgctgggagggcctgtccaaccaaagaccttttgatctacaaatttttttttttttttcgagacgaagtctcgctgtgtcacccaggctggagtgcagtggcgcaatctcagctcagtgtaacctctgcttcccatgttcaagagattctcctgcctcagcttcttgagtagctgggattacaggcacaagtcaccacacccagctaatttttgtattttttggtagagatggggtttctctgtattggccaggctggtcgcgaactcctggcctcaagtgatcagcctgcctctgcctcccgacgtgctgggattacagatgcgagccaccgcacccagccaatttacaaatattttgaaaatgctacttatgaatggcccaataattttacttctaggagtttatcttaaggaaaaaataaaaaattcagatgaaaccttatccccctagatgtttatcaagacactattttttttttccagggggtgcgatcttgctctgttgcccaggctggaatacagtggtgtgatcatggctcactgcagctggaacctcccaggctccagcaatcctcccacctcccaagtagctgggatcacaggcccgcgccaccgcatatgcccagctatttgtatttttagtagagacagggttttgccatgttgcccaggctggtctcgaactcctggactcaagcaatcctcccgcctcagcgcctggcccaagacactttttttgtttttttttgagatggagtcttgctctgtcacccaggctggagtgcaatggcacgatctcggctcaccgcaacgtctgcctcctgggttcaagtgattctcctgccttagcctcccaagtagctgggattacaggcacccattaccatg

SEQ ID NO: 8875 - DNA, 161065 bp, Homo sapiens
aggtgcttgggccgggtgtggtggctcacgcctgtaatcccagcactttgggagtctgaggtgggtgaatcacgaggtcaggagttcaataccaacctggccaagatggtgaaaccctgtctctactaaaaatacaaaaaaattagccaggcgtggtggcaggcacctgcaatcccagctattcaggaagctgaggcagagaattgcttgaaaccaagaggtggaggttgcagtgagctgagatcatgccactgcactccagcctgggtgacagagtgagacttcatctcaaaacaaaacaaaacaaacaaaaagaaagcagaaggtgctaatgtgccatatggctttcaactgcacttgacacaatattttgtaaattcttcaaaaatgagttagctgattttcaagcaatgtttaagtctgcagcagtagctcatctgcaactgataaaactcacatttgagaagtggtttgaggggcaacagcaagttaaaattataacaaagtccaagtcaaggccatagccctaacgttctttgaaataacctgccagttgattaaggtaactcttgtgaaattgttttttgagagtggatgaaatggcaagtgtagtaaatagaaactagactgtggcccaagaagttcaaaagcactggaataaaattctgaaactaaggaagggttcctaaaactcgtgggtatagctaaagtcatgggtttagctttgaaaatgtctctattttgaaatggcatcagataaaatgctatcttttgttatacttttcataatgttatacttttgagacttctatcagtccatagtattttataaaaacaaaattaaatttagacttataatagtctttgggatggtacattgaagtggaaaagaagtagctggggaaagatgcttactgcagaaggagggcatactttctgatactgcatgagggatgtcatcgggtgaagttaagaacgacaaaatatagtggactggaaacctattctcaggagaactgtagccatgaaaagtactgttattcattcctgacctcctggaaccaggccctaactcatcttctcagcaaaattgcacatttgctatggacctactgggtagtaccttctttgtttcccttttctgaatgtgagggttaattcaggttttatttttctgttccaccatgaaatgtcgtgagtgacgaggactctattgggctctcagtgaacagaagtgtcatgagactgtcatgagatccttgcttgcaactgaaagttatgtttgggcttttttttttaaaaaaaaatgttagaggaagtggaggtgaatattttgtgtgggcaaaagaggaacaaattatttctgatggaagctgcgctgtcacatattgtaatatttcgagacagggtctcgctcagtcacccaggctggagtgcagtggtgcgatctcagctcactgcaacctccacctcctggactcaggtgatcctcttctctcagcctcccaagtagctgggactacaggtgcacaccagcatacctagctaatttttggatttttttgtagagatggggtttcgccatgttgcccagactgggagaaacatattttaaggtataattagcatgttgtgttgttaaaatctcagtgataaacttgcatattagcaacagagctcttgtttccacattatacaatttcagtttattttcttgtatcattccaatgctttccctgaacttaaaataaaagggatcctccacatattggtggaacacattctttgcatctgttatttttctattctttttttgccacacaaatctgagaatgtcacctcgatttttggatccttcaagttcttcaatggaagaaatgtaagtccataaattgggttaaatggtttctagtggagtgtgtaatgataaaaaattatttttaaaatgtagttttggctgggctctgtggctcatgcctgtattcctagcactttgggaggctgaggtggacagattgagcccagaagtttgagaccggcctaggcaacattataaaaccccatctctactaaaaacacaaaaactgaggtgagaggatcacttgagcctggggaggtggaggctgcatgagccgtgattgcaccaccacactgcagcctgggcaagagagcaagatcccatctcaaaaaaaaattatattacagttgaaaaatcatagaatacaatgtttaatatgataactcaaatatgcattgttagagcctttgaaaaatgcaattttattaaattatttaatatttattgtctgataaatttaatttttatagtgcatgtgtaaaaatattatagacaatttgaacagtatttcagaagcactttcaacaattatattgtgtaaagtgtcctatgtatgcatgaataaaggacatgtataaagtatttagcatgaggaaaattgagtctttctcaacctaggcatcataagtttcaggagtaaacattcagtatttttttttgtattttttaaaaccagaacatttattgcatgactaatcatagacattcttaagatgaactggatgctgcaacagctgccctcttgggtttaagtattgttccttcatagaatccatgcctgaatctgtggtatacaatttttaggtgcctcattccaccagttccggtggtattttgtcttttagccttggcactccagttatactttctcttgcgcttggcagcgtagccacatttgccacaggtcgacttctgaaggtggtaggccttagagccacggcggcaacacaacgtgtgcgtcttattgcgacgctttccaaacaatgacgttcccttcgtcatctggcttctgcggccaagaccagagagaccggaagagaaggcacttccgctatatcacgctcagaagctcaacattccgtgttgaattagagtctgagccgagatggcattactgcactactgcttgggtgaccggagccagacactgcctcaaaaaaaaaaattctcccaggctcaagcaatttccaacctcagccttccaactagcttggactactggtgcacaccattacccttggctaatttttgtattttttgtagagatagagttttgtaatgttgcccaggttgctcttgaactcctgggttcaagcaatctgcccacctcagcctctctcaatgtgctgggattacaggcgtgagccactgcaccctgccttgttcctttacttgcttagtaaacttgctttcactttacagtgtgaactcacccctaattctttcttgcatgagatccaagaaccctcccttttggttgtaactgcccaacaggttctccttccctgctgcctagacagagctgattcatcaagacaggggaattgcaagagagagtttaattcatgtggagctggctgtacaggaacctgaaatttttttattactcacatgagtctccctgaaaactcggggatcagggtttttaaggataatttgataggtaggtgtcagtgagtcgggagtgctgattggttgggtaggagacgaaatcatagagatctgaagctgtcattttgcactgagtcagttcctgggtggggtcacaagaccagatgagccagtttatggatctgggttggtgtcaggtgatccatcaagtgcagggaatgcaaaatatctcaagcactgatcttaggttttataatagtaatgttatccccaggaacaatctgggaagggtgagaatcttgtagcctccagctacatgactcctaaaccatcatctctcaccttgtgcctaatttgttagtcttacaaaggcagtctagtccccaagcaggaagggggtttgttttgggaaagggctgttaatgtctttgtttcaaactataaactaagttccttccaaagttagttcagcctatgcccaggaatgaacaagagcagcttggaggttaaaagcaagatggagttgattaggtcagatctctttcactgtaataattttctcagttataattgtgcaatggaagtttcaggttctggatcaggacccctttctggtaacacaaggatggttatgaatgcatccagatatccaaaaagttatctctgaaagccagagatttcctttccctatgggttcttcccttgcatgtcaacccaaggattcactggggacctagaattgtgcagggcagttaggaagagagagacaaaagagagaagaggtgaagtagttttgaagaagagaaagaaggtcccatgcagcctcagttttttttccaacaaacttttcatgctgggaaataggatcctggtttatttgtgggagggattttataggagggtgagaaaaaaatgccctttgagggtagagtctgtggagccctaattggggaaaaggagtcagcctgaaaggaccaggagaaagcaaagagataaagcaaataagctataaatctttcttcatggtccagaacatataaaaaaaaatagaggaagcagataagctgtaggtctctttttctttatggccaaggacatatggcctttctgtggaaagaacgtaaataagtcacaaactttctgctttcatttatcatcaaacgcctcagctaacagaagaatgcaagttagctccctgctaccttggcctcccaaagtgtggggattataggcgttagccactgcacccaaccaaatctcctcttctcatggctcactgcagccttcacctcctgggctcaaatgatcctccttccttacccttccgagttgctgggcccacacgtgcaggccaccatgtccagataatttaattttttgtagagaggtctggctatgttgcccaggatgatctcaaatccctggcctcaagcaattctgacacctcagcttcccaagtagctgggactacaagagtgcattaccaagcctggctactttttgtatttcttgtagagatgggggtctcacgatgctgtccaggctggttttgaactcttgagctcaagtgacctgcccacctgggcctccaaaactgctggcccatctcaaaagacttaatccatttcagtatcaactctcaaaagtcttaatccattcctgtatcagctcttagggcagaataccccctaaatattatctgaaccacacatgggtgagaatcaaggtgtgattcatcctgaggcaaaatttctgcccagctgtgaatctgtgaggccagagaagttatctgcttccaaaatataatggtgataaaggcataggatacatcccccagccctggtaaccacccttctaatctgttactgtaaatttgacgtttgtactttgcacgtgtaaaagcacaggcagtatttgtctttctgtgtctagcatatttcgcttggcataatgtcttccgggttcctggatccagccacggctccacatcaaatccccagcgagatcctagttccctgactattgagtagcttcagcatcatcggcaagagtggatggagtccaccaagcttgtaaaaatcggttttgacttagttcaacttgttaagaaatcatcttagtttctaatataagtggaccacaactttaagctttaaccttaaattttgaaacattaacttaaaataggcaggcagcaacgctgcttcacaggacaagaagtagtcagaaaaccaaagacatgctgcctgtgaaccagagtaaataacaggctctatttcggccccgcttaccccatgaaaccccgccccatcctccgccgcggctccgtcccgccccacctagccacgcccactgccgctccggcccggctccaccctctcagggtccctccccgagtcaggcccctctttccgacccgccccttgctggtcgcggctcgcccaggccccgccccctggcctcccagttttttctctccgctagcagtttccgtcactcccggaagcagattgcgccagggaaaggccttatcgctgtgtgtgtgtttcagtctacgtggattaaacattacttcgctccgtctgcctggattaaacgtgcactttgcagtcctcacttctccgtaccagtgatctggggatcgctacggaccttaaaatacccatagccccttcgcccctgcaacaggcacttctccccacgtaagtccgagaattgcttccctgtcggtttaaaatctctctcaggctgttccttgccccctgcctttctgccatgtagataaccatgtcgataaccccattcaggtcgtgttcctgcttaaaactctcattgacccctgcttcggccccgggcgaagtcaagtcctccctcgcgaggtggattcccaccagtcgagacccccgagcttcgcccttgtcgacgcctggaggggagcgcccgctgcccagctcctgaaggagccgcttcttctcccaggtcctgggattctgcagaccctccctgtcctgagacaccgtcccccgcgccacctagtgtcctccgcgcgccacctagtgtcctcctcacgccgggtccttcccctccccaggctgccccttcacagccactgcttttcctgactccgcgttgcaggaggtcacccgagtctgtcttgtgacacccactgtcgttccttcccaaatttttactccactggaaaatgtgctcttccgggaggtgggcatcgtattcctcccctttcctcctgaatgtgtgggtgagagggatcaggagaggaaaagagggggagcgacgggacagaaagaaaaactggggagaaaagaatgagtacacggcaaaatggatgataatttaggtactggcaaagagagcaagagtgcaagaggacgcatggagaaagtagcacggggagaaaagcacataaagaaattagggaaaagggagagcttcagggagctgaagggcagcaaaatagagaggggcggcaaaggaggaggcactgcagtcagacgcggggggcggaaaaggtaagagtcggagccgcggctgacagagccacgtggtgctgggactgaaggagaggggagtgggtaacaaaggagagtagagggagaaccacagcaaggaggaagcctaggaagttgggggtgctagagagtgggaacaaaggagatgtaacagggaaaagggaatttaacagggaagagggattttaacagggagagcagacagggagctcagatgggggaaaagaggcaggaatacgtggcggctggggacaatgggaaagtttggggagaaagagcaacaagaggtgaaataaatttcgaagcattgggcagaatagacataaaagagggaataaagaaaggggagaaaaacagcaaagggaaaaaagacgtgcagaatgagagcgggaaacacatagtagtgaagagagtgggcgaggaccccacccagatgagctgtgagttgattggatatggatggtggttttaatgtattgatttgtgactttatactctaatttaaaatttgtttctttaaattgtactcatgaggatgaaaattaccactcttttctacaaggcttgtgcattttgtatttgtttatatcaaaagatatttggaatccctatttagccacagggcagtgacttgattcagtcattttgtaactcttctttccagggagggagtagaggatggaggaggagagaaataggcaagaaatgactgactgtcactacaagatgtatctttggttttttgtttgttttttctctttttgagacagggtctctgtcgcccaggctggagtgcggtaaaattatatcggctcactgcagcctctcagctgcactccatcctcctcagcccctgaaggtgctgggattacatgtgtgaaccacctctacaggcctacaatgtatgtctttgaaggagagttgagagtgttggttttttgttttgttaatggatttacttttttccttgtagttgctttacagttaattcattgttattttggaagcttgatttaaattttagtttattcagtttcttctataattactaacttctgaaataagatttgatgtcatcctgtaatcagctgatgtcattaatttctcaatattgcctttttttaacttttaccccataatttattagatttttcaaaaactttccaaactgttaaagcgtccagtgcggtaaactcaccacgaagtacattagattcctcagaacttcttcattttataactgagaatttgtaccctttgaccaacatttctccactttccccacccagcatcctgtggtaacaactgttccgccttattactatgaattggacttttttagattctacttgtgagaacatacagtagttgtctttgtgtgtcagtcttatatcgcccagcataatgtcctccagattcatccatgttgttggaaatagcaggattttatttatttttatttttattttttatttttgagacagagtctcgctcgctctgtcgcccaggctagagtgcagtggtgtgatctcggctcactgcaagctccgcctcccgggttcacaccattctcctgcctcagcctcttgagtagctgggactataggcacccgccaccacgcccggctaattttttgtattttttttttagtacagacggggtttcactgtgttagccaggatggtctcaatctcctgacctcatgatccacccgcctcggcctcccaaagtgctgggattacaggcgtgagccactgtgcccggcaggattttcttttttatggttgaataatattccattatataaatatacacacacacactctgtatatatatatatatatatatacacatacataaatatatatacacacacattttctttacatattcattcctggatgggcactttggttgtttctatatcttggccgttgtgaataatactgcagtgatcatgagggggcagaagttcctaagttttttgttttttgtttttttaagtagagacatggtcccgctgttttgtccaagctggtctctaactcctggtctcaagcgatcttcccatctcagcttctcagagtgctgggattataggcatgaactaccacacctggcctagatgtctcttaaacatactgattggattgcctttggatttatacccagaaatgagattgctggattgcattgttgttctattttgaatattttgaagaacatccatagtgtttttcataatggctgtactgatgtgcactcccagcagcagtgtacaagggctcatttttctccatatcattgctaacacctctcttgcctatttgataatagccttcctaagaggtatgaggtgacagcttatggtggttttgatttgtatatccctgatgattagcgatcttgagtaccttttcatatacctgttggtcatttgtatgtttttttttgagacagagtctcactcttgttgcccaggctggagtgcaatggcgtgatctcagctcactgcgacctcatcctccgaagcacctgagattacaggcacctgccactatgcctggctaatttttgtattttagtagagacgggggtttcaccatgttggtcaggctggtcttgaactcctgaccacaggtgatctgcccgcctcggcttcccaaagtgctaggattacaagcgtgagccaccgtgcctggcatttgtatgtcttatttgcaaaatgttcaggtcctttgccccctgtcccccccccgctttttttttttttgagacaaagtcttactctgctgcctagactggagtgcaggggcgccatctcggctcactacaacatctgcctcctgggttctagcgagtctcatgcctcagcctcacaagtagctgagattacaggcatgtcccaccatgcccagctaattttttgtgtttttagtagagatggggtttcactgtgttggccaggctgatcttgaactcctggcctcaagagatctgcctgcctcggcctctcaacatgctaggattacaggcatgagccactgtgcccggcccaacatcaaagaactttaaaaggcattcccttcctgacttaaggaacaacttctcattgtccaggccttcttgttgtacagccaacaaaatactgcaaatctccaaaatattcttcaggatgtttattgaggaaaattttattgaaaggagccacacaatccaaagctgtattgttcaagggtcagctgaattgaggagcaagtcctaagctgagcccacggggagagtgggcagctggagtggtggtgcattggtcctgagggcgtggaacccagagctgcagcacagcaggcactctcgatagtgacttctgtggggtccatcactttgggggctacatttgttattttggagtattttgggcggcaagttaagatggttatagatgcattttggactatctaaatgtcaatatggagagtttccttggaagatgttgggtctcactggggtatgtgcatcattggagacatctgttttagtagatggtggtgccagtgttcaagggtggggtcattatgaatggaatcgagtgtcttgggtcattgagtcctcaggtatctttgtgtgtattaggtcagcaggagtttatgagttgttggggcatgtgggatttcgtagcacgatatggggagcactatggagtatctgggaagggtgtggaccccaaggaagtttgtaaacctgtctcagtttaggaggggaacgttagggcctcaaactctagtgacaaaaggctttcgttagggagggttttctgtggtgggtctatggcaggatggtggcttagggaagatttttcaaagaatcagagaatatgatatcacaacgacctgcagcacaaagatttcaactgggactgtcctcggaagatacagctgttactttctcgctgccaggacagtggtgattactttccccccacctctgtctgctgcaacaatcacagggagctacgaggcaaaatgctttaaactcagtgtggaacagggatattttctccaggcaagagggtccactaggtgctggggaggcagtttggggagaggatgggtaatgctctttggagaatgacaggcctagtaattgcagggtgtaaaggaaaaaacaaattttttcctttctactctcacacttaacacagaactcttctgtggccagtgttggggagttttctcctacacactaaaaaattctccagcagacaccagctagattgccttataattcaatttaattctggcactgtctacctggagttagagtcatctcccacaggttgcccacaggtaaagggctcagtctcacaagacctccccggctcacttcagctaccatttcgaaagtagtaggttgtcacctatacttctgacctactgactccaaattggcattcctactaccccagccaaaggtttgattaatttgctaggatggctcaccgaacttagagaaacacatttaccagtttcttattgttgaaggacaaaatcacaacaaattcgatccttttgtagttaataaatgtgatgattgggttttcacactcatgtgagatgtgcttccctcaaaccttgttacgatgtcgtgataaggagggaaattattacaaattcattttttaactcctgttcttgttttcttttttggaattttcttttttcctaaacgtgacttatttcaagggtcagtttgctaatgtggcgtttagcatgagagacttcattctggcttggtctggtagtgcgggaggctcgtacaaaacaacggcctttccataaaaatgaacaaaataatgcgcttggccaggacatgggtggagctggaggcgattatccttggcaaactaacacagggacagaaaaccaaatactgcgtattctcactcataagtgggaggtaaatgatgagaaaacatggatacgtagagggcaacaacacacactggggcctacctcagggtggagggtgggaggagggagaggatcaggaaaaataactaatagacattaggcttaatacccgggtgatggggccagacgtggtggctcacacctgtaatcctagcactttgagaggccgaggcgggcggatcacctgaggtctggagttcgcaaccagcctgaccaatacagtgaaaccccggctcttctaaaaatacaaaatgagccaggtgtggtggcacatgcctgtagtcccagcaggaggctgaggcaggagaattgcttgaacccgggaggcggaggttgcagtgagccgagatcgtgccattgcactccagcctaggcgacagagcgagactctgtctcacacacacacacaaaaacccaggtgatgaaataatgtatacaacaaacccccatgacccgtttacctgtgaaccaggctgcacctcctgcacgtgtacccctgaacttaaaatataagttaaaaagagaaaaaaaattggcctattataaagtgtaacaactgcaacgtctatttttacctctagggaattattttaaacattgtttactgatggtggtattgcccattaaatgcatgcacacacacagaccctaaagcttatcgtttccttccactctgccctaattgaaacaaaacatactactaactacatttctgcccgtatgagtacccctcttctgtgctgaaatcttatttatactctccgtcttcacttcttgcctcccattccctcttgaatgcatccagtcaaacttgcatatccaccattccactgataactttatttttcagagtcaccagtgacctccccatttctaaatccaatgtatttcttttcctgctttagtctttcttttcctgtcaggagctttctgtttaattttcttgtcacctccctgaccattttcctctgctgctgtgtccggacttcgaatgtttctcaatgtgggaaagactcatggcttagtccttgaacctcttcttatctctgtccacacctactgtctttcctcatcatctcatctcatggctttaaaccccactgtattagtccattctggaattgctacaacaaaattccagagaccgagtaatttataaagaaaacaggtttaattggctcacagttctgcaggctgcacaggaagcatggcaacatctgcttctggggagcctgtaggaagattccaaacatggtagcaggcgaagtaggaacaggcgtctcacgtggcgggagcaggagcaagagagagtgaggggggaggcgctacacacttctaaacaaccagatgtcgtgagaactcactgtgataaagaacagcaccaaggggtggtgcgaaaccattcatcacaaatccacccccatgatccatccacctcccaccaggccccaccagtaacggtggggattacaattcagtgtgagatttgggccagggacacagagctgatccatatcacccacctactcacctacacgtctccatgtcccctgcaggcctgtcccctgaactctagaattctgtgtcctgttgtctcctctgttgtctgttcagccgtctaagagacgtctccacctttatgtgtctaaagtgacttcctaaactccctaagtacattcccctgcgctcctgcacatctcagatgacggtggccctatacttcctggctctagctttacatgtcaggatatatttgaaatagagaagatatgacattatatagaagggttttaattcaaatgataaagaaaagttacatttacctaaaatggtagggaaatgcatagtttctaaaagtgctgtgagctgtgggagaaaaatgtttgaagacctcgtccctacctgatctgctgcctcgggacctctctgacctcatttcctacctgtgtcctcctcactccctctgctccagccacacaggcctctttcctattcctggagccgagggtgtctacctgggctgtccctgtgcctagaactctctggcccctcagttgcaggtaatctggcaagatttcccccatcccgagctgcaaaggtgccctctcccaccagcatcacatgagacttcccactcatttaaacaaaacttactactatgttgtttttacattttgaggatctggggaaaatggcaacccaaagaaaagtaactttgaaacaaccaacatgcttttagtttcctgattttgctccattcagcccctttcagcttatgaagccaacctcctccccttagctcacagaacactcctttcattttaagaatgaggtgttgtctgattctaggattgcaaataaaagccaataaaggcaggtccatattttctgctctgtgtgtttctttctggccctttgccttccactttctacagactggtgacagcaaggccccaaggggaggtcagagctgggagactggggctgtggtagtcttgccccctttgagactactcaaccctcgcttcacactagagtgccaaggcatttgtaacacatggttcattcccccttatagagattctccttccagtagttagggtggggcccagcctccgtaatgttttaggtacccaagttgattttttttttttttttttttttttttggtgacagagtctctgtcgcccaggctggagtgcagtggcttgatcttggctcactgcaacctccgcctcccaggttcaagtgattctcctgcctcagcctcccaagtaactgggatttaaggggtgtgccaccatgcctggctaatttttgtgtttttggtagagagggtgtttcaccatgttggccaggctggtctcgaattcctgacctcaggtatccacccgcctcgacctcccaaagtgctgggattacaggcatgagccaccgctcccagccccaagttgattctcatttgtatccagcattgagcttccagcctctgtgtcccccatttccgagggcagagctcagcctgtgacccacagaggtgacggggggctgtgcgctgcatggggtttgatcagggataggtccgtgccctgaatgggagctcagtccagcctagctacacactgctgcagcctgtgtgtgggcttctcccagaggggagctaatgctgaagaaaacggtgaaagattcacttggtctttgtgtaggaatttattattcttgcatcccccctggtgcagtgggctgtctctccacaggctgagttcttccctgtgtgcatggttgtgacacagaaaggaatgtgttgtttccaagcattaaacaacagattttttaactttcaggtttgatgtgtgaataattacattgactgagaaagaaacccagaagaggaagaagaggaaggaaaaggagtcagtgatggctactcaggtagagtgatactttactcaagtgaagtgatattcttggtgggtcattctgtctccttcctttgtgaagtacagggcgtcggagttgcaaatcttctctgagtctgaagtgtccttcctgacacatttgctcatgctcatccatgcttttcctcagttcctctcatcttatttagattccatctcaccatgatccagtgacatgaacttgggaagaggctgcactgggcatggtcctgggaagggctcacacccagacatggatggagatggggtgagggtcccgtggtatcagagctgttgggcagcagggattgtttaggggccacatctggatgcactgtcagctttctgtagaccaggaatagagaagctgcatgtggaagtcacatattaatgtgcataaatacctagtaaattatcgaaaggggccaggcgccgtgtctcatgcctgtaatctcagcactttaggaggctgaggtgggcggatcacttgagctcaggagtttgagccaacatggtgaaacctcgtctttactgaaaatacaaaaattagccagtcatggtggcaggggcctgtaatcccagctactcaggaggctgaggcgggagaatagcttgaacccggaggtggaggttgcagtgagccaagatggtgccactgcaccccagcctgggtgacagagcaagacttcatcctcaaaaaaaaaaaaaatatggaaaaggaggcgtgtaaggggagatctttctgcctgattttatactacatttgaagctgtatgaatgagtcactatttctaactgccttaatgacagggaattgaatggaaaactagatacagacattagagcgtgttttattccatcattgatttaaaaatatgaaatcaacctgaatgtcagattctagccatggtcagaatatccatctcacagagactgcggtgttcctgcggggactcttaccagcagttgttttaagttttaaggttataattttgctcagatgtaagagctgaacatttgttatcagagaagatggagccaaattctctcactgcaccaattattattaaatattatatttattttaaacatcacatgatgtatatatttgtttttttggtaaaatttcaagcagagatgcagtttaggcattaagaagttaatacaacacgaggatgataggaaataattttgttttgttttttgctttttgttttgtacggagtctcgctcttgtcacccaggccggactacaatggcgtgatctcgactcactgcaacctctgtctcccgggttcaaccgattttctcttgcctcagcctcccaatagctgggattacaggcgtgcaccaccacgcctggctcatttttgtatttttagtggagatggtggggggtttcatcatgttggccaggctggtctcgaactcctgatctcagatgatccgcctgcctcagcctcccaaagtgctgggattacagtgtgaaccaccacacccagcctgtaaataatgttttattatatatgaaattcatgctaaatgagattttagctgttctggccaaaacagagggaaaaaaaaaaaaagtaactgtgagatgatgggtgtgttaatttgttaaactctaatgacttttttttttactatccataccataataccatgttgtataccttaaatatacacaatgtaatttatcagcaaacaaaaatgggcatcaaggaaacattttagcttttttttttttttttgagacggagtttcgtcttgttgcccaggctggagtgcaatggcgcaatcttggctcactgcagcctccgcctcccaggttcaagcgattcttctgcctaagcctcttgagtagctgggaccacaggcatgcaccaccgtgcctggctaattttgtatttttagtagagacagagtttctctatgttggtcaggctggtctcaaacttccggcctcaggtgatccacccgctttggcctcccaaaatgctgggattacaggcatgagccaccgtgcccagctttagttttacacagaaagaaatttataacctaagaaaaggacatcaaggcatatatattttaaaaatttaactacagaatatgaaatggctcctagaatgcagtaaaggaaaactgagcaaagaatgaaaattattttggtttgatttccacaaaataatgaaacctcctcacagtccaaggaattggaaaatggaaatacgaagggttttcattttccccatagcctcaaaatgtaaacagaacatagtagtaagttttttttttttttttttattgggtgggaaatccacccaatatgtgtcgttggtgtatgaggacaccattgcaccttagggtagtgggaaatcttgccagatccaggaaaataggaaatgcaccatcctaaagaggcaatcactctttcagttacccaacctggaggaacccgggtttcttttccctgtcactttctccatcatccctcatgtttccgtggggagctacagttgtaagttctgtggcaagagtcagtgagaggtgtcaagatgcatttacgtgtcattatgagattttagaaaacaattcttcagtacatgttctgttgtgaaatttcattgtgccagtttttcaaagatacatctttttttgttaataagcagtaatagcttgttttgcatcctctttggaacaatctctaaatgaagacatatggatcttttataatttttcaccatggctgccacaatgctctcttcaccacaggtgtttgagggttccttcaggttggacagtttaaagagtggttgcttctgttaggacgctataccacaaaagcaaaaataaataactgatctttctttggaaggcctggctcgctgtgtgattataaaatactgtgtttttttaagatctaatattttgttgcttacattttatttgcttgaatctttaatttgaatttttctgtatatcttgttgtagattatatttgattataaagttttagattataaataacataataggttcacaagtagattggcaaacccctccattttctttccaaaattattatggttctccttttacacaacacagccacatattatttaaattccacatattggccgggtgtggtggctcacacctgtaatccaggcactttgggaggccaaggtgggtggatcacctgaggtcaggagttcaagaccagcctggccaacatggtgaaaccctgtctctactgaaaatacaaatattagccggacatgatggtgcacgtctttaatcttagctacctgggaggccgaggcaggagaatcccttgaacttgggaggtggaggttgcagtgagctgagatcgtgccactgcactcctgcctgggtgacagtgagactctgtcttctaaaaaaaaaaaaaattcccacatattttgtttgtgttttcatggctctgaattttttcagttgcaggcctttatgtcaccatgtcttccaaaaagaatcgagtttgtcagtctttgataatatctttattatgtctttcattaaagcttgtttgcttatgtaaagttcagtaatgttagatatattcacattatttgttggactcccagaatgcatatgttcttggtgcttgatggtttttcatgggcccattagactctcttcattttctttattttatttaattatttattatttattttttgagatggagtctcgctctgtcgcccaggctggagtgcagtggcatgatctcgactcactgcaacctctgcctcctgggttcgggcaattgtcctgcctcagtctccctgagtagctgggactacaggcacgtgccaccacacctggctaatttttgtatttttagtagagacggggtttcaccgtgttggccaggctggtcttaaactcctgacctcaggtgatctgcctaccttcgcattttctttatttttggagacagagtcacactctattgccgaggctggagtgcaggggtgggatctcagctcactgcaacctctgcctcctgttcaagcaattctcatgcctcagcctcagattacaggcatgtgccaccatgcctggctaatttttgtatttttagtagagatggggtttcataatgttggccaggctggtctcgaattcctgctctgaagtgatcttcctgcctggcgttctgaaagtcctgggattacagttgtgagcaatcatgcccggcccacatttctttttaattcttcaaagccaagatgtaaattgccatttctttcatgtaggtttgtacagattcagttggtttctttttgtagaccgtatttccctgtttctttgtatgttttattgtcttcttttgtgacttcagcatttgaaaaaatcagctgcctgcccagatttggtggctgctttgttcagggaggacattccaatcaactaccctagattctggagacttcccatgctttttctctgggcctttgcttgtcatctccctattgaagaggtttgctgctttctactcagaagctcccctattttctgtactattgtggatagactctggtactgcagatatctgtggtactagatcttcaccctcatgtctttctgtgttattgcagacaccggtttacgtcagttatctttttgctcagtggcccctaacctttcatcctgttcctttcagtgctaccacaggaggtcaccactaaggcaattctcagcctagccatggaggcagggacaccttagagagtgcttattagggcaaggtcaaggggagccctggaagcaggaccacgcctgagaccccagaactgtagagtcaccagtatgtgatcccagctcgggaaaccacagcctgtgagaagttccatgtgggtgatcccaacaaaactaatggggcagggatccccaggacactggggacctaactcctactccaggatgtctagaaggtgggacatagagtcaaagaagattattgtcaagccttaagatttaatatgtgtgccctatttgagtttcagacttaacatgggagtggctacctcttctttcctgtttctgcattttggagttgaaatatttagcctgtgtctacgccaccgttggatgttggaagcacttaagtcgtttgatttcacacgttcacagctggagagcagtttgcctcaggatgaaacacatttttgagtctcacccatatctgatttagattatagttagatgcagctgtagactatagacttttgaattggtagtagaaaaagttaagactttggggggccattgggatggaatgcattttatatgtgaggagtacatgaattttggtggggcaagatggaatgctgtggtctgagtgtttttctctcctccacaattcatttgaaacttaatctccaatgcccaatctccaagtattatgaggtttgggttttagtaggtgattggatcctgaggggtctgcccttatcaatgggatatggtgttctggtcagtgagatatcaaaacgcttatcctacggagttcactgctttttggcccttctgttccttctgccacgtggggacacagcattcctcccctccagaaaatgcaacaagacaccatcttggaagcagggatcatccctcagcagacatcagtccttctggcaccttgatcttggatttcccagcctgcagaattatgagaaatatatttttattgttcataaattacccagtctgtcttatttggttatagcagcacagacagactaggatattctgtaaccataatgtaactgtttgattgttttgattcaactctaattctcagacatctgggttcagatgcttgctctgccattttcaggttgttgacctaggcaagtttgttagcgtgtctgtgacacagtaacatggaacaagtctctctctcataggctatcatgttgttatttgaattagaacatgtaaagcatttggaataatgcccagcacgtggggagtgttccaaaacttcagtcattgctgttgctctggtcatcacagtttttagtttctgacctttaaagccgctgtagacattgtcatctctgaaaacaccactcatatactagctcacctagacacagttgatgtatggagcataatatctaacactttttaagggataaccatgtgtttttcttatttgtgtatttcttgtattgtccacaaaaatagaactatacactgatgtagagaatataatagtctcctattgtattttataacaaactaaaattagggaccaataactttctcacagatgccatatagatatgtcaaaacacacacttcaaagtgatgtgatagttctctcctcattttgtgtaaacagaagagctctcatattgcttctttttgaaatgtgtttttcatttcaggggcatttgacattcaaggatgtagccatagaattctctcaggaggagtggaaatgcctggagcctgtgcagaaagctttgtacaaggatgtgatgttggagaactataggaacctggtcttcctaggtgagtataatttccttctagaagttcagattcgcccttgtgcatttttgtatttcctctgttgtctttcttgggaacccctccgttatttgagactgaagccttattggttcaaaaataaaaagcttcacaatgctgcatctggcctttcactgtcacctttgtatatatattctgctgccttctttgtacatcagtggtggttccagagctgaagttcgcagagaactttatggcagagttaaaatatccaattccctgttttctgtccatgtgcttttttgtttgtttaaaacaggttcttgctctgttgcccaggctggagtgcagtggtgtgatcacagctcactgcaatctctgtctcctgggctcaagcaatcctccaccctcagcctcccaagtagctggaattatgcgtgcgtgccaccatgcccgtgtagagacagggttttactatgtcactcaggctgctcttgaactcatgggctcaaggaattctctggtcttggcaccccagagtgctgatattataggcttgagccagtacgcttggcctatccctgaccctgtgatccacccgcctcagcctcccaaagtgctgggattacaggtgtgagccaccacgcccggccaaagcttatattttttaagtccacataatttgttttaagtgaccgctactttaatctggtgcattttcatgtattgtaaatgaactttgtttttatttatttaataatcagttccatatttttgaggatactcagttttctttgttttatgtttctttttgaggtagtgttgtattggggaatgtatatcattttatatattttacaagatttctttctttagtacagatggtatagctcaggagcagtttctctaaaacttacacaaactcaatagtgttgtaataagacagtttcagttatttcttttactcccatttctcctgacttaattcctactattaaatttgttaatgagaccgggcacggtggctcacgcctataatcccagcactttgggaggccgaggcgggtggatcacgaggtcaggagatcgagaccatcctggctaacacggtgaaaacccgtctctactaaaaatacaaaaaattagcagggtgtggcggtgggcgcctgtagtcccagctactcaggaggcagaggcaggagaatggcatgaacccgggaggcggagcttgcagtgagcagagattgcgccactgcactccagcctggtgacagagcgagactccatctcaaaaaaaaaaaaaaaattgttaatggaattgattacagttcttctcattggaaattttttaataccttgaatatatttttttaatatagttactatcttcattgtagaaataccatgaaagagattggtcatactttgtttttgtttgtttgttttgttctgttttttgagacggattttcattcttgttgcccaggctggagaataatggcgcgatctcacctcactgcaacctccgtctcccaggttcaagcgattctcctgcctcagcctcctgagtagctgggattacaggcatgtgccaccacacctggctaattttgtatttttagtagagatggggtttctccatattggtcaggctgatcttgaactcccgacctcaggtgatctgccagtctcggcctcccaaagtgctgggattacagacgtgagccactgcgcccggcctggtcatacttgttatatcagacacattgcttttctgtagtaagtttcagtttcctaaatataacttgctggattttctttaaatcacacttttttttttttttggaacaagtgctatattataataattattctcctgtctgctttcaagtccatcatgttatactgaattattattttcaaatcttactttattatacatgtagcccatttcttgcacttcaaggacttctcaactgatgtttataaaacctatatattttttcccgtcatgcttagggaatgaggaataaattttttttaaaaaattatattttatccagaagtgtttttcctaagttttcttctaggatttttgtagcctgaggtcttacatttaagtctatatccatcttgaattaatttttgtatatgatgagagataggggtccagtttcattcttctatatatggctagccagtttttccagcaccctttattgaatagaatgtcttatctcaattgtttttgttgactttgtcaaagatcagttggttgtaggtatgtggctgtgtttctgggtttcctattccattccattggagatctgtggctgtatttctgggttccctattctgttctattggagatcttctattttaacagaagcatttatatctaacagttttctatcttagcactgttttctgtgcatacataagttttggcatgttctattttcattttcctttgttttgagatattttatcatttcccttgagatttccaatttgacatattggctgtttaggaatatgttgtttccacatatttgttgatattctaattttttttctgctgttgatctctagttttattttattatgaagggataagttacactttatgatttcagtctttaaaatgtgttaaacgaggtcaggagtttgagaccagcctggccaacatggcgaaaccgcgtcgctactaaaaatacaaaaattagctgggcgtggtggcgtgcgcctgtagtcccagctactcgggaggctgagtcaggagaatcgcttgaacctgggaggcggaggttgcagtgaaccaagatcacgccactgccttccagcttgggtaacagagcgagactcagcctcaacaaaaaagaagtgttaaaaagttttacttttaaatatttcttttgaagaatgttctgtgtgaagttctgaaaaaattctttcgtgctgtttttgggagatgcgttgtgcatatgtaggttaggtccaatttaacgtatagtttaggttgcctatttacttactttttttctgtctgtcctatttataaaagtggtccgttgaagtcttttattattactgtggaacttttctccctttagttatgtttctcttgcttcatatattaaggatctctaatattaggtgcatatataactataattggtatatcttctagtgaattaaccctttaattattagataatgctcttctttgtctcttgtaccagttttgacataaagtctgttttgactgataccagtttagccacctccgatgtctttctattaccatttataagggatatcttttttcaccctttcaattcagcctgcgtgtgtccttcaaataaaaatgaatcttttgtggatagtatgtagttggagcctgtttttaaaattcattcagccagtctctatcttctgattgtggagtttaagccacttacacttaatgtaattactgatagagaaggactcactcttgctgttttgctgaatgtttcctatatctcttagatttttttgttcttcatatccgttactgcctttgtgtttatttagttgattcttttgtcttgacatacttttatttccattgtgtgtgtcttctatacattctttgtggttaccattgcaattacagaaaacactttagatttataacatcctgttttaaactggtaacagtttgacttcagtcacatagaaaaatgactcctttacaggtctgctcccatgttatgtttttgatatcccagattacttccatatatactgtgtctccatgaacgtgtatttaaaccttgacaacaatttcctgctttcttagttttttcagattaatatttgcccattttgccagcgtgtcttcttctgcatcccaagtctccttaacattgttgtactatcaataaggttttatgttgtctttttgtgtgtgtacaaaataaattcatccatctcctcttcatggctgttatcaaattttttcttcaggattatattgtaggaacattttttcgcatatctcttgatatgtagggttgttgagcatatgcctggaaatataactcatgggacattcaatttgataaaattcatagcatatattataaagacataagtctgctttcttcccatatcctcacactgcctcctttttaactgttttcccttgtcctgtgcccatagtataattcacgtatttaaatattggccagtataatgctacttctaaattagtttctttttttgtccaaagtcaggattttaactgttcctggtgaaattatatacctacagctctgcaagcacaaaccctgctgccccatgcacattactccttgccctttcctcttgccttttctcttccctggcctttcctaaaatagtactttgttccagacggaatacctggctacttactagcatataagttttacactcccattattgcataactccttcatctcccacactactctcactctgtaagggatgaccgtactcattcacttgatcacttcctttttttcttttttctttttttttttcatatggagtcttgctttgtcgctcaggctggagtgcagtggtgtgatctcggctcactgtaacctccacctcccgggttcaagcaattccctgcctcagcctcccacgtagctgggattacagacacctgcccccacacccagctaatttttgtatttttagtagaggtggggtttcatcatcttggccgggctggtcttgaactcctgaccttgtgatccacctgccttggcctgatcactttctgagaacactgtctaaatcattatgtgcagggaatgatgactcagatactgttattcatggggatggctgaataatgcttttggcaacacagcatggctcttgaagtatttctttatacactcttagtatttggggtgacctgttacctgcagtacctgcttgggcagtttttgaaaaaaacataatgtttgatcctgcaaacgtaggtgcatatcttactttctttgtaaattggatgtagatacatgaatcccgtgggcatactaactgcttgtgtgttaaatagtggtaatttacctcaagactttttaaacaagttagtgctgttagctagtctagaatattgttttttagtaaagactcacagatttctttgttaaataaagcatatcaacattgttttatgtttataatgagatagcatattggctttaccctagtcagcatggctacctatagtagatattgtagattgggtggttgaaacaacagaaattcccttttcacagatctgggtggtgagaagtctaacatgtcagaaccagccattttggttcttggcatggcatgggccctttttccggtttaccatggctttctctttctgtgtcctgacatggcagaggaccgaattgcctcccaaagaccacacctccaaatactatcacattgaggattgggtcctcaacataggaattttggcagacattaagtctttatatcaaagcagccttcatcgtatctgtaagttttcattttgtagtttcttccaaacagtgtttgttgtcttttatcttagttcatatgcttttcaagtagaaatctcttgatgatatatattttgtggccagttaactaggtaattagaggcaatgaataggaccaggtgtggtgactcatgcctgtatataatcccggcactttgggaggctgcagcaggcaggttgcttgacctcaggagttcgagatcagcctgagcaacataggaaaactctgtctctaccaaaactacaaaaaaattaggtgggcgtggtggtgaacatctttggtctcagccatttgagaggctgaggtgggaggatcgcttgagtcttaggagtggaggttgcagtgaggcaagattatgccactttactccagcctaggtgacagagtgagactctgtctcaagaaaaaatgacaatagatagggagttgctctattgattgttacataggtgtaggcatgaaatcatagtcagtatttttccttccccactttttattctgtattatgttgtgtatttacctttctcccatccaagtagtaaccagatctgacactgtttagcttctgagatcagctgtgttccaggtggtatggccatagacatatttatctttcttttatctttaaaagtcagtgatctcaacatattttctagttatcatatgctgtctctagaatatatgttcttgcttattataaagggagatttgtttagaattccatactataaatttgtgtatttgcatatgatgcaaacttgtatatgcaatatacaaatttatagtatggaattctaagtatattgtatattgtattttacttacctgctggttttatcatgggttaatagagtgttttatttattaatttatatgatgattattaattagtttatcttgtgaatatttaccattacactatatcttgctgtggtttggcatttgtttgtacacagtaaatatgaagtaaatatatataacttttattctcttatgagagagccacattttctgccaatcggttcgtaatttggtgtcattggttgcaaaatacttgttttagtgccaatatatgtttgcacaacataagtcttttggtcataggatgtttgaaactaggctttcctaaacttaatttgaattacatgtagtcaccctttctttactatagacttctattcattttgtatttctaaaaataaaagatcatggtggagaactctcacacctgtctagtataaagattatgtttagtgtaggtatgtttccaatataaaatgtttgtttatcaatagtagtagtttaaaaaaaaactcatgttcattatattttgcaggtatctctcctaaatgtgtgatcaaggaattaccaccaacagagaacagtaatacaggagaaaggttccaaacagtggcactggaaagacatcaaagctatgatattgaaaatttatacttcagggaaatacagaaacatctacatgaccttgaatttcaatggaaagatggtgaaacaaatgataaagaagtgccagtgccccatgaaaacaatcttactggtaaaagagatcaacatagtcaaggggatgtagaaaacaatcatattgaaaaccagcttacatcaaactttgagtcacgtctggctgaactgcagaaagttcaaactgaagggagactttatgaatgtaatgaaacggagaagacaggtaataatggttgtttagtttctccacacattagggaaaaaacgtatgtatgtaatgaatgtggcaaagcctttaaagcgtcttccagccttattaatcatcagaggatacatactacagagaaaccttacaaatgcaatgagtgtggcaaagcctttcatcgggcctcactactaactgtacacaaggtagtccatacaagagggaaatcatatcaatgtgatgtatgtggcaagatcttcagaaaaaattcatattttgtaagacaccaaaggagtcacactggacagaaaccctacatatgtaatgaatgtggcaagtcctttagtaaaagttcccaccttgcagttcatcagagaattcataccggtgaaaaaccttacaaatgtaatctgtgtgggaaatcctttagtcagcgtgtccatcttagacttcatcagacagttcatactggagagagacccttcaaatgtaatgagtgtggcaaaacctttaaacggagctcaaacctcactgtacatcaggtaatccatgcaggaaagaaaccatataaatgtgatgtatgtggcaaggcattcagacatagatcaaatcttgtatgtcaccggagaatccacagtggagagaaacaatacaaatgcaatgaatgtggcaaggtcttcagtaaacgttcaagtcttgcagtgcatcgacgaattcacactgtagagaaaccttgcaaatgcaatgaatgtggcaaggtcttcagtaaacgttcaagtcttgcagtgcatcagagaattcatactggacagaaaacttacaaatgcaataaatgtggcaaggtgtacagtaagcattcacatcttgcagtgcattggagaattcataccggcgagaaagcttataaatgcaatgaatgtggcaaagttttcagcatacattcacgacttgcagctcatcagagaattcatactggagagaaaccttacaaatgcaatgaatgtggcaaggtcttcagtcaacattcacgtcttgcagtgcatcggagaattcatactggagagaaaccttacaaatgcaaagaatgtggcaaggtcttcagtgaccgttcagcttttgcaaggcatcggagaattcatactggagagaagccttacaaatgcaaagaatgtggcaaggtcttcagtcaatgttcacgtcttacagtgcatcggagaattcatagtggagagaaaccttacaaatgcaatgaatgcggcaaggtctacagtcagtattcacatcttgtagggcatcgaagagttcatactggagagaaaccatacaaatgtcatgaatgtggcaaagcctttaatcagggctccacactcaatagacatcagagaattcataccggagagaaaccttacaaatgcaatcagtgtgggaattcctttagtcagcgtgtccatcttagacttcatcagactgttcatactggagacagaccttacaaatgtaatgagtgtggcaaaacctttaaacggagctcaaacctcactgcacatcagataattcatgcaggaaagaaaccatataaatgtgatgaatgtggcaaggtattcaggcatagttcacatcttgtaagtcaccagagaatccacactggagagaaaagatacaaatgtattgaatgtggcaaagcctttgggcggttgttttccctcagcaaacaccaaagaattcattctggcaaaaaaccttataaatgtaatgagtgtgggaaatcttttatttgtcgctcaggcctcactaaacatcgaataagacatactggagagagccttacaactaaactcaatgtgacaaggccttagacgttgtcctagtttctggaatcaccgaataattcctacttactgatataccttgtatatttaccccttctcttgaaatccctgtggaattgtaatctccagtattggaggtggggcccattgggaggtgattgaatcatggaagtggatttctcaaactgagaaagatgtagcgtcatccccttggtgctgtcctggcaatagtgacttctcttgaggtctggctgtttagaagtgcatagcacttccctgtcgcttgccctcattctcaccatgtgaaataccgacacccgctttgccttccaccatgattttaaccttcctgaggcttccctagagggtgatcagatgccagcaccatgttttcatttaagccttcagaaatatgagccaattaaactcttttctttatacattagccagcctcaggtttttttttgtagcaatgcagttatgacctaatacatttacacatgcagtaaatatacctaagttttaagctagtattcactactcactaggtgtaagaatttgtatatatattccaggatgtatacatcctggagaaaaatcacagaagtgtaatacgtgtggcaagaattctactcaaaagccagaacttgtaaatctaggtaattaaaagggcatagatgtatgaaatgaaatgagggtggcaaaacctttactagagttcaatcactacttgtcataagagagtttatactgaaaggaaatcatataaatgtatgtgtcagaggctttccccaggcattggaactcactaggcatcagaatatacatctttgagaggaaccacagaaatgtaatgtgcatgctaaggtttttacccgaacatcaaaatggaaagagtattcatactagagacaaccttccaaataaatggttttaaaaaatgaaatgttcaaagacctggaatcaacccaaatgcttatcagtgatagactgaataaagaaaatgtggtacatatacaccatgggatactatgcagccatagaaaggaatgagatcatgtccattgcagcgatgtggatggagctggaagccattatcctcaggaaactaacacaggaacagaaaatcaaacagcacatgttctcacttaaaagtggaagctgaacaatgagaacacatatacccagggaggggagcaacacacactggggcctgctgatgggggtgggaagggcagggaagtggagcatcaggacaaatagctaatgcatttttgccttaataccaggtgatgggttggtagatgcagcaaaccaccatggcacacattttcctatgtaacaaatttgcaaattgtgcacatgtacccagaacttaaagtgagacaaaaccaatgtccacgcctttgcagtttgattgaacgtataaaggagaaaaatcctgtaagtatgctgaacatgaaaggacctggaagcagtagtgtgtcttcagcctttaccaaattatccctacttgagagaaaacttggaaatgtaatcaatgtggcacaaatttcaaccagttttttaaacagactacacatctttgaaatcatactagggataaccaaatctgcttctccaagattggcctggaatattattacagaataactaccagacaacatttgttaaaactcaggacagtatgtattttaaaggagcaagtgcatgtgtgaaaatggctcattcagtttataaaatattacattaaatttgaggtttctgttttttttcttttgtgacagtcttgctctgttccccatgctgtagtgcagtggcaccagttcacctcactgtaacttccacatcctggtttcaagcaatttgtgcctcagcctcccaagtagctgggattacagtcatgccaccatgtccagataatttttatatttttttgtagagatggtgttttaccatgtttgccaggctgatctcaagctcctggcctcaagtgatttgccaccttggcctcacacgttgctgagattacaggcatgagccaccacacctggccaatggggcgtttcttaaaatagctactagactatgacgtttatcctaaggtttgaagtctatcatcttccttacatatccttcattgtggtatctgggaatgaatcaacaagatgagagagcctccttcattcagtgtggctccttcatttccatgcttcctgaagattaaggtcactgaattttaaaattcaatattctgtgagttacacaccatggagtaactgggagaataatgtaagtttatgatgtaagttgtgcttgtgttccaggtgtccatgaacacgtagagtgccactttgggttgtagaaaataattgcacaaccaactgactgaaataccagtgaggacattgatggaatattaagggtattcatgagaggcaagtgataggttactagggatggattgtgtgggagaaataatgcagaggaaatgatgatcatctccattgaatgacagctgttatatagcaaagataaatgtaaaattagtcttattcttggaagtggaagacagcagttatcagagaggagaatttaatcaaaagaatcagaatagcatggtcacaggccagattcacattgaagtatttactctatattttactgctgttacattcaaaatgtatcagaagtctcatggttcaattaataaaatgttattcgttttcgtaactcagtgacgttcctttcaccaacacagatttatcccaccttagtaaagaacttctaacagacactgcattacactctgctggttaaaataatgtgcgacaattgttttctatggcgaaatcaaacaacatagatttttgcccataccatagtccccctttaacccacaagatgccttccaagtgtcctctagtggatacctgaaagtggatagtacccaaccataaatatatagtttcagtcaagttttgaggtgtgacagcaaagctagtactgattatttttattcacacttgtacagaagatttatgataaatcttagcatcttcatctgtatttttttcttattaaatcaataacctttcactttttaacttaaaggaggcgctttacagctttcttgctttctcttttttttttttttttttttttttttttgttagggggttttgctatgtcacccaggctgagtgcagtggttattcacaggtaagatcttagcacactgcagcgtcaaaaagtggtcctcccacctcagcctccagactacctgagactacaggtacatgctattgtgtctagcttacagcttctctgagatatccaagttgcaagcctcactacttttgtgctttggggccataattaagtaaaataggagatacttgaacacaaacacgatgatactctaacaacgctaactgagatgactactaagtgactgagagaggggtaggttattctgtgtggctacaccgtataaagggatgatttatgtcctgggtggaacaatgtgaaatttcatcacattagtgagaacagtgtacagtttaaaatttccgagttatttattttgggaatattccatttaatgtttttgggccacagttgccactggtaattgaaatcatggaaagcaaaacagcagctaatgtgggatgactgtaccaatgtcttggggggagggagccagctgattgtgagatgtaagtttgtgattctgagatagcagctttgcaaaaaactgcaatttgtcaattcaccaatattgataatgtgcaagcttggtgagctgagaatattcctgaaaacctttgttcccactgcgaattcctggggacagttatgagttcctaatgacgtcaccacaaagacattttggagtgtttggtaaaggctgtttcttttcagtgattgctggaagcagatgggatcaaataaaaatagaacattgtgggctcccaaggctgaggtggagctggaggatgccggccagactgcggagcagcagtcttccttgtgcacatgcctgaagtccgcgtgggtgtttgaggaagtggggatacagcatttaatgaaaaatttatgcttaagaagtagaaaatggcagtcttcctagataattttcaatggccagaatgtgaatgtattgacgagtgagagaagaaatgttgtggcgtctgttgtgacaggtatattgttttttacaggctggtggataatgacgcagcagtggtgtattgtaggccagaacagttgaaccatgcctttcacacatgtggtgtatttcccacattggctttcttcatgataaatgctgtatccaatgctcaggtgagaggtgatagctatgaaagtggctgtttaggaagaacaggtccttgagtttggcttttcgttggtttcatgttgatgtttggggtacttattgcttccatgtggattctttttggtgcatatgttacccaaccactctgatctacaaatttggaagaactgaagagctgtggacctgagatcactccttaaatcacattttctttgtgttatattctgtttgtagataagtttttatcttagtacacgttgccaaatggagtagcttgtacatgaaatgttttctttacatttttatgttgtgttattttgtcttttttgttgttgttgttgctgttgtttttgagacagagttttgttcttgttgcccagactggagtgcaatggcgcgatctcggctcaccacaacctctgcctcctgggttcaagcgattcttctgcctcagcctcccaagtggctgggattacaggcatgcaccaccacacccagctaattttgtatttttagtagagatggggtttctccctgttggtcaggctggtctcaaactcccaacctcagatgatctgctcgcctcgacctcccaaagtgctgggattacaggcatgagctaccacaccctgcctatgttgtgtgtttttaaagttttatgaaatttctgttcttcatttttcattgcatagactgttaatatgtatatagtacaagactatatggcttggataatgagtatcttttattcctgagatttagaacttgatctgttccctaagccagggttatatcatcatgtcattttagaagtaaccactctctctctggccgggtgcagtggctcacgcctgtaatcccagcactttgggaggccgaggtaggtggatcacctgaggtcaagtttgagaccagcctgaccaatatggtgagaccacatctttactaaaaatacaaaaattagccgggcatggtgtcaggtgcctgtaatcccagctacttgggaggctgaggcaggagaatcatttgaacgctgtgggtggaggttgtagtgagccgatattgcgccactgcactctaacctgggagacagagtgaaattccatcaccgcccccctaaaaaaagtaaccactctctctcagtatctctaatttctgaagatgtgcaaaaaatataattttatatagctggaatgagcactgagccataaaaggtatttcagcaagttgtaatttattttggcctaaaaatgaggtttttttgtaaaggaaaaatgtttgttcttatgtattgaagaagtgtacgtttatataatgattttttaaatgcccaaaggactagtttgaaaacctcttccaagaattcctctaatatgaccttatatgaaaagggataatacatgatcaaataaactcagttttttttatggttactgtaaaaagactgtgtaaggcagcttagcaccaggcttctcataaaagcagcttaaattatccactggggttatcttttgacaacctgctattatctggtgttacacaattcaatagcaagcaagtttcagacaactgcagttcaaaagcatgaaccatataacaaaaagtggaataattaaagataaggcacttcttcccaaagggaattatcacctagtgaaaaattacgcatttcatctactcagttactgactgcaagcaagtctctctgctctagctctcaagctttgggtgaatgtccctgcgaaatgtatcttcaagttgaaagttcacactccagtcaaaaactccttttactgagtttgcagtactgtatttgcatgtgtgtatttctctggacctttattgctacttttgctttcctttgttacacagactttgtgttgcactttcttctccagaggggtgatatagagccctggttatatgaataataccagtgatagtgtccacagctcaaatgcaagcccatttgtcatcactcctttcatctctctgagaggatttattgtgtgcagagtatgaagcagttgtggagctctgtgcctttgtcaagataccatcttgtttgatgacttctttctttgttgtttttccttgaaaatgtcagtaagctctgttatgcttctagcaaattgtgagactgtttgtttccaccctcataacctgttgcaataaatattatttctcacatattttaatattattaagtttgttggagaaaacaaaccataaaaattcatttgctgttcagttttcaattacaataaagaaatagaacattgttaatttctgagacttgatggacagtaatatggaaaatcttttcgtttgcctatttgtgcatctgcatcggtgaaatttctcatatttttaacctattttctaattcaattttttttctatgatatactttactttgtagagcaatttttggttcccagcaaaattcagtggaaggtacagagatttctcatatagctccttcccccacatatgcatagccttccccattgtcaacatcctccaccaaagtggtagattatcatccaacatccctagtttatagttggctcacacttgtacattgtgtgggtttggacaactgtaaaatggcacatattcacatattatggtaacatacagagtactttgactaccctaataatcctctttgctcagtctaaatttgtgtatttctttcacttctgtcacttattgcttcacgttttgcagctgttttttagtgcatacacactgatggttctgaaatcatctttgtaagttgacatttttatcatgtaatctccctgtttttccctgttatttttattttctctgaagattacttcttttgttccagtcaattttgcaagtttatttgccaaagttaaggatgcttgcctgtgacacagcctcaagaggtcctggccacatatacccaaggtggttggggcgcagcttggttttatacacttttaggagatatcagttaatgtgtaagatgcacattggtttggtttggaaaggcagggtaagtccaagcagggagggtgcttccaggtcatcgggtagataaaagacaaaggttgcattcttttgggtttctggtaagcattttcaaaggaagcaatcacacacatttatctcagtgagcagagggatgatttgaatagaatgggaagcatgtttgccctaagcagttcccagcttgacttttccctttggcttagtgagtgttgggtgccaagatttattttcctttcacatttccccttttctcctttaaaaatctttgggagaggctgggtgcggtggctcacgcctgtaatctcagcattttgggaggccaaggcgggcggatcacgaggtcaagagatggagaccatcctggccaacgtggtgaaaccccatctctactaaaaatacaaaaattagccaggcgtagtggcacatgcctgtagtcccagctactcaggaggctgaggcaggagaatcacttgaacctgcaaggcagaggttgcagtgagcccagattacgttactgcactccagcctggggacagaacgagactccgtctcaaaaaaaaaaaaatcaggtttcatctgatccttcatggctaggacagtttattttcaggtgggcaagtcccatgttatttggaaagctcatttttagcagtttgtaaagtgtcgtgtcctatgaagagaaaatagcaggaggaaggaagaaaaacaaagaataatcctggaaaatagatacaggccatattactctgaagtccatacatcagtagataggtatgaaagtggcttatgtatgtgaataggttgctgttattttcttctgaagtttaagttgtctagcttcagttatcagggcttcaagaaaatacagtttagttttcagtgatttcaaattagaaaatatgggggaaaaaagaaaagaaagaagaaaaaattgaaaacattatttcagagacatgtagctggaaaaaattagaattcagtccaaactgtggaaaatcataaaaattgaaaaacgtaagctgggcgccatggctcacgcctgtaatcccagcactttgggaggctgaggcaggcagatcacgaggtcaagagatcaagaccatcctggccaacatggtgaaaccccgtctctactaaaaatacaaaaattagctgggtgtgttggcacatgcctgtagtcccagctactcaggaggctgaggcaggagaatcgcttgacctcgggaggcagaggttgcagtgagccaagatcgtgccactgcattccagcctggcaacagagtgagactccatctcaaaaaaaaaaaaaaaaaaaaaaaagaatactcagaaatagtttccaaattctggagaaagcaggtagagagaaacaaatatgttccaaattttcttcacagcagtatactttcctcaattgttaaatgctgtcggctgggcacggtggctcatgcctataatcccagcactttgggaggcaaggtgggcggatcaccttaggtcaggagttcgagatcagcctggccaacatggtgaaaccccgtctctacaaaaattacctgggcatgatggtgggtgcctgtaatcccagctacttgggaggctgaggcaggagaatcgcttgaacctgggaggctgggaggcaggggctgcagtgaacccagatcatgccattgcactccagcctgggcaactgtctcaaaaaaaaaaaaaattgctgtcaatagctcaaaagaaaagtttccttgactctgcaaaacaaaacaaaggatcaaaagaaaaaatcagaaagattactttagactcctattagttcagtccatgcagttaatgtgtgttgtgtttgatattcatgaacattttagttatccatgaaagttttgaaagttctttcctctattcctctattctaatgtcacattttccaaagttatcagaaacttgcattccagagcacctatcaaattcctgtagctgattataaaccaacttttgaagaggatccaaacaagacaacaattgcctgtggcaacaaaatgtctcaggacagctgttattaaaaccacaattgactataatggaaattttggttacttctgtgacataccaccattttacataatagtcaataataataataattattattattttttgagacagagttttgctcttgttgcccaggctggagtgcagtggcacaatctgggctcaccacaacctctcctctggggttcaagcgattctcctgcctcagccttctgagtagctgggactacaggcatgcgccactacacccgactaattttgtatttttagtagagatggggtttctccatgttggtcaggctggtcttgaactcctgacctcaggtgatccgcctgccttggcctcccaaagttttgggattataggtttgagccaccatgcccagccaacaattataattattaataacatgtggctgggcacagtcactcacatctgtaattgcagcactttgtgaggctgaggtgggttgaggtcaggagttcaagaccagcctgaccaacatggtgaaaccgcatctctactaaaaatacaaacattaaccaggtgtgatggtgcacacctatagtctcaggtacttgcgaggctaatgcaggggaattgcttgaacccaggatgcagaggttgcagtgagccaagatggtgccactgcactccagcctgggtgacagagtgagattccatctcaaaaaataaaataataacatatagtaagtcatatcagaattataagagttttccataattttggaatacatgccaatttcatatttatacaagtacagcccacagaaagccaaacaccattttgtatttgacaatgcttcctgtatgatttttataccaaataagccaaatatgtctcttctggatttcaggggattaacaaaagtttaatgacgacgcaagttaaaatgtgactttggaaagcttgtcaaatataaaaagtttaaaacacttgatatcataaaataggatcacaggccattataaaataagtgattcatttaaccaaagtggtatcgcaaagatttcaaaaaaaggtggcaacctttattttttgagagaaaagacttaatttcccaaacaatattccctagtaaaaatggcacaaggccaattaaattggtttttcaatattttataaacaaactataaaattttaatcatcttgcctgtaagtataatttccatgagcctttttatacactatataatctttattaaatagtgggctaggctgggcacggtggctcatgcctgtaatcccagcactttgggatgccgaggtgggtgaatcacctgaggtcaggagtttgagaccagcctaaccaacgtggtaaatccccatctctgctaaaaatacaaaattagctgggcatcatggcacatgtctgttaccccagctacttgggaggctgaggcaggagaatcacttgaacccatgaggtggaggttgcagtgagcccagatcgcactattgcactccagcctcggcaacagagtgagactccatctccagaataaaaaaaaggtgggctaatgctccaagacaaccttgttaatctgacgcaggggctcatatgctggtcttgcaacaatttgcctttgaaattgatagttaatttctagagaaaccaaacttatttcagctctaaaaattgaccctgacaatctcacatgtccacttctttcagtataaccactggtacttgaggagttgaatagttttaatttcttgccctgtgtttcacaaacacagtttattttgattaggaacttctactgggtctgaagatgaggcttgaactgctgtcagtgtttaagatttagcaagacttggtgtcctttttagacccaggagtcaaagccctttaactgaatggaacagggacctaaaagcatatacggaaagttatatggacataataaacttaatttaaaaaaatttaatttaaatttccttgtaaccaaaccaaacttagtaatactgacacaggaattactttgataaagtgtgagatctgtttagtaggccagttttccaaaggcaaaagaaaagcccttctacagtgtgactgctgttccctatgggagatattatgtttggaaagaaacatttcctttagacctcaaaaataaaacattttatagtgtcaggccacaacagttagaacccaaagaaaaaaaggctacaggagctgaaaattaggtgaaaaagttatgatttcaggccttttaagaggggagagaaagctgaaaacagtgagattccataaaacttgaactttacattgaataaattatgtttcataatttatttaaagcaccgcttaacaaaattttgtagtttgaaccaattctttagtgtataagtggtgttttttaaaatcaaaacccaatctctagaaagaccattataatttccctttaattatagtgaatttgatcacataaaactttttttcatcaatcttattatgacttacacagaccattcatgacatgtgtgggatttcttgtttttcctgaacattcatctttcttatacaatcagtcattttattccaggacaaaatttctgatacaagattctttctcatatagaattatttttctttaagctttcctaccaaaaatatttatttatttatttttgagacagagtctctctctgtggctcaggctggagtgcaatagctgaatcttagctcactgcaacctccatctcctgggctcaagtgattctcctgcctcagccttcagagtagctgggattacagatgcacactgtcatgcctggctaatttctgtatttttagtcgtgttgtattttgagacttctaccagtccatagtattttctaaaaacaaaactaaatatagatttataataatcctttggatggtaaatttttgtgggaatgaagtagctgggtactctggaggctgaggcaggaggatcacttgaatctgggaggtgaaggttgcagtgagccgagatagtgccactgcactccagcctgggcaacagagcctgtcttaaaaataaataaataaataaataaataaataaataaataaataaataaatagaagtagctggagaaaggtgcttactgcacaaggaaggcatactttctgatactgtattagggatgtcatcaggtgaagtcaagaacaacaaatcacaatggactggaaacattctcaggagaactgtagccatgaaaaggactgttgttcattcttgaccttgtggaatcagtccctgactcatcttctcagcaacattgcacatttgctgtgaaacagaaactacggggtaccttctttattttccttttctggatgggagggtttattcaggtttcatttttctgttccacaatgaagtgttgtgagtgaggagaactctactgggctctcaatgaaaagaagtctcatgagactgtcatgagatccttgcttgtgacttgaagttacattttggcttattcttttatattttttagaagtgggggtgaatatttggtgtgagcaaaagaggaacagattatttctgctggaagctgcactgtcacatgttataatattttgagacaggatcttgctttgtcacccaggttggagtgcagtggcacagtctcagcacactgcaacctccacctcctgggctcaggtaattctcctacctcagcttcccaagtagctgggactacaggtgcatgccaccaaatccagctaatttttgtatttttttgtagagatggggtttcaccatgttgatcaggctggtctcgaaatcctgacttcaagtgatccatccaccttggcctcgcaaagtgttgggattacaggtatgagccaccacaccctgccaaattagtatgttgggtttttaaaaatccaactgatacagctgtacattagcaacagagctcttgcttttacattatacaattttagttcattatcttgtatcattccagttctttcactgaacttaaaatgtaagggaccctccatatattgatagaatacatcctttacatctgtcaggtctccgcatatttttttgccatacaaatctgaaaataccaccttgatttactaatcctataagtttttcactgaagtacaaggaaagaaatgtaaatctttaaattggattaaatcgtttctaggaaattgtataatgattttaaaaattatttttaaaattacattttggccaggcacagtggttcacgcctgcaatgccagcactttagaatgtgggggtggggagatcgcttgaacctaggagttttagactagtttgggcaacatggtgaaaccccatctctactaaaaatacaaaaactgaggttggggtattgcctgagcctggggaggtggaggctgctgtggggtgtgattacatcgctgcactgcagcctgggcaacagagtgagacctcatctcaaaaaaaaaaagaaaaaagttttgctacagctgtgaaatcattagcctttgaaaaataattcttctattaaataatttaatatttattgtctgttagatattaattttatagtacaggtgtaaaaatataggtaatttgtctaaacagtatttcagaaacacttccaacaattatattgtgtgaagggttctatgtatgcatgaagaaaggacatgtataaagtttttagcatggggaaaattgagtttttatcaacttaaacgtcaggagtttcaaaagtaaacattcagtgttgaaataaaaactgtctgaatctatctatctaatatatatgttttttttttttttttttttttgagagagagtggttgtgttgcccaagcaatagtgcagtggtgtgatctcaggtcactgcaacctccacctcccaggcttgagcaatcttcccacctcagcctcccgagtagcagagactacaggtgcatgccaccacccttggctaatttttttttttttttgtagagatggggttttgccatgttgcccaggcttgtctcaaactcctgggttcaagcaattttcacacctcagcctcccaaagtgctgggattacaggtgtgagccagtgcaccctgccttattcctttactttcttaaaaaacttgctgtcactttactctctggactcccccctaattctttcttgcacaagatccaagaaccccttcttctgggtttaactgcctaataggttctctttttctgctgcctagacagagccaattcctcaagacagggaaattgtaatagagaaagagtttaattcatgtggagctggctgtacaggagactgaagttttattattactcaaatgagtctccctgaaatcttggggatcagggtttttaaggataatttgatgggtaggggccagtgagtccagagtgatgactggttgttcagagatgaaatcagagagttgacactgtccttttgcactgagtcagttcctgggtggtgtcacaagaccagatgagtcagtttattgatctgggtgtcaggtgatccatcaagtgcagggactgcaaaatttctcaaacactgatcttaggttttaaaatactgatgttattcccaggaacaatttgggaaaggtgacaatcttgtagcctctagctgcatgactcctaaactatagtttctaatcttgtgactaacttgttaatcctataaaggcagtctagtcccaagcagaaagggcatttgttttgggaaagggctattaatgcccttattttaaaagataaactaagttcctcccaaagctagtttggcctacacccaggagtggacaaaggcagcttggaggttaaaagcaagatggagttggttaggtcggatccctttcactgtaataattctcagttataatttgcaatggcggtttcaggatctggatcaggacccctttctggcaacacgaggatggttatgaatgcatccagacatccaaaaagccacctctgagagctagagatttccctttcctataggttcttcgtcccttgtatgtcaacccaaggattcactggggatctagaactgcgcaggccagtctaggaagagagagacaggaaagagaagaagaggaggtgaattagttttgaagaaaagaaagaaggtcccgtgctacctctttttttctgacaaacttttcatactgggaaatagaatcctggtttatttgtagtaaaactaggagtccagggattttataggagggtgagaaaaatgcacttttatggtatagtctgtggagacctaattagagaaaaggagtcagcctggcaggaccaggggaaagcaaagagataaagcaaataagctataaatctgcctttctaggccaggtgcggtggctcacgcctgtaatcctagcactctgggatgccaaggcggtcaaattgcctgagctcaggagctccagaccaccctgggcaacatggtgaaaccctgtctctacgaaaatacaaaaaaaagaaaaaaattagttgggcgtggtcgtgggtgcttgtagtccctgctactctggagcctgaggctcgagaattgcttgaacccaggaggcgaaggttgcagtgagctgagatcatgccactgcattccagcctgggtgacagagggagactctgcctcaaaaaaacaaaacaaaacaaaattttaaaaaactgcctttcttcatggtccaggacatataaacaaaatacaggaagcagataagctgtaggtctgtttttctttctggcttaggccatatagcccttctgcgcagataacatacatagctcataaactttctgcttcaatttttcatcaaacacctaacagaagaaggcaagttagctccctgcttccttggcgttatctttcatttatgtatttgtttatttattgagacaagagtctcactctgacttccaggctggagtgcagtggtgtgatcttggctcactgcaacctctgcctcccaggctcaagcaaatctcccacctcagcctcctcagtagctgggagtacaggtgtgggtcaccattgccaggtaatttttgtatttttagtagaaacagggtctcaccatgttgcccaggctgggctggaactgcccacctcggcctcctaaaatgtggagattacaggggcaagccagtttgcccagctgaatctcctcttcttataaagaaatcagccagattggatcagaacccactttaacaagcttatttttacttgatcactcctgtagatgccatatatccaaatacagttatattctgaggtactgggtattaggacttcaagatagggttttttttgtgtgtggaaatttttctgctcataacacactgtgttctggactcctaaactttatgtccttcttacatgcaagatcccttcactcccatcagaacaaaaatcttttatttatttatttgagatggggtctctctctgtcacccaggctggagtgcagtggcgtaatcatgacttgtcacagtctcgacctcctgggctcaagtgatcctcctgcctcagcctcccaatagctgggaccacacatgcaggccaccatgcctggctaatttaattttttgtagagatggggtctgactatgttgcccaggctggtctcaaatccttggccttaagtgatcctgccacttcagccgcccaagtagctgggactacaggagtgtgccactaagcatggctaatttttatatcttctgtagagacggggttcttgctatgtgcccaggctggtcttgaactcctgagctcaagtaatctgccagactcggcctcctgaattgttggggttacaggcctaagctaccttgcctggcccatctgaaaagtcttaatccatttcagtatcaactctaaggcccaaatatcacctaaatattatctgaatcacatatgggtgagacacaaggtgtggttcatcctgaggcaaagtttctgcccagctgtgaatctgtgaagccagagaagttatctgcttccaaaatacaatggtgggacaggcataggaaacaccctcagccctggaaaccacccttctactttgttactctgaatttgatgtttgtacttagcacgtgtaagtaagtgcatgaagtatgtttctttgtgtgtgttgggaacgggtgctcagtgtcgcaaaaatcaacactgagacaaaggatctctcagcaaggctagtttactttctgcagaaagggtgctgctcactagcagtcttgccacgagagtacacatgaacaaaagagaagggtcatttataacctgacgcatctggccgggcgcggtggctcatgcctgtaatcccagcactttgggaggccgaggtgggcggatcacgaggtcaggagatcgagaccatcctggctaacgcagtgaaaccccgtctctactaaaaatacaaaaaattagctgggcgcagtggcaggtgcctctagtcccagctactcgggaggctgaggcaggagaatggcgtgaacccaggaggcagagcttgcagtgagccgagatagcgccactgcactccggcctgggcgaaagaacgagactccgtctcaaaaaaaataataataataataacctgacgcgtccaccctactgctgtgtctggtttccattggctggaatcggacccaattctgtgcttgacctgattggctagcaccttagaacttcccaaaagaggcaaaggcagaggagaacaaaggaagagaggaagtaacttgtggaaggctgagagaggcaaaaacacttccaaataaggaagaggaataggctgtgacctaatgcttgcttggaacaattcaggcatgccagggcaaatatctaggctaaaatgtgggagctaagaacacagagtatattgatttatctattatggctagcagatatttaagaatattagcacaggtctttgagtaaattttgcttctaagagaggttactatctattctcaattagactgggaggaaagtccctttgaagaggaacctctacttatttcattttctacactgtgtctagcacatttcgcttggcataatgtcttctgggttcctggatccagtcactgctccacatccaatccccaccgagatcccagttccctgactactgagtagcttcagcttttctggtaagactggatggagtccaccaggctcggaaaaatcggttttgacttaaatcagttcaacttgttaagaataaatcatcttagtttccagtataagtggaccacaactttaagattcaaccttaaattctgaaacattaatttaaaatgggcaaggagcaacgctgcttcacaggacaagaaatagtcacaaatactcccaaacctggaaaacaaaatcctgctgggtgagaggcggagtggagaacaggccccgcctcggccccgcccacccctggaggccccgcttcatcccagttttcggtccagccaagccccacctagtcacgccccctaccgccctgggcctcccaccaccctttcgggccactcccaagtcaggccagtctttccgcccagccctttcctagtcgcgccccgcctaggccccgcccccaggccgcccagtttttctttccgcgcccagtttcctgcacacccggaagcagatcgcgctggggaaaggccacgtcgctatgagtgtgtttcagtctacctggattaaacgtttgcttctcttcgtctaccttgattaaacgtgcacttcgcagtcctcggttctccatacccgtgacctggggatcgctacggaccttaaaatacccgcaacagccccttcgtcccaagtaagtaggagaattgcttccctttcggtttaaaatctctctgaggccgttccttgctctctgcctttcttccttaggaccatgtagacaaccccattcaggtagtgttcccgcttaaaaccctctgcttgggccccgcgccaagtcgagtcctcattcgggatgtggactagcgcccttcgcgatccccgagctcctccgtcgtctgcccctggaggggagcgcccactgtccggctcctgaaggagccgcttctcctcccacgtcctgggattctgcagaccctccctgtcgtgagacatcgttctccgcgccacctcgtgtcgtcctcacgccgggtccttccgctccccaggcttccccttcacagccactgcttttcttgactccccgttgggacaggttacctgagtctgtcttgtgacacccagtgttcttccttcccaaattttactccactggaaaatgtgctcttccgggaggtgggcatcctattcctcccctttcctcccgaatgtgtgggtgagagggatcaggagaggaaaagacggggaacgacggagcaaaaggaaaaactgaggagaaaagaatgagggagacccataaatacacggcaaaatggatgatactttagggacttgcaaagagagcaagagtgaaagagaacggatggaaaaagtagcagggggagaaaagcacacagagaaatttagaaaaaaaggggaccttcagagagatgaagggcagcaaaatagagtggggcggcaaaggaggaggcactgcagacagacagacagtggggagaaggtgaaagagttggagccgcggctgacagagctacgtggtgctgggactgaaagagagggagagagggcagtgggtgacaagcagagtagagggagaaccacagcagggagtaagcctaggaaattgggggtgctagagagtgggaacaaaggagatgtaacagggaagagggaatttaacaaggagagcagagagggagcttagatgggggaaaagaggcagaaatacgtggagattggggacaatcggaaagattggggagaaagagctacgagaggtgaagtaagttgcagagcattgggcagaacagacataaaagagggaataaagaaaggggtgcaaaacagaaaaggagaaaaaaaagacgctcagaatgagagagggaaacacatagccgtgaagaaagcgggagaggaccccatccagatgcgtgacagttgattggatatggatggtggttgtaatatattgatttgtggctttatactctgatttgaaatatgtttaagttgtactcatgaggatgaaaatcaccaaagttttttctataagccttgtgcattttgtatgtatttgtatcaaaagatatttggaattcctatttagccagagggcagtgacttgatccagttatttgtggtaactctcttcttcccaatgatggagtagagcataaaggaggggagaaatggggcaagaaatgactgactgtcactacaagatatgtctttggtgttttttttggctttgttctgttttgttttggggggggacatggtctctctctgccgcctaggctggagagcagtggcatgatctcggctcactgcagcttctacttcctggcctcaagcagtctttccacctcagcctctcaacgcactggaattacagatgtgagccaccacactaggcctacaaggtatgtcttcgcagaagcattgaaagtcttgtttttttgtaatgaatttacttttttctttgtagttgctttacagttaattaattgttattttggaagcttgagatacattttattcaattgcttctttcctatagttgctaactccagaaataagatttggtggcatccaataatcagctgatctcattcatttctgaatattaagtgccatcattttttgaacttttaccccataatttattagatttttcaaaaactttccaaactgttaaagtgtccaatatagtatagtcaccatggtgtacattagcttcctcagaacttcttcattttataacagaaaatttgtaccctttaaccaacattttccattttcaccccccagcagcctgtggcaacaactgttctaccctgttactatcaattggacttttttagattccacttgtgaggtcatacagtaattgtcttttagtgtctgtcttatttcacctagcataatgtcttccaggttcatccatgttgttgcaaatagcaggattttcttctttttagggttggataatattccattatatatatgtacacatgaacactctgtatatgtctatatacacacatatttattcatggatgggcacttgggttgtttccatatcttggctgttatgaataatactgtagtgatcatgggggacagatattttgtaaggttttctttttttttgagacagagcctcaccctgttgtccaggctggagtgcaatggtgcaatctcagctcactacaacctccacttcctaggttcaaatgattctcctgcctcagcctcccgagtagctgatattacaggcacccgccaccacgcccagctttttgtgtttttagtagagacagggtttcaccatgttggccaggctggtctcgaactcctgacctcgtgatctgcccgccttggcctcccaaagtgttaggattacaggcgtgagccgccacacccagccatttttttgtttttgtctgtgttttttcagcagatacatggtctctgctatgttgtccagcatgatctctaactactggtgtcaagtgatcttgtcgcctcagcttctcagagtgctgggattacagccatgaactgctatgcctggcctagatgtctcttaaagatactggtttcatttatttcctttggatatatacccagaaatgggattgctggattgcattgttgttctatttttaatattttgaagaatgtccatagtgtttttcataatggctgtactgatgtacactcccagcaacagtgtacaagggctcatttttctccatatcatgctaacacctgttatctcttgcctatttaaaatagccttcgtaagaggtatgaggtgatagcttatggtggttttgattagcattcctctgatgattagtgatcttgagcatcttattatatacctgttggtcatttgtatgtcttatttggaaaatgttcaggtcctttgcccatttttattgagattatttggggtattttgctgtagaattgtaggagtttttatatattttggatattaaccacttattaaatatatggtttgcagatacatacttccatcttacaaattgctttttcatttagttcattgtttcctttggtgtgcaggagctttgcccctcccccaccccacccccaaaatggagtctcactctgttgcccaggctagagtgtggtggctcaatctcagttcactgcaatgtgtgccttccgagttcaaatgattctcctgcctcagcccccgtagtagctggtattacaggttgcaccaccactcccagctaattttttagtagagacagggtctcaccatgttggccaggctggtctcgaactcctgacctcaagtgctctgcctgtcttggcgtcccaaagtgctgggattacaggcatgagccactgcgcctggccaaactttttagttggacatagtcccactttttagtttgatgtagtcccaccatttgttgcctgggcttttggtgtcatatccaaaaaaatcattgccaagatcaatgtcaaggagctttttttctattttctggggttttacggttttagatcatatatttaaatctttaatctattttgagtttatctttgcatatagtgtgagataagggtccagtttcatattcttttgaatgtgaatatacagttttcccgacaggatttattgatgagactgtcctttcctcattgtatattcttggtgcccttgtcaaaggctagttgtatatgtgcatgtttatttctgggctctcttgtgtttgattgttctctgtgtgtttttatgccagtattatactgttaggattgctgtacctttataatatagtttgaaatcagaaagtatgatgcctctagcatgttctttttcaacactgctttggctctttggagttttttgtggttgtataaaagttttagggttttttctttttttatctgtgaaaaatagcattggagtgttgatagggattgtgctgaatttgcagatcacttttggtagtatggacattttaatcattttaaaatattcttacaatctatgaacatgggatagctttccatttctttgtgtgttcttcaatgttttttttatcctttgttgcagccccaatgcctgtggactgaacaaagggggacggacacaggaataaagacaaagacaaaagagtatatttggaagaaggggtcaggggctccttgcttctagtgagcaagagtcctgagcttttagagcccttcatatttattgagtaaaggagatagggagaagcgggtggttgtcagtcagctgcttgacttggtgcaggcttgcacgactgcattctctgaacagtagcctccagatgtttcagtagataacctcaaggagcatggcgccagggagtaattgcactcagcataccttctggcggcagggcagatgtgagtttgcccacatcctgcattcatgataaacagtttgctgtttaatcatatagccttcagtggaatgcagagttggtcatgaccctttggcttttggctctctacagtcctttcttttttctttctttctttctctttctttctttctttctttctttctttctttctttctttctttctttctttctttccttccttccttccttccttccttctttctttctttctttctttttttaagagaccagcctcacattgttactcaagctggagtgctggcatgcagtggggcgatcatacctcactgcaggtttgaactcctgggctcaggcaaccctcctgcctcaggctcccaggtagctaagactataggtatgcacgaccatacctgggtgaagggctaagactacaggtatgcaccaccatacctggctaatttcttttctttgtagagaaagagtctcactatgttgcccaggctggtctcaaactcctgacctcaagcaatcctcccacctcagcctcccaaagcactgggattacaggcatgagccactttcctggcctcttcaatatcttttatcagtgtcttaagagctttcagtgtacagatcttttacttcactggttaaatctgttcctaagtattttattccttttgatgctattacaaataggactgttttctttatttcttttttcagatattttgtctttagtgtatagaaagatttagggcccctcttctgagacatcctcactgaacttaatctagccaatgcccagctgcctttaaactagacttaatattgtcagcacttgctggcaagttttctcagcaggcccaactttgtggtcttcatactgaaggcccagggtccttcagtttgcagtttgtgtacactcctgctgtgttgcatgtgcccagagatcctgtaccttttagcctagtttgttcatgcatgcatggaggagaggtagaaaaatgggggaaaatggaggggagtccatagaaggctccagaaagcaagggtgggccttcagatgagccatggtatggtgtgtgcacctgtcccaagtgtggttataagagcaaggggtatgtggaactcttggaaaggaatttcttaggtctggcagaagcacttggaagtgggattatgagtggttgtgcatggatcattttggaatgccacagtttctttattttttgctcggttgctcaggctggagtgcagtgatgtgacctcggctcactgtaatgtccgcctcccgggctgaaggcatcctctcacctcagcctcccgagtagctgaaactacaagcgtgtgtcaccatgtccggctgtttttttttgtattttttagtagactcggggttttgccatgttgcccagtctggtctggaacttctgggctctagtgacctgcccaccttggccttccacagtgctgggattacaggggtgagcaatcatgcctggctcattaatgattttcttcatagcatttgggaccccatctactgcctcttggttggagtggctgcttctgttatcttgacattttttaagccaaacttcttaaattatcagtccatattttgctggcatcaaactctccagctttagatcctttaccttcctaaagttgtcataaaataacttccctttttctcaaatcatattagagtctacaggtatgccttcattatagtgattttgcccctgtataaagctgcattttcaatatgagataaaaaaggtatttagcaaaaagtacattgttttcgtgcctactggtgtagctgcagtgacggcttcatgaattttctcttttaacagtggtccttacaccagattaatttatcttgaaatggcgggcaactgaatcgcacacctcaatctatggtacgtattaagcaagtcaacatgttcttataatgtcatggcttttctctacttcttgggagcacttccagcatcactagtggcacttcagatgggtcctgtgttgttattcagagtttatcgtattgcaccaaacaatgaaaaatgtgccagaaccacagagatcaatttttactgcggtctgcaatttactagagagattaacagttcacatggagatgattaacatcacggggcacattaagcaggtacctgagctcaccacaatagcaatgggaggtggctatgaaattattatagaagttcagtatgtagtacagttcattaatgcagttatgattgaatactgcgtctttacatttttttacatttattttgactgtagatggaaccatatacagtctagaggtgtttatataaatttggtacattttaacttagaatagatttgtgtgtgttttatggtactaagtgataaaatagactaatagttacatatattttatgcatttctggcatacctttttcttaattagggtacatggttcatctgtgagttttttcaaattgttgcaagtcttcaaaatatttttcagatgtttattgaagtaaattcttttataaatggacccatacaatccaaactcatattgttctatcgtcaactgaagtgagaagcaaggcctaagtggagtccacagggaggttgggcagctggagggttggttcgttggtcttgagagcgtggaacccagaactgtactgccataagcacttttcatggtgacttctgcggggtcttttgggagtgcaggaatcatgcaacttaccgaagtattatctggaaaatcacagagatcatttaggggggctacctttgtttttttttttttttttggagtattttgggctgcacgttaagatggttatagatgcattttggatgcattatctaaatgtcaatatggagagtttccttggaagatgttggggtctcattggggcatgtgtgcatcattgaagatatctgttttagtagatagtggtgccagtattcgggggtggggtcattacaggcatggaccaccgtgcccagctaatttttgtatttttagtagagacggggtttcaccacgttggccaggctggtctcaatctcctgacctcaggtgatttgcccacctcagcctcccaaagtgctgggattacaagtgtgagccaccgcgccgggcctctctgtttattttttggagttttttttcccctaaacctggcccatttcaaggttcagtttgataatgtggcactcagcacaagagacttcattctggcttggtctggtagttcgggaggctagtccaaaacaacagccttcccataaaaaacaatgagatcatgtcctttcccaggacatggatggagctggaggccattatccttagcaaactaacacgggaacagaaaaccaaatactgcatgttctcacttacaagtgggaggtaaatgatgagaatacttggacacatagagggaaacaacacacactgggatctacctgagagtggaaggtgggaggagggagatgatcaggaaaaataacttatgaatactaggcttaatacccggatgatgaaataatgtgtacaacacatccccatgacccatttacctatgtaaccagcctgcacgtcctgcacatgtacccctgaacttaaaatataagttaaaaagaaaacaacgaaaatactttgggcttccataaaatttgtttaactgtgtcattcatttttacttctacagaattactttaaacagtgtttactgatggtggtgtattgcccattaaatgcatgcacacacacagaccctaaagcctctagtttccttccactgtgccctaattaaaacaaaacataccattaactgtgtttctgcctgtagtgagtacccctcttctgtgcttcatttaagaccataatacaatacaatcttgttcagagtctctgtcttcacttgttgcctccaattgtgtcttgaatgcattggatgaaactttcatatccaccattccactgataactttatttttcagagtcaccagtgacctccccatttctaaatccaatgtatttcatttcctgctttactctttctttgcctgtcaggagctatttgattttcttgtcacctccctgaccatttcacactttcctctgctgctgtgtcctgactctgaatgtttcccaatgtgggaatgactcatggcttagtccttgaacctcttcttgtttctgtccacacccactgtctttcctcatcatctcatcttatgaatttaaaccccactgtattagtccattcttgaattgctataatgaaatactggagactgggtaatttataaagaaaacaggtttaattggctcacagttctgcaggctgcacaggaagcatggcgacatctgcttctggggaggctgcaagaagattccagtcatggcaggtgaaggaggaacaggcgtctcacatggcgggagcaggagcaagagagagtgaggggggaggcgctacacacttctaaacaaccagatgtcgtgagaactcactatgataagaacagcaccaaggggtggtgtgaaaccattcatcacaaatccacccccatgatccatccacctcccaccaggccccaccagtaacagtggggattacaattcagtgtgagatttgggccagggacacagagctgatccatatcacccacctacccacctacacgtctccatgtcccctgcagacctgtcccctgaactctagaattctgtgtccttttgtcctctcctctctctgcttagccatctaacaggtatctccaccaaaagtgattgcctgaactcaccaagtacattcccctgcactcctgcacatctcagatgatggtgaccctgtacttcctggctttagctttacatgtcagcatatatttgaaacagagaaaacatgacattaaaaagaagtgctttaattcatgtgataaagaaaagttatgtttacttaaaaagggtgaggaaatgcatagtttctgaaattactgtgagctgtgggagaaagatgtttgaatacctcatctctacctaatctgctccccagaacctctctgacctcatctcctccctgtgtccttcctgctccctctgctccagccacacaggcctctttcctgttccctgggctgaggttgctcctgcctcagggcctctacctgggctgtctggcccctcagctgcaggtgcaaacatccttccttcttgaggtctttgttctgatatcaccttctccattgggacttctgtgcctcaccctcctctcaccatttaacactccagccacaccctcaccccacccctggtgcatattatgtgtctctgtgtttctggtccattgtgttctactgtctacaaactggtaacagtgaagccccaaggggacagcagagctgggaggatggggctgtgctagtcttgccccctttaagatgtgttcaaccctggcttcacattagcgtgctgaggcagtttgcaaatacacgttttgtgcccttttaccatagattccacttccagtaggtaggatggactcaacctccatattgtttaaagtacccaaattgattctaatttgtatccagcattgagcgtccagcctttgtgtcttctgtttctgagagctgagctcagcctgtgatccacagggaggtgagggggctgtgctctgtatggggtttgatcagggatgggtctgtgtcctgaagggaagcatagtccagcccagctccccactgttgcagggtgtgtgggggcttctctgggaggggaacaagttctgaagaaaagggtgaaaaacttacttggtctttgtgtaggagtttattatgcttgcatccccctggtgcactgggctgtctctccacatgctgaggccttccctgtgggcatggttgtggcacagaaaggaatgtgttgtttccaaggattaaacaacatatttttgactttcagatttgacttttaaagaattaattatattgactgagagagaggcccaggagagaaagaagaaagaaaaggagccagggatggctcttcctcaggtaaagtgataatcttggtggattgttctgtctcctccctttttgaaatgcagggcattggagctgcaaatcttctctgagtctgaagtatcctgcctgacacatttgctcgcactcacccatgccttccttcagtccctctcttctgcacttagattccagatctcacagtgactcagtgacatgagcttgggaagaggctccactgggcatggtcctgggaagggctcacacccagacatggatggagacagggtgtgagttctgtggtgtcagcttttgggcagcagagattgtttaggggcaacatctgaatgcactgtcagctctcagtagaccaggagtagagaagctgtatgtggaagtcacatgttaatatgcaaaaatacctcataaattcttgaaaagatgcctctaaggggagatcttttctgcctgattttataccacatttgaagctataatgaatcagtcactctttctaactccacaatcttaatgaccgggaatggaatggaaaactaggtacagacatcagtgatagaggttgttttattccatcattgattttaaaatatgaaatcaacctgaatgtcagattaatttagccattctcagcatatccatcccacagagaatgtggtgttcctgctgggactcttaccggcagttgttttttgtaaaacggttataattttgctcagatgtaagagccaaacttttttgatgtcagagaagatggagccaaattctgtcattccaccaattattattaaatattacatttattttaaacatcacatgatatatatatttgttttgtggtaaaagtccaagcagagatggaatttagacattaagaaggtgatgcaacataaggatggtagggaataacgtgttattatatgtgaaatttatgctaaatgagattttagctgtttttgccacaaaagcaaaaaaaaaaaaaaggtaactatgagatacggatatactaatttgttaaactgtcgtgagttttttactatctataccttgctatattgtgtaccttaaatatacacaataaaatttgtaagcaaacaagtaaaaaacagggcatcaagaacacccttcataacctaaaaaaagaacatcaaggcatatatatttaaaaacttttaactacagaacatgaaatagctcctagaatgcagtaaaagaaaattgagcataaaatgaaaattattttattttgatttccacaaaataatgaaatgtcctcacagtccaaggaattggaaaatggaaatacaaagaatttttattttttttagatcctcaaagagaaaaaagaacatagtagtatttttttttttttttttaaagagtgggacatgtcatgtgtcattggtgggagggggcacccttgaacttggggtagtggggaatcttgccagattcaccaaaataggaaatgcaccatcctagaagaggcaatcactctttcaattacccacccagaggaacccaggttccttttccctgtcacattctccaccatgcctcatgtttcattgaggagctactattgtaagttctgtggcaagagtcagtgagaggtgtcaagatgcatttacacgtcattatgagattttagaaaacaattcttaagtgaatgttctgctgtattttgcaagtttttgaaatgtacattttttttttttttttgagacggagtcttgctctgtcgcccaggctggagtgcagtgacgcaatctcagctcactgcaaactccgcctcccgggttcacaccattctcctgcctcagcctcctgagtagctgggactacaggcacctaccactgtgcccagttaattttttgtatttttagttgagatggggtttcaccgtgttaaccaggatggtctcgatctcctgacctagtgatccgcctgcctcagcctcccaaagtgctgggattacaggtgtcagccaccgtgcccagcctgaaatgtacatgtttttatgttaataaacactaatagcgtattttgcatcctctttggagcaatttctaaatgaagacatatggatcttttacaatttttcatttttgcaaagaatgtcactgtggcttcctctgtgcatgctgtcttcaccacaagtgtctgagggttacttcaatggcagttcaaagaatgattgcttcttttaggatggtataccacaaaagcaaaaataagtaaatgtttgttttatcttctggaaggcctggctcacggtgtgattataaaatatgaagtttctttaaaatctcatgtttcttgcttacattttctttgcatgaatttttttgattgaatctttaatttgaatttttgtgtatatctttttgtagattatatttgattgcttttaaagtttcagattataaatgtcataataggttcatatgaagattggcaaacctctccattttctttccaaaattttgttggttctttttttatacaacagtcacattttattaaattcccacatattttgtttgtgtttgaatggccatgaatttttacagtcgcaggtcttgtcaccatcacatcttcctataagaattgagtttgtcagtcagtgatcatatctttattatgtctttcagtaaagcttgtttgtttgcttacagtttagtaatgttaggtatattcacattatttattgggctttcaggatacatacgttcttgatgcttgatggtttccccatgagccctttagactctctttatttttctttattttttatagtttttgttttcctccgtgtcaaaatcccctttgagttcactgattccttcttctgcctcattaagtcagctgttgaattcatctagcgaatttttcaactcagttattgtatttttaactcgactttttttctttcttttgttttgttttcaggcagggtttcactctttcccaggctggagtgcagtggcacgatcttggatcactgtatcctctgcctcccgggttcaaatgaacctcccacttcagcctcctgagtagctgggactacaggcatgcaccatcacacctgcctaatttttgtactctttgtagagatgggattttgccatgttgccctggctggtctcagaactcctgggcttaagcaattaccccatcttgggctcccagagtgttggaattacaggcgtgagccacggtgcccagccttagaatttctttttgatttttctttatagcttctatttctgttgatattcttctttgcatgcatagttcatatagttttcctgatttcgtgagcttgtctgtgtgtgctatcttttaactcattgagcattcttgtggctgctatttcaaattctttggtaattcacatatagtcagccctctgtattcatggctcgtgcagccatagatggagccaactatgaactacaaatagccagaaaaaaatggatggtttcatctgtgttgaacacgtatggtcctttttttcttgtcattatttcctaaacaatgcagtataacaactacttatgtagcatttacattgtattagctattataagtaatgtagagatgatttaaatcatatgggaagatataggtaggttatatgcaaatactatgcctttttatataagggacttcagtatccatagattttggtccccttagggaatcttggaaccaatcctctgcatatactgagggtgatccccatttccttttagttcttcaaagccaagatttaaatcaccatttctttagtgtaggtttgtagagacttaattggtttctttttatggactgtattttcctatttctttgtaagttttattatcttcttttggcacttccctattttaaaaatcatctacctccccagttttgggtggttgctttgttcagggaggacactctggagtcaactcagctagattgtggagaccttccacaccttttctggctggggattttgtcctctctgggcctttgcttgtcatctcttcattgaaaatgtttgctagtttctacccagaagctcccctgttgtctgtctttgatattgcagactttggtgctacagtaagctgtagtactagatatgcacttagcgtttgtctgtgttactgcacacactggtttatgtaaatcatcctttttctcagtggcccctaacctttcaccttgttcttgtcagtgcttatattcaggaagagagaaaccagcccatcagttggtcatctgaaaagtcaggaagttggacagatattctgctcctttccatcccctagatgatcttgggagttgtgggtttcttttctgttaccccagtgcatggcaggggctggatctctgtcaagtggatgcttcaaattttccttcagagcttctatactgtttgctttatgtcagcctgaggtgtagaaacctcctaactgttttctggatttatccccgaggcaattagtccatgaattgttgttaaaatcatttcactgtggtgactggagagtttggggattcctgttcctttatcttgccgacatcactcagtgtagttttataatttgttcacataattctgaaaatgtattgtacttaagtgccatggtatatatgctaatgaaaatttagaagtgtgtgtgttgtttttaaattagtgttactaaagtaggaagattatttcagtacattgttagcattgttagcttgtatacttaaacattctttttctgggttgcaatcatgttatctctttttttttttttttttttccctgagatggagtttcgctcttgttgcccaggctggagtacaatagtgcgatctcagctcaccgcaacctccgcctcccaggttcaagcgatcctcctggctcagcctccctagtagctgggattacaggcatgtgccaccatgctcggctaattttgtatttttagtagagacgggatttctccatgttggtcaggctggtcttgaactcccaacctcaggtgatcctcccgccttggcctcccaaagtgctggaattacaggtatgagccaccgtgcccggccacaatcatgttatctcttaattttagtagatctaactctttggctctaccccctccttgcctttttccctcccaccttttctctttgctgctgctcagacatccagtgcagtggtgaatgacaggaggtctggccaacccccttttctcttaatttagaggaaatgaaaaacccccttttctcttacttaatttagaggaaatgaatccagtgtttcacttgttgggtgaaatatttttccttaacagtttttgggttttttttttttttttttttttacagatttcctttgcaacatgatttttaaattttctaataatttatgcaagcatatactgctgcaatacatattgtttctatcttaatctgttaaattttaatgtattacacttataaaccacctaatcttgaatcactgttttatttattggtggaataaacgaataaactccatttggcttttgttaatgcataagtagctaaatttaactggataaaattgcacttagatatttaaatataggcatttaatagtaattgtaataaaagtttatatacttttaaaattttgtaccattttctccagcctagtattgaataagtacaaaataaataagtaaatgaagtactaagtaaataagtaaatgaagtactaagtacaaagtaaatgaaatacaatttatacattttcattgtcccaagcatgctaaaacatacatgtctaagaataatgatttaaaaagtcatccaaaaaatatgtcattgagagatagcgtcttatttcagttaatttaaatgtttgtatgctttggtttttatttacaacatcatcatttcataaatcagcctattatcttttcacagttgaaattatttacttggttttattttaatttttttcttttctctacataagatacaggcttgggaacactattgaaaattatatcttaaatgtttctatggccttaaaatgttttttctttaaaaactttttttttttttttttccgagatggagtcttgctctgtcacccaggctggagtgcagtggtgcgatctcggctcactgcaagccctgcttcccgggttcatgccattctcctgcctcagcctcccgagtagctgggattacaggcgccggccaccacacccggctaattttttgtatttttagtagagacagggtttcaccgtgttagccaggatggtctcgatctcctgaccttgtgatccgcccacctcggcctcccaaagtgctgggattataaaaacttttttacatatttctttgtcccagtgatttgcttaatttttaaaattgccttctatattatcatgtgaatggattagttttatgaatagtaatgtattatgtgtgtgcttctgtgtgcttatatgatgatcttttttttctttgtttttgagatggggtctcactctgtctccaggctggagtgcagtggcatgatctcggcccactgcaacctccacctcccaggttcaagtaattctgtgtcagcctccccagtagctgggactacaggtgcacaccaccacgcccagctaatttttgtatttttagtagagatggggtttcaccatattggccaggatgatctcgatctcttgacctcatgatccacccatcttggcctcccaaggtgctaagatggaggtgtgagccaccacgcctagcctatataatgatcctttatgcggttccaagttaatcttgaacttgcttcaagttttctcaggcaaccctctgtcagtatactgtagcattcgtcccctatgcagcaacaagaccatcttcgaagcagggattagccctcagcgacatcagtcctgctgacaccttgatcttggattccccagccagcagaatcatgagaaatacatttctgttgttcataagttagttagtctctcttatttcgttatagccacacagaaagactaggacatactctgtaatataactgtcggattctgttgattcaactctaatttttagacatctgggttcaggtgcttgctctgctgtttgcaggttgttgacctaggtgactttcttagcctgtctgtgacacagttgtcttctagtaagatgggaagaaatatttctgtcataggtgattatgtcatcatttgagttagaacacgtaaatcctttgaagtaatgcccggtacatggggagtgttccaaaactttagttcttgctgttgctcttgtcatcgctgtttttagtttctgacctttctttaaagccactaagaacattgtcatctctgaagacaccacttgtattctagctcatctggacacctcacttggtgtaacaaatgtaatatctaaaactttcatagggataaccatgtgtttatttcttattttgtccacaaaagtgagaaatgtgcaccgatttagataatatcctaatctcctattgaattttataaaacccaaaatcagggagacgtaattatctcacagatacttttaatggatatgtcaaaacacacttcaatcaaattgatgtgacagttctctcctcttctcattttatgtaaagataagagctcacccactgctcatattgaaatgtgtttttcatttcagggatctttgacattcagggatgtggctgtagaattctctcaggaggagtggaaatgcctggaccctgttcagaaagctttgtacagggacgtgatgttggagaactacaggaacctcggcttcctgggtgaggatagttttcctccagaagttaggatcttcccttgtgcatttttgtactttccttattgtgtttcttgtgaggccctacattatttgacagagactgaagccttgttgattcacaaataaaaagcttcataatgctgcatctggcctttaactgtcccatttctatggatattctgcttccttctttgtacattagtggtgactccagagctgaggtacgtgtaaaaccttatggcggagttaatatatccaattccctgttcttcctgttttctatccttgtgctttttttttttttttttgacacagtctcagtctgtcacccaggctggagtgcagtggtgtgatcttgtgatcttggcacactgcaaccttagcttcttgggataaagccatcctcccaccttagccttccaagtagctgggactgtgggtgtgcaacaccatgcccaggtagagacagggtttcactctgttgcctaggctgatcttgaactcctgtgctcaagtcatcttcccgtcttggcctcccaaagtgctgagattacaggcttgagccagtatgcttggcctatccctgtgtttttgattcagtatttcttgggagagagctagatatcttcatcttacagtgttcactaagcattcagaaggaggcaatcaatggatgagtttgtgaaatattttgtagattcaactgcagtgttttctcttctacctagacattaggctgggttctggaaaaaccgtgggacatcttctttctttttttataagcaggactctgtcttcctgacctgaatattatctccatgttggagcaagggaaagagccctggactgtggtgagccaagtgaaaatagcgaggaacccaaactgtggggaatgcatgaaaggcgtgatcaccggtaagagctcagatgggcacaatggaagcggtaccatgaaattgtgtgcgtaagactctgcaagtgggagagttctgtggggaaacaaatttgattttctgtgagctccagaagttttcttctttcctgcttatcactttgctttccagacacgtataactttacctttcactctccaggggttgctgcagctcaaacagagcaaagtacaagactgttatgatggaccacagtgtcatctgtattgtgtgaactctgatgctttgactctgtggcatgggaagggccttttcaaagaagtctctttcccgtgtggtctctcctcctgttcttgattccatctgatcctcagttctctgatccatatagattggagctgagggctccatagtcctggtgcctggaacttttctggttccaccccatttcctatacttgaaagtgctggtcaggagatgaggaaacattggttgcccttcctttgaagctggggtcctagaactggactatcttcagccctctctgcctgttcaggtccctcagccattttcttagttcttctttggacactcttcttgggtttgtgacacgggaatgagttgggtctcctgagattgttacatataagaattgtaaagacagttgacacaaaggtcctctctttattcttagtcctacacagggagcgtatctctgtcttcacactcttagtttgggatctgtggacagagcactgtctcatttcaagatccctcacaatccaattcctgtgtttttctctgtcttgtttatgccttggctctttctgatcttgcattctcttttatgtttgtgtgattttttgcctctgagacttgctttggataaatgcatttctagggtcggacattttatgcttttttcctgctgtgataacccatcttggggttatgaatatcttgtggactattgtatggagtgagtttactgggtaagagaaaatttttgaaggagagcactttgagtaatgagttttaacatcatcttgctacatacagaggtaactattaaagccagagtagaatgatcagcatttgtcatgatattcagatagagaccatcacaagagcctggtttctgagaaatgtcacaaaagtatctttcaagggtactgtggcaatgttgatctcatatactaatggtcctcttttttgagctagcagtgaatggtgtaggaatttctcccatgccgggcacggtggctcaacgcctgtaatcccagcactttgggaggctgaggcgggtggatcacctgaggttaggagttctagaccagcctggccaacttggtgaaaccccgtctctactaaaaatacaaaagttagccgggcgtggtggcaggcacctgtaatcccagctactcggggggctgaggcaggagaatctctcaaatctgggaggcggaggttgtagtgagctgagattgcgccatgcactctagcctggggaacaagagcgagactttgtctcaaaaaaaaaaatttctcccgggaagaacattgtccaggttcacagcttcatctctgcagggctgttgcctgaaccactgctcatgccacacttttcttccccagtatttttgtttatagtgagtacgactttgatcttgaggaagctaatgaagttgaatgaggcttatcttttttaagtccacaaaattcgttttaagcaaccattgctttcatctgatgcattttcatgtattataaatgaactttgtttttatttatttaatcagttccatatttttgaggatactcagttttctttgttttatgtttctattgtggtagtgttgtgttggggaatgcatattgttttatgtattttacaagatttccttctttagtacagatggtatagctcagcagcagtttccctaaaacttacagaaactccataatgttgtattgatagtatcagttattccttttacttctgtttcacctgacttaattcctactatgaaagtatatatttgtcggttaaattgattacagtttttaagttggaaatttttaatatcttgagcataattttttaagttactatcttaattgtggaaataccatttaatagattgatcgttctttgttatataacatacattgcttttctgtagtaagtttcagtttcctaaatatagcttgctgggttttgttcaaattgcactgtttttttctttcttggaacaaatgctgtattataataactattctcctatctacattcatgtccatcatgttatactgaatcattatttaaaaatctaactttattttaaacttagcccatttcttacacttcagggacttctctactatttataaaacctatatatttttttcgtgatgctcaagcaatgaagaataaattctcttaaaaaactggtattgggccaggagcaatggctcatgcctgtaatcccagcactttgggaggctgaggcaggcggatcattttgaggtctgaggtcaggagttcgagaccagcctgaccaacatggtgaatccctgtttctactaaaaatacaaaaaaattagccgggtgtggtggcacatgcatgtaatctcagctacttgggaggctgagacaagagaattgcttgaagccagtaggcagaggttgcattgagctgagatcacactgctgtacttcagcctgggcgacagagcaagaccctgtctctaaaaaaaaaaaagaaaaaaaaacaacaacttgtattttgtccagaaaagtttttcctagattttcttctagaatttttgtagcttgaagacttaatgtaagtcgttattcatcttgaattaatttttgtatatgacaagagataggagtccagtttcattcttctatatatggctagccagtttttctagcaccctttattgaatagaatgtcttttcccaatttttttttgactatcaaggatcagttggttgtaggtgtgtggctgtatttctgggtttcctattctgttccattggatatcttctgttttaatgttagcatttatatctgcagattttctatcttagcactgtttttcctgcattcacaagttttggtatgttctattttcattttcctttgttttgagatttttaaaatttcccttgtgatttctaatttgacatattggctgtttaagagtatggtccttgtttgtttgtttttgttttttgagacggagttacgctcttgttgtccaggctggagtgcagtggtgcaatctcggctcactgcaacctccacttcctgggttcaagcgattctcctgcctcagcctcccgagtagctgggattacaggcatctgccaccatgcttggctgagggtttcactatgttggccaggctggtctcgaactcctgacctcaggtgatccacctgcctcagccacccaaattgctgggattacaggcgtgagccaccacaccggcctaagagtatgttgtttccacatatttgttgataatctaattttcttctgctgttgatctctagttttattttattatgatgggataagttatgctttacgattttagtctttaaaaagtttaaaattttttttcttttccgatatttcttttgaaaaatgtttcatgtgcagttctgaaaaatttgtattgcactgtttttgggtgatgtgttatgcatatataggttaggttcaacttgatatatagtttaggttctctagttccttgtttttcttctgtctgattgtcctatttataagtaaaaataggccattgaagtctcttattattactgtggaactacttctccctttagttacgttaattttgcttcacatattgaggatctctatataggcacatattgttatatcctcctagtgaattaaccttttaatcattatataatgcccttctttgtctcttgtaccagttttgacataaagtctattttggctgacatcagtttagccacctctgatgtctttcggttaacattttgagggcatatcttttttcatcccttcagttcagcctatgtgtgtcctttgaattaaaatgagtattttctggatagtgtgcagctgaagccagttttaaaaatttattcagccagtctctgtcttttgactgtggagtataaacacttacatttaatgtaattactgatagaaaaggacttatattgccattgtgttaagtgctttctatatctcttttagatttttttgttctgtttgtcttactgccttcgtttttatatagttgatttttttttcctgaaatagttttatttccattgtgtgtgtcttctatacattctctgtggttaccgttgcaattacagaaaacactttagatttataacatcctattttaaactaataacagcttaacttcaattacatacagaaatgactttttacagatctgcttccatgttgtgtttttgatatcccaggatactttcatcgtatatactgtgtctccattaacatatatttaaaccttgacaagagtctcctgctttctttgttttctcaaatctttgcctgttgtgctacgggtcctcattctgcaccccgtctccttaacgttcttgtactatcagtaaagttttgtggtgtctttgtgtgtgtacaaaatgaattcatccatctcctcttcgtggccattttcaggttttttcttaaggattgaattgtaagaacagtctttcacatatctcttgatatgtagggttgttgagcatatacctggaaatagaacttatgggacattcagtttgataaatttcatagcaaatattatagagacataaatctgttttcttcccatatcatcacaccgcctcctttttaattgtcttcccttgttgtcctgcacccatagtataattctcatgtttaagtattagtcagtacaatactacctctacattagtttctcttttcttccaaagccaggattttagctgtttcttgtgcaattctattcccacagctcttcaagcacaaaccctgctgctccatgctcattactccttgatctcccctcttgccctttgtcctcctgggcctttcctaacatattactttgtccagatggactacccagttactgactagcatattaattttatactcccattattgcagaactccctcacctcccatgctactctcactctgtaaggggtgacccctactcattcacttgaccactgtctgataacactgcgtaaatcaatatgtgcaggggatgatgactcagataccgttcgttattcatgacggatggctgaataatgcttttggcaacacagcattgcagggagccaaagcctgtgggacgtgaccaactcagcattccactggaggctatatgatcaaacagcaaactgtttatcatgaatgcaggatgtgggcaaactcatgactgctcctgctgacagaaggtttgctggaggcaatcacttcctggtgccagggttatctactgccatatctagagcctgttgtttgaggaatgcagtcttgcaagcctactctggactgcgcagctgaccccttcttccaccatccttctcactatctctcttgcctaataaatacggacggctgtgtaaagctcagggcccttgtccactacaggcaaggtgcccctgaccccttcttccaaatatactcttttgtctcttgtcttttattcccgcattcgccccctttgttcagtcctcctaggtccatgtgggttacatagtggcaccctgaacagcgacagaatcaggtgctctacacaaaatggctcttgaagtatttctacactcttgatatttgggttgacctgttatctgcactgcttgtttgggaagttgtttttaaaaaacatgtttgatcttgcaaacccaggttcttgtgtcttactttctttgtaaattgggtatagatacataaatcctgtgggcatatttagtgtgcttgtttgttaaatagtgataatttacctaaagactttttaaacaagttaatgctgttagctagcttagaatattgcatgttttatagtacagactcacaaatttgtttaataacgtgtatcaacattgtttcatgtttataatgagatagcatattggctttaccttagtcagcatgactagctatatcagataccatagatagggtggtttaaacagcagaaatggacttttcacagatctgggtggtgcaaagttcaacatgtcagagccagccactttggttcttggtgtggacttttttctggtgtgccatggctgactctgtgttctcatgtggcagagagattgtcatgcaaaaagcagaggctttttcacgtttctgctaattgcattcctgaagttctatgcaccatcctgacctaattgccttccaaagaccacacttccaaatactatcacattgaggatggggccttaacataggaattttggcagacataagtctttatatcagagcagtctacattgtatctgtaagttttcattttgcagtttggtccaaacggtgttgtcttttatctcagttcatgcattttccaagtacaatctctgtatcatatatattttgtggccaaggaactggataataaagacagtgaataggactgggcacggtggctcatgcctataatcccagcactttgggaggcagaggtgggcagattgtttgagcttaggagttccagaccagcctgggcaacatggcaaaacctcatctctaccaaaactacaaaaaaattaaccgggcatgatggcatgcatctgtggtcccagctctcaggaggctgaggtgggaggatcgcttgagcctgtgagttggaggttgcagtgaggtgggatcatgccactgtactccagcctgggtgacagagtgagactccatctcagccaaaagcaaaaaaagacaatgaatacatagggacttgctctgttgtttgttacatagttgtaggcatgaaatcataactgagatttctgatttcctttcccaagttttattctttttttgaggcagtctcgctctgttgcccaggctgaagtgcagtgtcgtgatcttggctgactgcaacctcccccttacaggtttatgtgattctcgtgcttcagcctcctgagtagttgggattacaggcatgcatcaccacgcttggctaatgttttatatttttagtagagatgaggtttcaccatgttggcctggctagtctcaaactcttggcctcaagtgatctgcccaccttggcctctcaaaatgctgggattataggtctgagccaccatacctgtctccatttttttttttttttttgagactgctctgtcgcccaggctggagtgcagtggcgaaatcttggctcactgcaacctccgcctcctgggttccaatgattctcctgtctcaggctccggagtagctgggattacaggcacgtgccaccacacccggctgattttttttacttttagtacagacgagatttcaccatgttggccaagctagtcttgaactcctgacctcgtgatccacccacctcggcctcccaaagtgctgggattacaggcttgagccaccgtgcccggctgacctgtccccaatttttattctttattattttatatatttacctttctctcatccaagtactaaccagttctgacactgcttagtttctgagatcagacaagatcagatgcattcacggtggtatggccatagacatatttacctttcttttatctttaaaagccagtgatctcaacatattttctagttatatactgcctctagaatataaattcttgcttattattgatggagaattgtttagaatttcatactatagatttgtattttgtggttgttcattatttacctgctggttttatcacaggctattagaatgttttattaattaatttatattatgattatttattagttaatatttaccattacagtatatcttgctgttgcttggcattcatttgtatgaaataaatatatgtaactttttttctctcctattatgagggagccatatgtttactgccaattggtgtgtcatttggggtcagcgattgcaaaatacttgttttggtgctcatatatgtttgcataacatgagtcttttggtcgaaggatgtttgaaactaggctttcctaaaattgatttaaattacatgtaatcactttttctttactatagaattctattcattttgcatttctacaaatagaagatcatggtagaaaagtttcacaacttgctagtataaacattatgtttagcgtagtgtgttttcagtataaaataatatttaccaataatagttattttaaaaccccatgttcattatattttgcaggtatctctcctaaatgtgtgatcaaggaattaccaccaatacagaacagtaacacaggagaaaaattccaagcagtgatgttggaaggacatgaaagctatgacactgaaaatttttacttcagggaaatccggaaaaatctacaggaagttgactttcaatggaaagatggtgaaataaattataaagaagggccgatgacccataaaaacaatcttactggtcaaagagttcgacatagtcaaggggacgtagaaaacaagcatatggaaaatcagcttatattaaggtttcagtccggtctgggtgaattgcagaaatttcaaactgcagagaaaatttatggatgtaatcaaattgagaggacagttaataattgttttttagcttcaccacttcaaagaatttttcctggtgtccaaaccaacatttctaggaaatatgggaatgattttttgcaactttcgttacctacacaagacgagaaaacacatattagggaaaaaccttacataggtaatgagtgtggcaaagccttcagagtgtcttcaagtcttattaatcatcagatgatacatactacagagaaaccttacagatgcaatgagtctggtaaagcctttcatcggggctcactactaacagtacatcagatagtccatacaagagggaaaccataccaatgtgatgtatgtggcaggatcttcagacaaaattcagatcttgtaaatcaccggagaagtcacactggagacaaaccctacatatgtaatgaatgtggcaagtcctttagtaaaagttcccaccttgcagttcatcagagaattcatactggagagaaaccttacaaatgtaatcgatgtgggaagtgctttagtcaaagttcctctcttgcaactcatcagacagttcatactggagacaaaccctacaaatgtaatgaatgtggcaaaacctttaaacggaactcaagcctcactgcacatcatataatccatgcaggaaagaaaccatatacatgtgatgtatgtggcaaggtcttttatcagaattcacaacttgtaaggcaccagataattcatactggagagacaccttacaaatgtaatgaatgtggcaaggtcttctttcaacgttcacgtcttgcagggcaccggagaattcatactggagagaaaccctacaaatgtaatgaatgtggcaaggtcttcagtcaacattcacatcttgcagtgcatcagagagttcatactggagagaaaccttacaaatgtaatgaatgtggcaaagcctttaattggggctcattactaactgtacatcagagaattcataccggagagaaaccttacaaatgtaatgtgtgtggcaaggtctttaattacggtggatacctttcggttcatatgagatgtcatactggagagaaacctctccattgtaataaatgtggcatggtcttcacttactattcatgcctagcacgtcatcaaagaatgcataccggagagaaaccttacaaatgtaatgtgtgtggcaaggtcttcattgacagtggaaacctttcaattcataggcgaagtcataccggagagaaacctttccagtgtaacgaatgcggcaaggtcttcagttactactcatgcctagcacgtcatcggaaaattcataccggagagaaaccttataaatgtaatgattgtggcaaagcctatactcagcgttcaagcctcactaaacatctggtaattcatactggagagaacccttaccactgtaatgaatttggtgaggcttttatccaaagttcaaaacttgcaagatatcacagaaatcctactggggagaaaccacacaaatgtagtgaatgtggtagaacttttagtcataaaacaagtctggtgtaccatcagagaagacatactggagagatgccatacaaatgtattgaatgtgggaaagtctttaactccactacaaccctggcaaggcatcggagaattcatactggagagaaaccttacaaatgtaatgaatgtggcaaggtcttccgttatcgctcaggcctcgcacgtcattggagtattcatactggagagaaaccttacaaatgtaatgagtgtggcaaagcctttagagtacgttcaattctgcttaatcatcagatgatgcatactggagagaaaccttataaatgtaatgaatgtggtaaagcttttatcgaaaggtcaaacttggtttaccatcagagaaaccatactggagagaagccatacaaatgtatggaatgtggcaaggcgtttgggcggcggtcttgcctcactaaacaccaacgaattcattctagtgaaaaaccttataaatgtaatgagtgtggcaaatcttacattagtcgctcaggcctcactaaacatcagataaaacatgctggagagaaccttacaactaaactcaatgtggaaaggccgttagatgttgtcctaacctctgggatccccaaataatttatacttactcatatagcttgtatatttgtcctttccctttgaagtctcatgtggaattgtagtaatctccagtattggaggtggagcctagtgggaggtgattggatgatgggggtggctttctcaagaaagttttagtaccatccccttgttgctgtccttgtgatagttctcatgaggtctggctcatgcctgtaatcccagcactttgggaggctgaggtgggcggatcacttgaggtcaggagttcaagagcagcctggccaacatggtgaaaccctgtttctgccaaaaatacaaaaattagctgggcttcgtggcgggtactggtagtaccagctactcgagaggctgagtcaggagaattgcttgaaccctggaggcggaggttgcagtgagccgagatcgcgccactgcactctagcctgggtgacagagtgagactccatcacgcacacgcacgcacgaaagtgaatggcacctccctcttgtttgttcttctggccatgtgacatgcccttcacctcccaccatcattttaaccttcctcaggtttcccgagagggtgaacagacgtcagcgccatgtttcctataaagcctgcaaaattgtgagtcaattaaacctctttatacattacctagcctcaggtatttctgtctagccatgcaattatggcctaatatatttacacatggagtgaatatagctaagttttttttttttttttttttttttttttttttttttggagacggagtctcgctctgtcgcccaggcgggactgcggactgcagtggcgcaatctcggctcactgcaagctctgcttcctgggttcacgccattctcctgcctcagcctcccgagtagctgggactacaggcgctcgccaccgcgcccggctaattttttttgtatttttagtagagacggggtttcaccttgttagccaggatggtctcgatctcctgacctcatgatccacccgcctcggcctcccaaagtgctgggattacaggcgtgagccactgcgcccggccagaatatagctaagttttaagcaagtgttcactaggcataagaatatacatcctggagagaaatcacagaagtgtagtatatgtggcaagaatactacttaaaggtcaaaacttgtggatctataactcaaagtgcagatatgctttacaaatgaaatgagggtggcagaagcttcaccagagttcagtcactacttgagagtttatattggaaagaaatcgtataaatgtatgtgctagaggcttccccgaggtgtctgaactcactagacctcagaatatacatctttgacaaatgtaatgtgtgtgctaagactttttacccgaacatccaaatggaaacatcagagtattcatactggagaacagtcttacaaatgtaacgaatgtggtaagcctttttaaaaatcaaatgggctgggtatggtggctcacacctgtaatcccagcactttgggaggccgaggtgggtggatcatctgatgtcaggagtttgagaccggcctggccagcatggtgaaaccccatctctactaaaaaatacaaaaattagctgggcagtggtgggcacctgtaatcccgctacttgggaggctgaggcagaagaatcacttgaatccaggatgtggaggttgctgtaagccgagattgcgccattgtactccagcctgggtgacaagagtgagactctgtctcaaaaaaataaaaaaatcaaatgttcatgtttttggagtttgagagaatttatacaggaaaaaagtcatatcagtgtgcttaacatggaaggacctttaatcagtagtgtgtcttcaggctttaccaaattattcatactggatagaaaccttgcaaatgtaattaacgtggtaaaattttaaaccatttctcagccagatgcggtggctcacgcctgtaatcccagcactttgggaggccgaggcaggcagatcacgaggtcaggaaatcgagaccatcctggctaacacggtgaaaccccgtctctactaaaaatacaaataattagccaggcgtggtggcacgtgcctgcagtcccagctacttaggaggctgaggcatgagaattgtttgaacccgggaggctgagcttgcagtgagccgagattgcaccactgcactccagcctgggcgacagagcaagactccgtctcaaaaaaaaaaaaaaaaaaaaaatttctcaacagattccatgttaggtaaatcatactatggataactaagtctgcttctccatccaggattgacctggaatgatacatacggtaaaataaccacaagacaaaatttgttaaaaccccaggtaatatgtacatcaaaggatcaagagcgtgtgtggaaatggccaattcagtatataaaataattgtattcactttgacatttcttaaaaaggctagttgactatttgtgaccttcatcctaaagtatgaagtcttgcctttcctacacatctttcattgtggtctctgggaataaatcagtaaggtgagagggcctgcttcattaggtgtggttccttcatatccatgttttctggaagattaaggtcactgtactgtgtgagttaagcagcatggaatatggtggagaatgatgtaaatttacaatgtaagtcactgagcttgttgtgttcagagtgtcctttgacaaatacagtgttgctttgggatatgggaaacatacggagtatgtttcactaacctaaaaatctgtgctccacctagatttgtacattcttttcacttctgtcacttgttgcttcacatgttttgcagctggttttaagtgcatacagacaagattctcaaatcatctttgtaaattgacattattatcatgtcaccaccctgttgcccaggctggagtgcaatagtaataaggtcaacttttggaacccttctgcaaatttcctaggatttttagagtagcttcctagcttttccttacattgctgtatatcagttatagagaaggggacctgcaataggactggccattcggctcctgctgcttccctacggggtagcaaggctggagggagagtagaatatggtgttccccactgagtgtttgggggacttagtagggtccccagtgtttgctcctggttttagcctcaggagcacttggtaagggggctatagggatggtcgctcttcacccttagagacaagtggctcttgtaaaagggggtcatctggtttggcacggtggctcacgcctgtaatcccagcactttgggaggccgagctgggcagatcacctgaggtcgggagttcgagaccagcctgaccaacatggagaaaccccgtctctactaaaaatacaaaattagatgggcatggtggtgtgtgcctgtaatcccagccacctgggaggctgaggcaggagaattgcttgaacctgggaggtggaggttgcagtgagcggagatcaagccattgcactccagcctgggcgatgagagcaaaactctgtctcaaaaaagaaaaagtaagagtgggggggatcatctataatatctaattctaccttagaactttcctttggtggtgggggtgggttctgggagtttgacagattgttaggttttggtataaggtcataaaatcctgtgcatatgggatttctgaccatttgccctgcctcttgcaaaataggtctaatggcaggatggtgtcataattaaggctaccaagactgcccattgttccaggctgggcagttcataatgggggcagacaatagtgcaaaaaaaattttacattttatctttagagtgtcagggtcaaattgatttccatggttgaggatgtagccaagtgtggaatcaggtggaataggtggagagttgcccatagtggtttggaaaagagaagaggactttgaaaagtggagggctcattaggtgacccaaattttacctggggcatcccccctttagggccccaacttagtctgtcagacatctctgaccttagatgggtgctggcaccactttggaatggttccctccatcactgaggacctgacttaaagtttttctatctcacttaaaacaaccctttaacgctctcaacttaggcaataataaattccttttcatgaattccctccaccaccatgcaccacacagaccacatgcccggaccctctgacttgtgtaaccttttgtgcatagctaggtgggttttctgtcctttgccagttgggtgggagaagggaagaatttagcataaataaaagcagcataagtcacctgaaacctgtgagtttgccctggacgagctgctgctgctaactgcatcacacatagggatcagggattataactgaaaaggacagaaatgagtcttttccctttctgggcagggcagccatccctgttcactccttggccttcagaggataccagagagtggccccagtcagttcccctcaattaccaacgagctactaggaaacggccgctgaaagactgaaaaaggagaaaaggaaaataactcagaaaaaaaaaaaaaggaataggactcagaaaaacaaaaacgaggaaaaggactcaggttcctcaccttaaccaagcggtggcagttaggcacttccacacggaaaccttccagtttcaccagagaatggccctggccagaaacttgcaagtgtctttgtgcttaggtgctgtccactgagggtcctcagttggaaaggaaaagatggagagaggaagatttccctgtatgtaaaaggggaaaggagaaaaagaaatcccaaactttgggcctaccttctctcctggctagctcaccagaatatgttaccagtagagggtcttgactgcaagttgtttaggttcttggcattttgaacaaagacttggaagaaacacccagcaaagcaatgaaagaatgcagcatcaaaagaatgaaaacaggaatttattgaaaatgaaagtacactccacagtgtgggaacaggcccaagcagtggcccagatacagaatcttcttgggtccaaatgactactagaggtttcccgttggctgcttggtgctgacctaatgtaaatgaaatggtggcctgcagtcagtcaaccaatcagaggctgaagtaaagttacaaaagtcacactcctacgcaaatatctgattggttgcaaaaagcaaccaatcagaggtacttttaatttcccatctgccaggcagaaaaggtagaggtttgcaaagggagtagtctctggtccttttgttacttaggtgtggaaagttagggttttcccatcaatttagcttaaggacgttagcgtgaaacagccttaggtttcctgcctccagaccatgttctcctgcctcaggatcacaggctcacgccaccatgcctggctaatttttgtattttttgtagagatgaggtttcgtcatgttgcccagactgggagaaatatattttaaggtataattagcatgttgtgttttaaaaatcctgttgatatacttgcacattagtaacagagcttttgcttccacattgtacaatttcagttcagtatcttgtatcattctaattatttcactgaacttaaaatgtaagggaccttctacatattgatagaacacatgctttgcatctgtcatttctctgtgtgtgtgtgtgtgtgtgtatatatatatatatatatatatttttttttttttttttttttagacagagtctcgctctgtcgcccaggctggagtgcagcggcgcgatctcagctcacttcaagctccacctctcgggttcttgccattctcctgcctcagcctcccaagtcgctgggactataggcgcccaccaccacgcctggctaattttttttgtatttttagtagagacagggtttcaccatgttagccaggatggtctcgatctcttcgtgctctgcccacctcggcctcccaaagtgctgggattacaggtgtgagccaccgctcccagcctctctgtacaaattttttgccacacaaatctgaaaataccaccttgatttatggatcctccaagtttttcactgaagtacaagggaacaaatgtaaatctataaattgggttaaatgatttctaggaaagtgtataataataataacaattatttttttgagacagagtctctgtcacccaggctggagtgaaactgtgtctcaaaataaataaataaataataaataaataaataatagaaatgaagttttgctatagttgagaaattatagaatgccatgcttattatgataacctcatacagaaatttttacagctttttgaaaaatggcttttttgttattcaatttttatagtcttataaacattaattttcacaagactagtgtaaaaatattgtagacaatttgtctaagcagtatttcggaagcactttcaacagttatgtaaagggtcctatttatgcttgaagaaaggacatgtataaggtttttagcatgaggaaattaagtctttctcaacctagaagtcaggagtttcaagagtaaacattcagtgttgaattaaagaatctgaatctattttttgattgattactgacatcttttaagccacactatttgggcaagttgataataaagcctgagtgctcccttctttggtatatgctggaagttcaagacatgcctgggtacctttacccttgccctactccttaaccatagtcacaacacattttcctgctctcacaagccacttttgaaccagcttgggaagtctcctgctctttccagagtctcattatgtaacaaatattctcatgatacttcactatgtgacgtcatcagtcccagcatccaaatcaaagtgtgggtggggttccactctgttctagtggagtggccacagtgctaattaacaaaatatgctttgggttgaatatataaagtttctactttactcaccctgcagaataccccactatgtatgtttattcttcagagggaacattaatcttgttttcttttttttttttttgagacgaagtcttgctgtgtggcccagggctggagtgcagtggcatgatctcggttcactgtaacctctgcctaccgggttcaagcgattcttatgcctcagcctcttgagtagttgagattacaagtgtgtacaggtgtgcaccaccacatctggctaaattttgtatttttagtagagaccacgttttgccatgttggccatgatggtcttgaactactgaccccagttgatccacctgcctcagcctcccaaagtgctgggattacagacatgagccacaaccctggcccattaatcttttattttttaattttttttattatactttaagttctagggtacatgtgcacaatgtacaggtttgttacatatgtatacatttgccatgttggtgtgctgcacccactaactcgtcatttacattaggtatctttcctaatgctatccctccccactcccctcaccccacgacaggccctggtatgtgatgttctccaccctgtgtccaagtgttctcattgttcagttctcacttacgagtgagaacctgtggtgtttggctttctgtccttgtgatagtttgttcagaatgatggtttccagcttcatccatgtccctacaaaggatatgaactcatcctttcttatggctgcatagtattccatggtgtatatgtgccacattttcttaatccagtctatcattgatggacatttgggttggttccaagtctttgctattgtgaatagtgccgcgataaacatacatggacatgtgtctttatagcagcatgatttataatcctttgggtatatacccagtaatgggatggctgggtcaagtggtatttctagttctagatccttgaggaatcgccacactgtcttccacaatggttgaactagtttacagtcccacaaacagtgtaaaagtgttcatatttctccacatcctctccagcacctgttgtttcctgactttttaatgatcaccattttaactggtgtgagatggtatctcgttgttattgggggaacctgcccccaatatttcaatgtagtttctttctattttccataagtgtcagccggctgagaaataaagacaatacaaagagaggaattttacagctgggcctccaggggtgacatcacatatcggtaggactgtgatgcccgcctgagtctcagaccagtaagttttttttttaagggtttcaaaaggggagggggtgtaagaacagagagtaggtacaaagatcacatgcttcaaagagcaaaaagcagaaccactgataagggtctaacaaagattacatctttctgagggaaaagggcaaagggcaaaagtagaaccactgatatgggtccaacaaagatcacagggcaaagggcaaaagcagaaccactgttaacacaattatcacagtggtcctgaggtgacgtacatcctcagcttatgaagataacaggattaagatattacagtaaagacaggcataagaaattataaaagtattatttgagaactgataaatgtccatattaaagtgaaatcttcacaatttatgttcctttgccgcagctccatctggtctctctgtttggggtccctgccttcctgtaacacattgtggttttgatttgcatttctctgatggccagtgatgatgagcattttttcatgtgtctgttggctgcataaatgtcttcttttgagaagggtctgttcatatccttcacccactttttgatagggttgtttgattttttcttgtaaatttgtttaagttctttgtagattctagatattagccctttgtcagatgggtaggttgtaaaaattttctcccattctgtaggttgcctgttcactctgatggtagtctcttttactgtgcagaagctctttagtttaattagatcccatttgtcaattttggcttttgttgccattgcttttggtgttttagtcatgaagtccatgcccatgcctgtggcctgaatggtattgcctaggtttttttctagggtttttatggttttaggtctaacatttaagtctttaatccatcttgaattaatttttgtataaggtgtaaggaagggatccagtttcagctttctatatatggctagccagttttcccagcaccatttattaaataggaaatcctttccccatttcttgtttttgtcatgtttgtcaaagatcagatggttgtacatgtgtggtactatttctgggggctctgttctgttccattggtctatatctctgttttggtaccagtatcgtgctcttttggttactgtagccttgtagtatagtttgaagtcaggtagcgtgatgcctccagctttgttcttttggcttaggattgtcttggcaatatgggctcttttttggttccatatgaactttaaagtagttttttccaattctgtgaagaaagtcattggtagcttgatggggatggtattgaatctataaattactttgggcagtatggccattttcacgatcttgattcttcctatccatgagcatggaatgttcttccatttgtttgtgtcctcttttatttcgttgagcagtggtttgtagttctccttgaagaggtccttcacatcccttataagttggattcctaggtattttattctctttgtaacaattatgaatgagagttcactcatgatttggctgtttgtctgttgttggtgtataggaatgcttgtgatttttcacattgattttgtatcctgagacattgctgaagttgcttatcagcttaaggagattttgggctgagacgatgggatttctaaatatacaatcttgtcatctgcaaacagggacaatttgacttcctcttttcctaattgaataccctttatttctttctcctgcttgattgtcctggccagaacttccaacactatgttgaataggagtggtgagagagggcatccctgtcttgtgccagttttcaaagggaatgcttccagtttttgcccattcagtatgatattggctgtgggtttgtcataagtagctcttattattttgagatacatcccatcaatacctagtttattgagagtttttagcatgaagtgctgttgaattttgtcgaatgccttttttgcatctattgagataatcatgtggtttttgccttttgttctgtttatgtgatggattatgtttattgatttgtgtatgttgaaccagccttgcatcccagggatgacaccaacttgatcttggtggataagctttttgatgtattgctggatttgatttgccagtattttattgaggatttttgcatcgatgttcatcagggatattggtttaaaattctatttttatgttgtgtctctgccagcctttggtatcaggatgatgctggcctcataaaatgagttagggaggattccctctttttctatttattggaatagtttcagaaggaatggtaccagctcttctttgtacctctggtagaattcagctgtaaatctgtctggtcctggactttttttggttggtaggctattaattattgcctcaatttcagagcctgttattggtctattcagggattcaacttcttcctggtttagtcttgggagggtgtatgtgtccaggaatttatccatttcttctaggttttctagtttatttgcgtagaggtgtttatagtattctctgatggtagtttgtatttctggagatcggtggtgatatcccctttatcattttttattgtgtctatttgattcttctctcttttcttctttattagttttgctagcagtctatcaattttgttgatcttttcaaaaaccagctcctggattcattgattttttgaagtgttttttatgtctgtatctccgtcagttctgctctgatcttagttatttcttgccttctgctagcttttgaatgtgtttgctcttgcttctccagttcttttaattgtgatgttagggtgtcaattttagatcttttctgctttctcttgtgggcatttagtgctataaatttccctctatacactgctttaactgtgtcaagagattctggtatgttgtgtctttgttctcattggtttcaaagaacatctttatttctgccttcatttcgttatgtacccagtagtcattcaggagcaggttgttcagtttccatgtagttgagcggttttgagtgagtttcttaatcctgagctctagtttgattgcactgtggtctgagagacagtttgttataagttctgttcttttacatttgctgaggagtgcttaacttccaactatgtggtcaattttggaataagtgcaatgtggtgctaggaaaaatgtatattctgttgatttgaggtggagagttcggtagatgtctattaggtccacttggtgcagagctgagttcaattcctggatatccttgttatctttctgtctcgttgatctgtctaatgtttacagtggcaagttaaagtctcccattattattgtgtgggagtctaagtctctttataggtctctaaggacttgctttatgaatctgggtgctccagtattgggtgcatatatatttaggatagttagctcttcttgttgaattgatccctttaccattatgtaatggccttctttgtctcttttgatctttgttggtttaaagtctgttttctcagagactaggattgcaacccctgcttttttttgttttccatttgcttggtagatcttcctccatccctttttttttttttgagcatatgtgtgtgtctgcacgtgagatgggtctcctgaatacagcacactgatgggtcctgactctatccaatttgccagtctgtgtcttttaattggagcatttagcccatttacatttaaggttaatattgttatgtgtgaatttgatcctgtcattatgatgttagctggttattttgctcgttagttgatgtggtttcttcctagcatctatggtctttataatttggcatgtttttgtggtggctggtaccggtcgttcctttccatgtttagtgcttccttcaggagctcttgtaaggcaggcctggtggtgacaaaatctctcagcatttgcttgtctgtaaagaattttatttttccttcatataggaagcttagtttggctggatatgaaattctaggatgaaagttcttttctttaagaatgttgaatattggcccccactctcttctggcttgtagggtttctgctgagagatctgctgttagtcacatgggcttccctttgtgggtaagccgacctttctctctggctgcctgaagggggccaccccctccacagcctgtgggtgtttctcgtcaggtgggacgagagaccaggaaaagaaataagagacagagacaaagtatagagaaagaaaagggggccccagggactggcgctctgcatatggaggacctgcgcagctggccctggtctctgagttccctcagtatttattgatcattatctctaccatctcggagagggggatgtggcaggacaatagggtaatagtggggagagggtcagcaggagaacatgtgaacaaaggtctctgtgtcataaataagtttaaggaaagctgctgtgccttgatgtgcacgagcacaaacatttcggtgcaataaagagcagtattgctgccagcatgtctcacctgcagccctaaggtggttttctcctatctcagtaaacagaacatacagtcaggttttacaccgagacattctattcccagggatgagcaggagacagatgccttcctcttatctcaactgcaaagaggctttcctcttttactgatcctcctcagcacagaccctttatgggtgttgggctgggggacagtcaggtctttcccttcccatgaggccatatctcaggctatcacatggggagaaacctggggcaatacctggctttcctaggcagaggtccctgtgggcttgtgcagtgtattgtgtctctgggtacttgagattggagaatggtgatgacttttaccaagcatactgccttcaagcactttttaaacaaagcacatcctgcgcagccctaaaaccattaaaccttctgtcaacacaacacatgtctctgcaagcactgggttggagctagggttacagattaacagcatctcaaggcagaagaatttctcttagtatagaacaaaatggagtctcttttgtctacttctttctacatagacaagttaacagtctgatctctctttcttttccccacagctgcccttattattttttccttcatttcaactttgatgaattcaaacaggatacaatttggggaatatatgcttataatttgcacttgagctattctgtccgagtatgccccaggacattttatggaaataccatgcagtgcaatttcagactctgagcatctaaaaacctgcctcagtatgcatgaatattcactatatgattatagttctacatgcctttgtatgtataagatccatggcttgcatttgccttgatttttatgtgtggtaaaaataaaaatatagcaagtgtatacaaatattaggaaatgggccaggtgttggagctcattcctgtaatcccagcactttcggaggccaaggcaggtggatcacatgagttcagaagtttgagaccagcatgaacaacatggtgaaaccatgtctgtactaaaaatacaaaaattagctgggtgtggtggtacacctgtaatcccagctatttgggaggctgaggcagaagaattgcttgaacccgggagacagagtttgcagtgagctgagattgcaccactgcgcaccaacctgggtgacagagtgagatgcagtctaaaaaaaaacttattaaaaaaatatattatatatatggaaataaacaataattaggaaataagaatttcttatttgtgcttagaatacacagtgaagtaaacagaaaaaaagaacaacaacaaaaaagaatacatagtgaagtaatttgaaaagattaaatgttaagacaggcatggtggcttatgcctgtaatcctggcactttggaaggtcgaggtgggaggattgcttgagcccaaaagttcaagaccagcctgggcaacatgatgaaacatcatctccacaaaacatacaaatatcagctctgttatatatgaaataaacagagttttccaaagatcttttataagatgggagaaaggagatgaaatagaagagagattgacttggtccttcaggattggaatctgatagatgggacactagaggaagtttaatgtaatctttttggctatctagatctagtttttaggccctggctagaagccagttagttcctcttctagaatggccaattaagtctacaatgccggccacagtgagcttgtggtatttagcttgccctaatcctatccccatatcctcagcttcaaggtagccttgaaaagcaaccaccttttaacaacagtaacagtgaatatctgcaccctagcagaatatctgcacttgaggaggtagaaatggctctgaaaatggcagaaatggctctgaaacacccaaaagcctccatccccacagaatgttcactactaagcctgctttgcagcctgctgaataggtctattctcatagtatttctctatttggcttgactttatttatgtgaacactcctacccatagggcacttgtcaaaaaacaatcagcagcaattgtttaacactagagtgtttaggggagtgacagtgtgtgtctgcgtgatagatggaagtaataagagggcacaggggaaaggggccatacgcataagatgatggaacagagagcctggagggtggggtatagagagtgtaggggaagggagaaggcagacaggtaaaaggaaaaagaatgttaagtgttgttcagcctcaagactgacatgatgaaagtacctttattgtggtttttgtaaattagaatgcatgctttattattaaaaaaaacacaattgaaaatgttaaggaccttttcctccttgcttcttataagaaaccatcataagacataacttgtaataattctgtagaaatatacatatataaagatatatgtatatatatattttaaaatagtatgtttttattgcaaaatattcattagtgtcatcatatcatagccagatctacaaccccagagtaattcccatggttatgttacatggcaaaaaggactctgcattgtaattaagtttattaatcagctgactttagcattgggagattattctggattgcccaagcacttaagaataggagaaaccggagagatgcagcagcaatagtcagtggtttcaaatatgaaagggatttcacatactattgttggctttaaagataggaagtcgtgggggcaaggaaactctctaaaggaaattaatctggcaacaacctaaataattctagaaaaggattcttttccagagtcaagaacagagccaggtggttcttctcttctaaagacatttccatgggccagttccaccgcaagcttctcagagagaatatgttctgccgtacggacaccgaacgtcccctaagatggccgcccccatgatgctctcccctaagggctctggctccgttacctgcaacgcaccgctcgcttattttttgttctagtctctcttgcttcagtttttatacggcttctaaaacgcttcgcatttacaatagtgactgaggtgcccagaggtgactttaattttccattgagctgagacgtcacagccatcataaccgctaagaagggatgccgcgcctttgtggtaataatgggttctggcctttgagaagtttgcgccgttcactgtcccctgcgaggagaagactaacttatttctgttccgtgtctgttcagaggactttacccccacgccgtgtctgcctgtgtgaactcaagcctctgataagctctccattttctgccagggctgaggtgtctggaaatcggacagtttaagaggcctccgtccaccgcgtctcccggccgctgtgccttctgtacgtcacgtactcaaagatggccgcccccagagcggcgaggcgacgccggcgcggacgcgtctcctcctgaggaaaagccggaaggccgcattccgctctccatggaaacgcggctgaccgtctctggaggtttagagggggagggagttgggcgaggrgcccagaagtggaagaagtttagggaagtaagttcagcttttaagaggtcgcggcgattccmaggagagtcaggtcagtgtgtgggtcagggcgtggaaacgtggtgggagggagctttctgagggcgtctgcgttgttggtggcgctatatggtggaggtagcgcgggggttgggggaggcgggggcgggtgtttccttttggaggggagctggtaggagtccctggtgggtgtctgtgataggatatctttggggtccctcatggaggctctggtggtcagtgattaaaggcctgaatagatcaacgaccaagagtactgaggtcagggattgtggtcctcgcgggtcactccccagtggggctcagtgattgagaatcgatggggtggcttttgtcaacgaatgtgacttctgtttcacattctggattaatctgaggcttagtgattgatgaatcattaagggaatccagtgtacgtgtgtgtctattccaggttttcctattttatctggcggggtgrtggtcttttgtstagagacaagtgaaagccgaagtcttttcacaagagccctggctggttttgtgtgtgtgtgtgtgtgtgtgtgtgtgtgtgtgtgtgtgtgtgtgtgtgtgtgttgagctcaaactttggctggaacagacttgatgaacgttaacatttcctaaaagtttcaggtccgagtacctcctccacaatgagttttctaatcctctggctttccacaacaacccatgctcttgaacctgcagaaaatgaaagttttttgggggtgaaggggggcggatgaataggctttctatttaacattatgtttttaaattactgcgcacaaattaacaagagcctatttttatccttcctcttgcaaatgtactgcatatttttatgggtgtttcaggttttgtatgttagtatataaaggcggctattttcccagtatttatatttttgaattgttttctaaatttgtatttataactcgtattccttttctctgtctccctctttttttctatgtgtttcttgttcttcatattgaagtgtgtatataaacaytttttttttttttttgagatggagtcttgcttttgtcgcccaggcttgagtgcaatggctgggctcactgcaaacttcgcctcctgcgttcaagccattctcctgcctcagtctccgagtagctgggattacaggtgcctgccaccatgcctggctaattttttctatttttagtagagacagtgtttcaccatgttgacaaggctggtctcgaactcctgacctcaggtgatctgcccatctcggcctcccaaagtgctgggattacaggtgtaagccatcatgcctggccgtatataaacacttttaaatatatataaagacttttaaagaggtgtgagagtaacattgtataaaggaaaaaatgtagtttctcaccatccatatggcctgatttaaaaaactgatatgagaattacctactgcttaggcatgatgctatgtggattctcctttgtgacctcccctttcatcttcatgttacttccacacttcaccgaagaaaggcatttggcctacattgagggtcttgtgtttccttggtttgagagaaccaaataaagagacaaatattcagggccacgtgttaaggtgaatgtacccctgaaagttgttttgctcttcagtccacaggtcctggctaccctgggaagagacaagaagtaaatgaagaaagaggaagattccaggacctagatatgatttctgtggacacccttcactggtgactgaagtttstaaatagaaatttaaggcagatccagaggagacaaagacagagtatcccaggtgctggccatttcccacaacagaagaaaatgatcaatgcccaggtgactttttctctattttattctctcctttattccatagtggatttgtagagacccrtaagaaatcatttcagaatctagagagaaataaactttaaatctaactccaacatcatggcaaagtaagatcaggaatatagtgtttatgtgattcctacaaaatgactgatgttggaaaataatgcctgactagaagatcctttccattaccttagctctcagtttgcatctgatgtctctgacagccagtacaagaaagtcacactaagttatacagtgactgtggggagaaagcagacaggttcctcaggagattattatttcatggcacttagatctcaagaaaaatttgctattcttcccagagktgatatggtgaacagtgttttgaactagctttctaataaaggcagaagatttcttactgctgtttattacacggttcctcagagactcctatggaaatagaccaggcaaactcagtggaaacagtttttttaggggacgaaagcaaggccacacactcaagtcttgcgtgtctgtgtgagcttatttaggaataaaatctaagtgacctaggaaaatggaaggtgtgcatagcttccattttcctgaacatgtggctgaactggcattaactgcagatttggcattagggagttgtctgataaggtcttgagtcgttgggtgccatgtttgataacttcacctcatctcagaatatacaatatccttctgcattttcacctccaattcttgcatacttatattgcttttattttttgtaattacataaattactcatggaatccaaagggaaaaaattctttttttttttttttttttggtttttgttttttgagatggaatctcactctgttgcccaagccggagtgcagtgcgtgatcttggcttactgcaacctccacgtcctgggttcaagggattcttctgcctcagcttcctgagtagctgggattacaggtgtgcacttgcatgcctggctagtttttgtatttttagtagagatggggttttgccatcttggccaggctggtctcgaactcctgacctcaggtgatccacccgcctcggcctcccaaagtgctgggattacaggcgtgagccactgcacctggcctcacagggaaataaattctgatgatgaagtacacactggttaaaaaagtaaatttccgggccgggcacagtggctcacgcctgtaatcccagcacttttggaggccaaccaggcgggtcacctgaggtcgggagttcaagaccagcctgaccaacatggagaaaccgtatctctactaaaaacacaaaattaactgggtgtggtggcgcatgcctgtaatcccagctactcaggagactgagacaggagaatcgcttgaatccgggaggtggaggttgtggtgagccgagatcatgccattgcactccagcctgggcaacaagagcgaaactccgtctcgaaaaaaaaaaaaaaaaaaaaggtaaaaaaagtaaaagtagattccctcttcataactttcttcctaatcctcttatactgcttcaacaaatgtttggtagcacatacttgctgtcactgaaatgtgtgcatctctgtatatatgtgtatttataaatccatgtgttttatgtatgtgtctgcatatataaacacatttattatgacttcttttgcttcagtggaatcacattccacctgttggtcaccttagatcaagcttgtayaacctgtggcctgtgggctgcatgcagctcaggatggctttgaatgtggcccaacacaaatttgtaaattttcttataatgagaattttttgcatttttttccagctatcgttagtgttagtgtattttatgcatggcccaacgcatttcttcttccagtgtggcccagggaagccaaaagattggacacccctaccttaggtggtgtagttttagaatataaaggaataatcactgcaattaattgaagaatattgactgtataaaattccatttgtctaaagtcatacatgaaaacattgttaaactatgtaaagtatttagatgagtgcctgccacatagaaactgatacatggagtcctttgtgccttaaatctttgccaatacttaaaaatatgacattatcaaattatacaattttcaatgatccaatattcttttgtcttattttgcattttcctcatcacaggtgaggttgaaagccttcttgtgtatttcttggccaactggatttttttctcttgtgaaatgcctgactttatgatttttacattaaaaaaacttttttcttactggctaatgagttgcttatatctactatatattgatcttttgtttattgcaaagttttttttagcctgtcatttttctttcagctttgtttatgatctgtttttcaatgtagaaattaaattttttttctcataaaatttgtcccttttttttcctttatggcttttaacatgaatatatttcgtatttgcttctgcttccacaggtkcttttgctttctggtaaggactttaaamaggaaaaacttatttttgagtatgaaattaggtagaaacctacattttttttcaaacagatttatttctcgtgtgaaataattcccgaatgtgatgagatcagcagcattaagaatttgcagactycagcaagtctgttcttttctctgtgtattaatctctgtgattatatggggatagattatcccatcaatttgtgaaggggtgggttgcccctccacrcttgtgggtgtttctcgtaaggtggaacgagagacttggaaaagaaaaagacacagagacaaagtatagagaaagaaataaggggacccggggaaccagcgttcagcatatggaggatcccgccagcctctgagttcccttagtatttattgatcattcatgggtgtttctccgagagggggatgtggcagggtcacaagacaatagtggggagagggtcagcagacaaacacgtgaacaaaggtctttgcatcatagacaaggtaaaggattaagtgctgtgcttttagatacgcatacacataaacatctcartgctttacaaagcagtattgctgcccgmatgtcccacctccagccctaaggcggttttcccctatctcagtagatggagcatacaatcgggttttataccgagacattccattgcccagggacgggcaggagacagatgccttcctcttgtctcaactgcaagaggcatgccttcctcttatactaatcctcctcagcacagaccctttacgggtgtcgggctgggggacggtcaggtctttcccttcccacgaggccatatttcagactatcacatggggagaaaccttggacaatacctggctttcctaggcagaggtccctgcggccttccgcagtgtttgtgtccctgggtacttgagattagggagtggtgatgactcttaaggagcatgctgcctttaagcatctgtttaacaaagcacatcttgcacygcccttaatccatttaaccctgagtttgacacagcacatgtttccgagagcacggggttgggggtaaggtcatagattaacagaatctcaaggcagaagaatttttcttagtacagaacaaaatggagtctcctatgtctacttctttctgtacagacacagtaacaatctgatctctcttgcttttccccacaaatttgcacctagctctttcctgcctcaagttcctactaccatgtgattataagtcatgttgagacaggagagtggcagtttagttgacaagagggtctcaatttattttccagtggcattcagggctaggccataccatacaatttgccaattgccacagaatcaggacattgaagacattattctgcacttttcttgcttcttttgtttctgtggaagtcagttgttaggacattttatttttcttttgatggtaatgcatcttttccttctattaacagttgtttgcataatgttatatgtgcatctgatgttcaatagtttcagtctgatgtgtctagatgcagattttctgcttggctttgttgatttattaaatttgagttataggatatttaatcagttctgaaaatttctcagtcagatatttggaaattgcttctcttatttgaatataatatttcaaaaactatgtataggcatatgttaggcctcactctgtcttccatatttagtaaagtctccttcatactttctgtcactttgtgtctctgcttcatttttcagttattttaattttttgagatagggtctcactctgtcacccaggctggagtacagtggcatgatcacagctcactgcagcctcaacttcctgggctccagcaatcctcccacctcaccctcccaagtagctgggatcacaggtgtgtgccaccgcacctggttaatttttgtctttttggtagagataggatttcaccatgtttcccaggctggtcttgaactcctgagctcaagctatccgcctgcctcagcctcccaaagtgctgggattacaggtgtgagccaccacacctggccctgttattttttttactgtgaattccaactcactaattatctcttcagtgtatttaatataacctttctgttaatagacacatatacctgtgactgtatacgtatatatacataaacatatatttatatgtatgtgtgcatacatatatatttaatgtatgtttccaagaataagttttcccaatttggttactctttaatagtttctcatgttttctgtacatttctattttttaatccatttaacaattaaacatgaatgtagtatcctgtggttctagcatctgaagtctctctatgtcttatgctagtattagctgggaaggcttaacagtgaatgaaacaatttatatcagatatctagatgtcagtagcatatactttcttgactggtcaatagataccaaaattaaaatttatacataaaacccgcttttactgagaggatttgatataaaaccttaatttttgttgagcaaatggggcactgtgcaattatagaatacttggagattctctggcaatattaaaaaatacaatagacttatagatggatgcagtctatatgtttaatgtgagcgggacaacttcccttcactttcttttcatgtcagtaaaagagaaacacttcctattaagcaaggctctgttttcttacaggaattgctgacactggaggatgttactgtggagttcacctgggaggagtggcagctcctgggcccttttcagaaggatttgtaccgggatgtgatgttggagatctacagcaacctgctatcaatgggtgaggacagctgctctgtgtcacctggagggtgcccagtctgtggcctttgctttctcagttgcttacccttggaagttactgcagtgctctgaatattagatttttggcacatcctctggyttctgataaaaggatataccgtcacccctcagtgtccaagagggattggtttcacaactttccatggatatgaaatccacagatgctcaagtctcatataaaatggcattgtatttgcatataacctacacacacctcctcctgaatactttaaatcatctccaaattatgcctgatacttaatacaatgtaaatgctatgtacatagttgttatactatatgttttaattwatttatttatttattttttctttagagacagtgtctcggtctttcactcaggctggaatgtagtggtgccttcatggctcgctgcagccttgaactgggttcaagtgttcctcctgcctcagcctcctgaggaactatgcctacaggtgcaaaccaccatgcttggctaatttttttttttttttgtagagatggagtctatgttgcccaggctggtctcccactcctggcttyaaatgttggtttcatgtcagcctcccatagtgctcggattataggcaagagccactgcactttgtatttttttttattattgkattttttattgttttttaaaaaatattttcaatccatggttggttgaatccctggatgtgaaattttcagatattaaggtctgactgtaatctgccctttcctgagagagaagcctctactttcagatgtgaaaactgtctagttacttaaatgtaacattctctcacattacataccccagcccaatccagtgtgtctgtcttctattatttcccgtaaacaggttatcaagtcagcaaaccagatgcactctccaagttggaacgaggagaagaaccatggacaatggaagatgaaaggcacagtcgaatctgtccaggtatgtgagaagcagcaagatgcgtaagtaatattatagtcagtgaaagaaggctctgtgggtgtctgaggacacagaagcagtgcctacattaggaatgggaatcgttttccctccacaagaaacccttcccatcttattttaaggttgcattctcctttagtaccatacatctgtcctgtctgtgctggtgttgtattgaatgtcctctacctatggagttctcttcttaaaagtctctactatttttgtttactgtttacctagaaaggactgttttatgtcctacatcagttctagaccaaaccaggtcataacttatgtctgtctcagagtacttcctttgtacatttgatttctacttttcctttagttcatcttagacggtagcattgtattcatttccctaatgtgtttttcccattatagatttgttttttcaacagcttagataatttacataccatacaattttccaatttaaagtttatttttcagtgctttgtagtgtatgaacagttatgtaaccatcaccatagtcaattttggaagattttcaaagtatcacttaaaaaaaaaaattgtttccaagcccccagccctaggcaatcactaatctactttctttttcttttcttttcttttttttttttttttttgagatggagtctcactctgtcacccaggctggagtgcaatggtgtgatctcggctcactgcaacctccacctcccgggttcaagcgattctcctgcctcaggctcccaagtagctgggattacaggcgcgcaccatcatgcccagctaatttgtgtttttgtagagacagggtttcaccatgttggccagtttggtctcgtactcctgacctcgtgacccacctgcctcggcctcccaaagtgctgggattacaggtgtgagccaccgtgcctggcctctactttttatccctatagatttgcctgttctggacattttatataaatagaatcatgaaatatatggtcttttgtgtccggcttctttcatttagcataatgtttttgaaattcttccattctttagcatgtatcagtgcttaatttctttttattgttgaataatattccattgtatggatataccacattttatttatcaattcatctattgcattgacatttgggttatttctactttttggcttttatgaatcatgctgctatgaacgttcatgtacaacttttttaggaacgtatgttttcatttttcttgagccttcacctaggagtagaattgccaggtcatttgtagtccaggagggggtccaagtacagtacttctctggtcctcctctcactgtggatgttacatctcttcccagccacacagtgtgtgacagtacagagtattgacaactagggaagttcacttgagcctttggtggccagagttttgattaggtttcagtcacatacagcccacatggctgacttttagtcttcagcctctcctggaagtcaggctaatacctagagtgtccagtttttccaaaggctggaagtgatatggcatgggccaaagcccctatcacaaatcatattgttaaactgtccagtggctaaagccaccaggcaaacaaagacactcctatgggccaggacattccaggggcctagagatcatttcctaatagctaagaacaaatgctagatctctgtttggatgaggttagagctagatcctcactacacagaagattaccataaaaattaacaataaaggggttaattaaggaatacagagaacatagagcatatggcaggatagtcagaattgcagcaagagtatgatgtgcacaaggcatatctagattttgaattaggaagatggtgacatgaattaagaatgaaggcatgggtcaggtgcggtggctcatgcctgtaatcccagcactttgggaggcctaggtggggggaacacctgaggtcgggagtttgagaccagcctcaccaacatggagaatccccttctctactaaaaatacaaaattagccgggcatggtggcacatgcctgtaatcccagctactcaggaaggctgaggcaggagaattgcttgaacccaggaggcagaggttgtggtgagccaagattgtgccattgcactccagcctgggcaacaagagcacaactccatctcaaaaaaaagaatgaaggcatgaaatagraattgtgcaaggccatgggcctgactatcaaaagattggcttcaagttggccaaatacaggtcagtgatagaagctgcttgttggagaaatcgtggagcagaaacatggtaatattcatggtaatgtaaacttttttttatcaagatgacttttgattgtatatatgagtaattgaggtagcatggttgagggttggttaattttatatttttgtcttttcataaaatatgttgctagtcttgacctttcacttggatgacagcagtgtagcaataataagaaacagctaaatatcttaagaaaaactgaaggtgaagatgccacaacctttgtctagaagaagtttatcctttagtacaacttaactgatgctgagacataaatgtagcttactgaagtagatgttattggtggcagatgaggaaacagtgtatcagggacattgaaatgggaaaaattggatatgacctttttttttttttttttttaaggtagagtctcactttgttgctcaggctggagtgcagtggcacgattttggctcactgcagcctcaacctcctgggctcaagcgatcctcccacctcaacatcccaagtagctgaaactacaggcgcatatcaccatgcatgcctggctaatttttgtattttgtgtttcaccatgttgcccaggctggtctggaactccagagctcaagtgatctgcccaccttgacctcctaaagtgctgggattacaggtgtgagccaccgtgcctggccttgatacgacttttctactgcatgcagaatgtgattgaagaaaatgacagttttcatatcccatgcagcarcamattttcttctgaaggcaactacatggtacactggccagttgcaaaattccctatcattgttttcctgtttcataattaatgaaacatatgataacgcaacacagctaaaccaaagggtggagtgttgactataggagttgttcattaaacgtgatggatgtttttggaaagttagatggtagtctacagattgaagaggggcaaatttagtaacaattaccacacaagagtctatctcagttgacttaatttcaacagatggagatttccaattcttacttgccaggcaacatgtacgtgaatgtatttattctatatatctcagtaagcatattaccctgatctttgtattcacagtttggttcctctaacagggcttaaataatcccaaaaccacatgttggaatgtctacaaccttggttctgtaccttcatctttcattctacatgtcttctcaacatggtatcctggctcagtgccttggctcacacctatagtcccagcactttgggaagcagaggtgggcagatcacttgagcccaagagttcaagaccagcttgggcaatatggcaagactccatctctacaaacaatacaaaaatcaatcaggcatggttgcatgtgcctgtagtcccggctactcaggaggctgaggtgggagaattgcttgagcctgggaggtggaggttgcagtgatgcaagattgtgccactgcatgccagcctgggtgacagtgagaccctgtctcaaaaaaaaaaaagtcattcagtccttttttctcaaataatatgtatgtactgattatttccatgctgccttctccatttatacctccaaccagattcttgatgtctgtgttacatatttgataaccatttcaaagtgtgtttcacagtatatactttacatgtgctggactgcagtaatatttgccatctcattatcagatgctgtcatctacccagtggctcaagccatatagttagtaatctttgagccctcactttcctcactctccccattgaattcatcatttaaccttgtcttttctttatacaaaaatatcctgcttttctccaactctcatcatctacactgctccatcaaaccacacttaacatcaccaactcccttctttttttgttccttcgtattgtttttcctaattagaattcagcatgagtgaaaagaaggcatattttgtrtatcccaaatgccagcagagtgccttgtccataggagtcatttgacaaataactagtggagtgaataaatacaaccctcagaattgtgaatcagttgccttttccacctttgtggtctggtgtctcccaaaattttgtggaatggtgttcctccaagccctgttgtttgcttgtaataatgacttgcttgtattttactgtgtccgcatgttttgcaaggtcctgtttagaaagctgtcaaatygatatagattgtcaactgcctcaccttatttgcacacagactgcttttactttttggtttgtttatattattatgtttttaccaaagtgtatacatgaagttgcttttatactattattgtagtattgtcattaaatagcgatatttaaaaacacctggccaggtgtggtagctcatgcctgtaatcccagcattttgagaggccgacgtaggggtatcactggaggtcaggagttcaagaccagcctggccaacatattgaaaccctgtctctactaaaaatacaaaaattagctaggcatgatggcacatgcctgtaatcccagctacttgggaggctgaggcaggagaattggttgaacccaggaggcggaggttgcagtgagctgagatcataccactgcactccagcctgggtaacagagcgagactctgtctcaaaaaataataataataaacaaaataaaacaccaaggatttttttttctaagaagacagttttatccccaacaagattataaaaggattcattgttctcttctttcctagaaaacaacgaagttgatgatcatctgcaggatcacttggaaaatcaaaggatgctgaagagtgtggaacaataccatgaacataatgcatttggaaatactgcctctcaaaccaaaagcctttgtcttttcagggaaaatcatgatacatttgagttatatataaaaactttgaaatcaaatttaagtttagtcaaccagaacaaaagctgtgaaattaacaactctactaaatttagtggagatgggaaatcatttcttcatggyaactatgaagaactttattctgcagctaaattctctgtaagtacaaaagccaatagcactaaatcccaagtcagtaagcatcagagaactcatgaaatagaaaaaaaccacgtatgcagtgaatgtgggaaagcgtttgtcaagaagtckcagctcactgatcatgagagagttcatacaggagaraaaccttatggatgtactttgtgtgcaaaagtgttctccagaaagtccaggctaaatgaacatcaaagaattcataaaagagagaaatcttttatatgcagtgaatgtggaaaagtcttcactatgaagagccgtctgattgaacatcagcgaactcatactggagagaaaccctacatatgcaatgaatgtggaaaaggcttcccaggcaagcgtaatctcattgtacatcagcgaaatcatactggagagaaatcctatatatgtagtgaatgtggaaaaggcttcactgggaagagcatgcttattatacatcagcgaactcatacaggagagaagccctacatctgtagtgaatgtgggaaaggcttcmccacaaaacactatgtcatcatacatcaacgaaatcatacaggagagaaaccatatatatgcaatgaatgtgggaaaggcttcaccatgaagagccgtatgatcgaacatcaacgaactcatacaggagagaaaccctacatatgcagtgaatgtggaaaaggctttcccaggaagagtaatcttattgtacatcagagaaatcatacagtagagaagtcatatctatgtagtgaatgtggaaaaggttttactgtgaaaagcatgctcatcatacatcagcgaactcatacmggagagaagccctacacatgcagtgaatgtgggaaaggcttccccttgaagagtcggctgattgtacatcagcgaactcatactggagagaaaccttacaggtgcagtgaatgtgggaaaggtttcattgtgaatagcggactgatgttacatcagcgaactcatactggagagaaaccgtacatatgcaatgaatgtggaaaaggttttgcctttaagagcaatcttgttgtacaccagcgaactcatactggagagaaaccctttatgtgcagtgaatgtggaaaaggcttcaccatgaaacgctatctcattgtacatcagcaaattcatacagaagagaaatcttgtatatgtagtgaatgtggaagaggctttgccaaggaaacagagcttgctttacataagcaagttcatactggagaaaaaccttatggatgtaatgaatgtggtaaaggcttcactatgaagagccgtctaattgttcatcaacgaactcatacaggagagaaaccctttgtatgcagtgaatgtagaaaagccttctcctcaaagagaaatctcattgtacatcagcgaactcataatggaaacaaaccctgacaatgcagtggacatgttcatgcctttgggaagaaaatctgccttgtacaacatcagagatttcacagtatagattttctacatgtgtactgagtatgaaaaatcatatttcaaaatccagtgttattcactaggatgaatgctatcaatgtcagaaaggcttcaacatgaattcaggctctgaattctttgatgtaccaatgtatagaaaattactcatctgagagagagtctgtggattgggggtaacctttcatttgtcaaccttcattaaaactatgacaacgtccacatgacaaatgtgtaaggtacatagtccttttgcagagaatctgaactgattacatacaaacaaattcatgcagagagaaaaccacgttagtaatgtgaactgattaaacagcagtgtgctcctagcatacatgcatataggcagtgtagagcagcctgttgctagattttcacccttggaagacaatgcaatttccaggagcgaattttaatgaatgcagagaatgcactagtgccttcggtgattaattacctcatattttatgtcacaataaacatgtaggaaataaacttgatacatccaatgcagaaaagtcttgaaaattttctaagtaactatgtcttgaaaagtatttactgagataaatcttacaaaggagtaggctaggaaagccttctatgggaagaaagaccctatctcttcagtgatcataatagatcatcaatgaacttacacatactagcagcattatcatgggaaagcctttgcccagaaataaaaccttaacagttggcagatatatttcatactggagaacaagtttcagatggcagtgaatacacgaggatttcagtgatacatgctgcctcatcatcattacttcatacagaaataaaacttatatgaagagtaactttaaaaaggatcaggaaattcatgaagtaaaaaagtctcatgaaaatgatacataatgccgggcatggtggcttgcacctgtaatcccagcactttgggaggccaaggtgggtggatcacttgaggtcgggagttcgagaccagcctgaccaacatggtgaagcccccctctctactaaaaatacaaaattagccgagcatggtggctcaygcttgtaatcccagctactctggaggctaarctggagaatcacttgaacctgggaggcagaggtttcagtgagccaagattgcgccattgcattccagcctgggcaacaagagcgaaactctgcctcaaaaaaaaaaaaaaaaaaccatatttgaggactgtcacaaatctaaactcatgatacacttgatatctattctgtgacagcataccttgcatcatattatcaatgattccataattgtaaagcgggctgttcttatcactgattaaattttaatcctatatataacacaggtgttttctgtgccaatctggtgttatttattagttcttacatattataggccccaaatttatttttttcaatttactgataaatgtaattcagtatatttggatgtgtttatccmagttactaggtaccattatgtagtttacaaaaatgccttaaatgttatttttctaaaatttgttttgaaataattctagattcacaagagattacaaaatatacaaaagtttcctgagtattctttgcttagcatcatcaatgttatcttacataaccataataataaaaaccacggagttctgctcttgttgcccaggttggagtgtaatagcacgatcttggctcactgcaaccccgcctcccaggttcaagagattttcctgcctcagcctcctaagtagctgggattacaggcacccacgaccacgctcgactaatttttgtatttttagtagagacggggtttcactgtgttggccaggctggccttgaactctcgaccccgggcggtccacccgcctcagcctcccaaagtgctgggattacaggcatgagccaccacgcctggcctcctcttgctacctctttatactcacactgtcctcccaatatgacccatggtagccactgatcccattaccctaattttgttatttcaagaatgctattaaaatggaatcgtaaggtacgcaagctttgagatagggctttgttcactcagcaaattacccttaagatctatccaagttgttaggtgtctaaatagttttaatttttgttactgagttagtattcttttaaatggatgcaccagggtttgtgtatccattcactgttgatggacatttgggttgtttccagtgttttgctgttataaataaagatgctgtgactatttgtgtacccgatattgtgcgaacgttaagtttttatatatttgggatagacactgggggcatgactgctggcgaatatggtaaatgtgtttaactttataagaaatggccaaactctttcccagagtggctgtactagtttacattcccaccaccaatgtgtaagcattccatgccctttctagctcttggcattgccagtgtgctttagctttcctattaggtgtgtggtggtatatgatcatggcctcaacttacacacccctaacacaaaatgatattaagcatctctacatccactgagaaccatatcaagtaaaattgtaacttttgcttccaaccagcaaacccaatgtttaaaactcaaaagaatattatattttataatatatttaccctttctgttcctttttcttcattcctgatgtaatatttcctttagttatttcctttttgtgcgaacttccttaatcatttctctttgagcaggcctggtggcaaaaaattattagtttccctagaaacagggttcctgttttctctatccagagttatttcccttgatctaatgagatttaatccagtttataaatggtgagttctctttataaaagtaatagacatttgccatatagtattgtggcagaattcaatccctgactccatattgagtaatttacttctttgaaaatattttttgagcttctacaccatggcaggcatgttgtaggcaatggagacacatcaatgaacaaaacaggcaaagtgctggctttgatatgacatacagtctggtgaaggagactgagtaagataaatacaaaatcgaattcagttaagtgctaggaagaaatataaagcctggtaagttcatagattgtaacctgagttattttaggaagagttttcaggataggcttttctgtgcagatataatttgaaccaaagcctaaatatactgtggggacacagccatcatatttttaagtccagaacactatagaactttctaagtgttttctttggggttcctgcctcagcattctctgagaagcttgtaaaagaaggcaaattcttgagtcactccccagacattccaagctagaatttctggggatggggttcggactctgcatttataaaaagagccttcttaaatttgaacatctctgccctaaattgtggattggtgctcccatcaccattcccacactgtaacaggatggattcagggcagattgtctccagcaatgaatcagacaaaagtgctccaccaaccaggcccttgaatcaccttccttgtcccgtgaatcagcacagcctgccacggcaaagttktatcagcccactcctggaaatgatcagtgaaggtcccatcatgggctgctcatagtcctgtggaccaggtgctaaacttacctaccagagattaacattccagatgaacggggctgaaatttaatcctggatggaatatgttataacactcaagaaatacgaacatgaaattcttattctctagaaattacaaaacgtaagtaaaatgaagaaattttaagtcaccataattgtacggaacagtcaaatattrttagtatattctccagaatttttcaaatgcatgagcatatttattttctgaaagaaaacagcctattttgcatttatcatgccatgaacttattatacatcatcatacctattttctaagatcaacatgttttataatatattcatgattatggtacaaagatagtaaaattaagtataaattgggaatatttttcaagtaaaaacatggcattctctacctatgaacacaaacaatattaattcaaactaaatgtcttgtttaaccaatcacaattttccaaaagatgtttatgatttcttccaataacaagaccataaaatatatactatcctgcagatcatttttttgtcctctgacaaagttttcttttttataaaacaattgtagcatattcttttaaattgatatatactcttacagttcagcagatgttccataatttaccaaagtattcatctctcattgtaattccytttttttgtaaattacaaaagttgtggttaatattaagacagatttgcctagatagcttttagaattgctgtgtcaaagaaaacgaaaaaattaaattggctctaggttgccttccaaaaatacaatatttacttaaatcttctacagttacaacgccaacatctgcaaaaatagaactaatattttttaagtgtgactttttaaaaaatctggaaacattgcaaagtaggatgatcgcattctaataatttcatattcttaagtgccccactgtcatcttcctttacttctggaaggaaacatrtagatattaacacagttgcaccttcacctcctcatccccttccccactggcagtggttttaatagcaagccccatgtgggtattagcatttaatggagcatcactcctgttctcggcttcgtccattcagtcagagtctaatctaacccacaaaagccttacccagcccagaacccccgccctatccccaaatctaacactttcagtgaccactggttttggcaactctgtgaccgcttcctggccagcaccgtgacttcttcaaaccttgtttatttttccaaattgtcctggatatgagcatcttctctgccgtacggctgctgccttcctctaagatggccgtgcccatggtgctccagctaaggctccactctcagctataatgggcacaaagggcgccgccatcttttttccacagcaggctgaatagaatgccactgcgccgtgttggccttggctgggcacccgactcttgagtgtcccttgcaacgaagagagaaaggcactgaggtgactaagagtgattcccacagccattatggccgctcctgtcagaaacgctgcgatgggcgcarccctgtgacctcatagagcggcgcccgcagtctgaactcgcgatyccgggcaggctccgtggtcctcgcctcgcttcacggtctttaccgctcagcttcccggagtccgcgcaggagcgcgtctgaataggaagcgttttcggacgtggatgcggcgttttgtcgctgccagtggtgtctggagaggttcgggctcgggtgagtcgagttctgggcatggactcgcggcctgtgggtctgtgtaccgatggtgcgtggagcgtcctgattggggctgtatttgaacgcagtcgctgaggaagcggggcgttaatgacgggtcctttggctgtagggatgaagagtctgaggaaatcagcgacgagtccgactctgtctgggtctggggcccttgtgagtcaccctttacgggtgttgggctgggggacggtcaggtctttcccttcccatgaggccctatctcaggctatcacatgggatattatctttcctgaagaatataacatgtgctcttgaaaaaaatgtttattttactgctgttgagtgcagtgttaaatgttcgttaagtctagttggttgataatgttgttcaagttttcggtatccttgctgagtttctatttgttttctttattattgcaagtagggtaatgtagtcttcaattattattgttgaattgtctaatcctctctcattctgttttgcttcatacgtttttaaattatcatattcttatatatacacccttatattattattgccagccattgtaaccattgttgccactcacctaggccttggtgtccagagttttattggatatcagttaacacacacacacacaattgactgcctatgaggctgacttcaatctccagctcctccagatatcaaactaataccacgtggtccaaggtctcccacagtaaatcacattattaggatagacaatttggcatggcttaaattgccctgataaccaaagacagttttatcaagcagcgtattccaaaggcttagagtttgcctcataggaactgtgggcaaaggacaaagctctcttgggtaaagttactcctttagcgcataatgtgaaatgagacagttcttgtgatttgcttagtacattggtcttgacacgaggtatgtatacccaaagagcttacagagactttcgaaccagtacatgggcacacgtggtttttaaagacattcttggagccttccatgtgttctctttcctaaaattgatctgtctgagaattcaccttgaagggggccacccctccacaacctgtgggtgtttcttgtcaggtgggatgagagactgagaaaagaaataagagacaaagtatagagaaagaaaagtgggcccaggagaccagcactcagcatacggaggacccacgctggcactggtctctgagttccctcagtatttattgatcactatctctaccacctcggagagggggatgtggcaggacaataaggtaatagtggggagagggtcagcaggaaaacatgtgaacaaaggtctctgtgtcataaataagtttaaggaaacgtgctgtgccttgatgtgcacgcacacaaacatttcggtacaataaagagcagtattgccaccagcatgtctcacctccagccctaaggcggttttctcctatctcagtaaatagaacagacaatggggttttacacggagacattccattcccagggacgaggaggagacagatgcctttctcttatctcaaccgcaaagaggccttcctcttttactgatcctcctcagcagagaccctttacaggtgtcggggtaggggacggtcaggtctttcccttcccacgaggccatatctcaggctatcatatggggagaaaccttggacaatacctggttttcctaggcagaggtccccgcggccttccgcagtgtattgtgtctctgggtagttgagattagagaatggtgatgacttttaccaagcatactgccttcaagcacgtttttaacaaagcacatcctgcacagccctaaatccattaaaccttgagtcaacacagcacatgtctctgctagcatagggttggagctagggttacagattaacagcatctcaaggcagaagaatttctcttagtacagaacaaaatggagcctcttatgtctacttctttctgcatagacacagtaacagtctgatctctctttcttttccccagacacctgcctctgaggcattgtgctgtgctggttctgctttcccaccttctctataatagtcatgccacttctacttcacaaaagaaaggcatagatttcacacatttagaaccatgaaaacctctgaggcagcaaataaaggaactgttagaaatattagggtcttttatttaaggtaagtgcagagcagcagtgacaatgtctggacccagggttaatgtacactgaaagccattttgtttatcagtcctcaggtcctggctcccagaagcaaaataactcaagtgaagcaatgaaggaagaagaaggaggttgctggccttggatatcataatttctggggacaactttaagtggacactaatatttctgactaggaaaacttcaraaacttcatggcaartgcagaagagacaaagacgtatagtccatgttatccactattttctgakcacagaagaaaatgatcaagacccaggtgatattttccctttgattttttgatagatttatggtgrcctgaagaagtcagttgaacttaaggaagtatatactgggataattgtgttctagggagaaattaacttacattgcttttgggagtagaggtgggggttcattctgccttaagaagtagattctggatcgcttgagctcaggagttcaagaccagcctgggcaacatggtgaaaccccgtctctacaaaaaatacaaaaattagctgggtgtggtggtgcacacctgtaatcccagctactcgggaggctaaggtgggagaagaattgctagagctcaggaggacgaggctacagtgagccatgtttgcaccaccgcactccaacctgggtgacaaagtaagaccctgtctcaaaaagaaggaaaaaaaagtagactcaatatgaaagaatccatgctttgttggtagttcaacttttgaccattacaatgatacatgaatcacccaccactcaagaaggaactatggttgtcattttratgtacatactccagaccatttttggaatattggcattctttgcatgctggtgcctgccaaccaacttttttaaaattactaatttatttatttatttattttgagacagagtcttgctctgttgcccaggctggagtgcagtggcgcagtcttggctcactgcaagctctgcctcccaggttcacgccattctcttgcctcagcctcccaagtagttggcaggagacagatgccttcctcttatctcaactgcaaaaaggccttcctctttttctaatcctcctcagcacagaccctttacgggtatcccccggtgtcaygctgggggacggtcaggtctttcccttcccacgaggccatatctcaggctatcacttgggaagaaaccttggacaatacctggctttcctaggcagaggcccctgtggccttctgcagtgtgttgtgtccctgggtacttgagattagagaatggtgatgacttttaacaagcatactgccttcaagtgcttttttaacaaaggacattctgcatagccctaaatccattaaaccttgagtcaacacagcacatatttctgcgagcacagggttagggctacggttacagattaacagcatctcaaggcagaagaatttctcttagtacagaacaaaatgaagtctcttacgtctacttctttctacatagacacagtaacagtckgatctctctttcttttccccacatctgacaccagatatgtggggtttttcccacacatcaattcaattctccatacctattaggtattctaaaatttactcaattctgacactaattgtctagacttaggacagactccacaggttgagggctcagtcccacaatactgcccccctgaaaagtgctgggtccccaggttactcacaagttcttttggacttggctaccaattggatgtccccacaacccccttctcagatctattcatctgctagaaggctcaaaaaatgcaggaagacagtttacttactagattactggcttattatgaaagggtacaactcaggaatggccagttggaaaagatgcataggtcaggtaatggggaagggcctcagggcttccatgccctttctgggtattctaccctcccaggactaccctatgttcagcagcctggaagctctcaacctcatccttttattgttttggtgggttcattacataggcataatttattaattcattaactattggtggtaagctcaatttccatcacctctcccttccacagaggtcaggggttggttggagaggtgagactgaaagttccaactgtctgtcacaaggttggttcccctggcaaccagctcccttcctgaggccatggaagagccccaggcaccagtcatctcaatagcatataaaagacacttcagcaattccaaagatttggagggcagagaccaaatgtatatttatttttcacagtctggtatatagaaagtgacacggataagtatatttggtcattgttcccagttcatggcacagtatgcttaaaacccttggaatttcttcctgagaaataggtgtgtcttttgttattcataaggaaaccctgtgatacacctgaatttctgctcatgaggtgactactcatgagacctctagatagtgtcaggatgagactggtccccagaaagaccaagcaattagaggattggaactgaaaggaggaatggactggagagtaagttctataaaaactyttgaacaggctgggcatgggggctcgcgcctgtaatcccgagcggatcatgaggtcaagagatcgagaccatcctggcctacatggtgaaagcccgtctctactaaaaatacaaaaattagctgggcgtggtggcacgtgcctatagtcccagctactcaggaggctgaggcaggagaatcccttgaacccgggaggtggaggttgcagtgaactgagatcgtgccactgcactccagcctgggtgacagagcgatactccatctcaaaaaaaaaaaaattttatttattattattattgttttgagacagagtctcgctctgtcgcccaggctgtgagtttttttctttttttttttttctttttttttttttgagatggcgtctcactctgatgcccaggctggcgggcactggcatgatcttggctcactgcaagctccgcctccggattcatgccattctcctgcctcagcctcctgagtagctgggactacaggcacccaccaccacacccggctaattttttgtactcttgaacaagcttcaggtttgtgaacataccagggtgctgggaggatgccacacgcagagaggaatggaagcttggcacaccctcttccatatcttgccctatgcatttcttcagtctggctgttcctcagttatatcctctattattaactaggtaccataggtaaagtgtttcctgagttctatgagctgttctagtaaattatcaaacctgaggaggggtttgtgggagcctctaatttatagccagttagtcagaaatactggtagcccaggacttgtgactggcatcttaagaggaggcagtcttttttttttttttttaaattatatattctccaatttaaaaattttaattgaaaagtaaactttaatgtcgaaaatgcaaacttggggagggcagaaagatcacacacaaggctgtcacttcacacttggagggtcgcacagcagccgcgcaaaggcgctcctcacttcccagacgttgcgggggccaggcagaggcactcctcacttcccagatggcggcggtggtgtggggcggccgggcagaggtgctcctcacttcccagatggtgggcggctaggcagaggcgcttctcacttcccagacagtggggcggccgggcagaggaactcaagaggaggcagtcttgtaggattgaacccttaaatctgtggattctgacaaagatagtgtcagaattgaattgaattgttggacatctagtttatgtttagataattggagaattggttgttagtgttggaaaacactgcacaaaaacattcagtgctgcaaatcttgccaacacttactatgttatcaaattgtgtattttccatgatctagatgatccagtattattttgccttattttgcattttcccattcaccagtgaggttcagatccttctcatctctttgttgtttctttggattatttattctgtcataaagtgtctttagtctttgttcatttaatttttttgtggtcttactgatttataattgtttatcttgactggatattgattcttttatatgttgcaaatatttttctagagtcttacttctcttttagcttgttcaaaatattttttcccatgcagaagtcattttttttaaagctttttacttatatcatgaacatgttttcatttattccttttttttttttctttatttgagacagggactcgccctcttccccaggatggagtgcagtagcacaattayggctcactgcagcctcaaccaccatctgcctgccttagcctcctgaatagctgagaccacaggcatccactaccacacccagctaattttttgttctttgtagagaatagagacagagtctcactatgttgctcaggttggtctcaaactcctgggctcaaactctcctctggaagtactgtaattacagatgtgtgccccactcctggcctcataagttcttcttaagtttacatcttatattcattgtctattaatacctaagaaattactccaaaaggtagtgacttgaaacaacacttaaaaaaaaaaatctcacactttctgtggctcaggaataagggcatggcttacctggctactttgattcacagtctctcatgggggttgtcgtcaaggtgttagctgggttggaatctgatctgaaggctgaaatggggaaagatgcagttctaagctcacttatgtggttgttgggaggattcatttccagaatgagaaatgaggtagtttagttgaggtcctcagtttctacctgtctgtttgtcaaagcccacttttagttttttgtcacatgcacctcccctatgtgccaaattgtttaatcaaagctagaaaatgacagattctgctagcaagatggaagtcatatagagtgtaatcttaaagtggcatcttgtcacttttgctgtattcttttctttagaaacaagcttttaggccacttcatactcaggaggatggtactgcacaggggcaggaacacctagagtgtaataaagaatttggctagcctttgttttcgttcctgggaggtaacctctaaacccttgtaattacccaagttatgagtgtctctgtcattcatggtgggccactcatatttgatagtttatatctatatgtatagtggtgactcatagtagatccctagataatttatggcaatgacatgactctggataggggctgcccatgccaaaaagcgcactaagtgattagagagttgtggctttgagccatgtaataccagtcaggaaggggagggaactggagactgaactcagctacatgggcartgcttcaataaactgtgcctacatcatgaagtctcaataaaatctctggacatcaaagtttaggtgcgcctcgctggctggcaagtactcttgaatattgttacacaatgtagtcaggaagatgtaatgccaccaaggattccatgaggagaggacagtcagcagctttgtgtttggaaccttcccagacctcaccctgtgcatattttcctttagctgattctgatttgtgtcattttgcaatagtaaagtgctaattgtaaacacagcactttcttgggttctctgagttgttctatcaagttattaaacctgagggagtcatggtagctccacacatttgtagccagctcgctggagttgagggtggtctgtgtagccttaagcttgcagcttgtgtctgaagtgagggcagtcttgtggaggattgtgcttttaacctgggaagtttggcctaacccaggtagttgatgtcagaagtcactgcagctagagaatgagattatcagaggacaccttagagttggcctgcaagatttccatccagtaataaattcttttggactgtggagtgaggtagaaatttaactttacacttacccagtcgatagacatctcacataaagattttggaatgagataaactgaccaggcttgagcacttgcgcactctcatgagtctactttcttgactatgcagcatcccacacagtaatatagcatagattctcttatcagtatttccttggatcttagttacctctacttcacactctgcagttctctgaaaagttattgtgaagcaggagaatgacagtttagttgacaaacaggtccttgatatcatggttgtaagacagcaagtcatctgctagccatgtgttttaatcccaaatggccttccaaaattggccttttttgttgcaagaattaggactttgaagattgtattccatacgtttctggattctattattgaaatgtcagccatcagtatattttgttatttctttgtaggtaatctgtcttttgtctcttgatgattctatagttttccctttgcatttgatgtatggtagtttcagtctgatgtgtcacaccagttgtgacttcctgctctgaacttgttgggatttctgaatttgagatttgaggtatttagttctgaaatattttaggttttggatatttattaatagatattgcttctctattacactattttcccttttagaaaccataagtgggcatacactaggtcttgcaactctgtatttcatatttattaacttctttgttatgatttatcttttttctctgtactgcattttctgccatttccacttatatattccaattcaccaataatcttcaatgtatctaatatgctgttaatctgtccattaatacacatatgtatatatgtttttctgttagaagtttttttttgctgggcgcagtggcacacacctgtaatcccagcactttggaaggccgaggcaggaggatctcttgaggccaggacttcaagaccagcctggtcaacataacaagaccctgtcactacaaaaattggtagtagcatccacctgtagtcctagttacttgagaggctgaggtgggaaggtcgcttgagcttaggagttcaaggttgcattgagctattactgtgacactgcactccatttggggctacagagcaagaccatctctctttaaaaattaaaaaataaataaaaatctaatcaactttaggggccttttgtgctttatacagatatagtttcatcttttctcttacatttatttaaaagcactattttatgaattcaagatgtgaagtctattcatgacagatccttatattggttgtgaagtcattggtaatgtagggatgttttatttgtcctgatgtcatttgcctaygtttaatatttagaaataggcgytaaaatgtatagatagaggattttgctcctaccaaagtatatttgagaaaggaatatagatgcaggctgtattgtgaaaatttttaaaaaattatcttatacttctatattaacaataggagtttatatcatattgaataggactttgtaattacaggaatcactgaccctggaggatgtggctgtggaattcagctgggaggagtggcagctcctggacactgctcagaagaacctgtaccgggatgtgatggtggagaactataaccacctagtatcactgggtaagaatagtttccctgtgtcacctagaggtgcctacaatgcccagacaccgtcctatgctcacctaatcaaagctttacagtcactgtggtgtttggaagagttacattttcagtcccctctctgaccccaaagtggtataatctcttctaagacagaatgcttactttgaaattgttttcttcatcgaatgtattatttttccatcttgacatactggactccaattcaggatgtttgtgtttgtctttcctcatgaacagggtatcaaactagcaaaccagatgtactctccaagttggcacatggacaagaaccatggayaacagatgctaaaattcagaataaaaattgtccaggtaagtgagaaccagcaaggacagtggctataggagtcttattgtagtcattaaggaaaggtgtcacakatatgaagtatctgagggtacctaagcagctccactatatattcatctccccatctgataacttttttaatgctgttatagctttaaagactttttgtcttttcttggatctgatttcttggatatatttcagcttatatcttcataatttccttttatactgggatcgtagagttgacaataaagagccagcccccagcaaatcatctcataagctaagattttttttttttttttttagactgagtctcgctctatcacccaggctggagtgcaatggcccaatctcggcttgctgcaacctcgtcctcctgggatcaagtgattctcctgcctcagcctcctgaatagctgggattacaggcatgtgccaccacgcccggctaattttgtaattttagtagagacggggtttcaccacattggtcaggctggtcttgaactcctgacctcgtgatctgcccgcctcagcctccccaagtgctgggattgcaggcatgagccaccgtgcccggcctcataagcatttttatctcatacaattctcatggaagaatttgttactctgttctttcttaggaatcgggaaagttgacagtcatctgcaagagcactctccaaaccaaagacttctgaagagcgtgcagcaatgcaatggacagaatacacttagaaatattgtacatctcagcaagacacattttcctatagtgcaaaatcatgatacatttgacttgtacagaaaaaatttgaaatcaagtttaagtttaatcaaccagaagagaagacatggaataaataaccctgttgagtttattgraggtgagaaaacacttctacatggtaagcatgaacgtacgcatactaaaactagattttctgaaaatgcaaaatgtatccatactaaattccaagtcttcaagcatcagaggactcagaaaattgagaaaccccatgcatgcattgaatgtgagcaaaccttccttaggaagtctcagctcatttaccrtgagaacatttgtatacaagagaatcctggaagtggtcaatgtgagaaattatccagaagtgtcctgttcactaagcatctgaaaactaatacaacagacaaaatctgtatacccaatgaatatagaaaaggctctactgtgaagagtagtctcattacacatcaacaaacccatacagaagagaaatcctatatgtgcagtgagtgtggaaagggctttacaatgaagcgctatctaattgctcatcagcgaactcatagtggagagaaaccttatgtgtgcaaagaatgtggaaaaggtttcactgtgaagagcaatctcattgtacatcagcgaactcatacaggggagaaaccctatatatgcagtgaatgtggaaaaggcttcaccatgaagcgctatcttgttgtacatcagcgaactcatactggagagaaaccctatatgtgcagtgaatgtggaaaaggctttaccgtgaagagcaatctcattgtacatcagcgctcccacacaggagaaaaatcttacatatgcagcgaatgtggaaaaggcttcactgtcaaacgcactctcrttatacatcagcgaactcatacaggagagaaatcttacatatgcaatgaatgtggtaaaggcttcaccacaaagcgcactcttattatacatcagcgaactcatacaggagaaaaaccctatgaatgcaatgaatgtggtaaagccttcagccagaaaatatgcctcatacaacatgagagatgtcatacaggaaagactccctttgtatgtaccgagtgcggaaaatcctattcacacaaatatggcctcattacccatcagagaattcacacaggagagaaaccttatgagtgcaatgaatgtggaaaagccttcaccacaaagtcagtactcaatgtacatcaaagaacgcatacaggagagaggccgtatggatgcagtgattgtgagaaagccttctcccacttatcaaaccttgtcaaacataagaaaatgcacacaagagaaatgggtagaatcagtcaagttgaaaactcctgtaatggagagtcacagctccttccttataagtgaactcatgcagaagaaaaccctactagtgccgtgactatggaaatgccttttgtggcaactcagacttcattaaacatcagtgtgtttctagccaattggaacataaacatggtgctgcctgttgacagatgtgtgtctgtcctcaggaggtgaaataatttgccctagagatcaatttgatgaatacagtaaataaggtagtgcctttagtggtcttttacctcatattttctgtcaatgaaaatacgttgaataaactatattaatgtggagatgttttgagcaataatttctgctcatatgtctgaaaagtatacagagataaattctgtgaatacaaagactaagaaaagtcttctgtggaaagatagactttattatcaggtttcatcatagatttcaacgtaagtgagcttattgttgatagaaacatgatgaccatgacaaagtctttactcagaaatatgacctcagtgagtgtcaaagtttacactggaaaataactttaaggtgacagtattgatggcaggatttcagcgacgcactctgcttcatcatttgtcaggagatcacatagaaagtaaaattgttccgaacatgctatcaaataaatgtggaacacctttagcaaactatcaacagctcatgaaggcatgaaatgtggtgaaaatgatgaatatttgagtgctttttcttaataagtataaccttaaacatcagctaatacacctggtgtgcattttcagtcaggataccttaatcctcatttctagttgccttgccaatgattccataatatactgtctcattactgtttatttttactgttgtgtaaaattgtggtataatgagaaatacatttggtctttgttcctggttcctggcatagagctcctaaaacgcttagaatttcatgagtgataagagttttttggttttgttttgtttttgctgttgttgttattcatagcactgcccttttaattacacctgattatactactgaagtgacttatggttgctcccctagacagcctcagaatggggctgttctctaggaagatcaagtaactagaggatggagactttgtgccccatttctcccacctcctggaaggggaggggtgctggagattagattagacaatgagattaagagaactccaaatagcccaagagggtggtgcacccccaacttyataggggtagaggctcctgagattaggagaaccctttttaggctttactctatgtacctcttcatttgagtgttcatttgcgtcctttataaccagtaaaacaaagtacgctgttttcttgagttttgtgagccctgtagcaaattatcaaacctgagtagggcagtgggaactcggaatttatcaccattcagaactgcaggttgtccttgtgagtggcatctgatgtgggggaagtcttggactgagccccttaacttgtggagtctgcactaatttagactgcactaactaacttgcactgcactaacttggactgcactaacttgtggagtctgcactaacttggagaagttagtgtcagaattgaattrtagaacacccagttgttcagaattgaattgtagaacacccaattggtgtgggagaattagagaatttatttgtgtcagaaaatactccagaacaaccaccccatattatgattagctcttttcctttctttggctctgagcttaattgtacattaagcaaacttaagtagaaaagaaactgaatatgttaaatatattaahaacatatttggacttgcttaactaagattatagagatgatcagtttataaaaccaccttcaacttaaataaatttgaactygaaattgcaaaagcagtctagaggctttgctagtatccttcaaccaatttctagtaaaaatatcctatataaccataattatcaaaaccagaaaaacaacattggtaggatactataaagtactaatcttattttggatttgacgaatttttacatgtttttttcttttttagtttgtactctaagaagttgtattacatgtacagattcgtgtaaccactgcaaccacataaaactaatgaacacaaagtccctcatgctacctttttatgcttacactccatccaaacctaactctgccaaccacttttctcctatcagtataatttcatcatttcatgaatatgataaaaataaaattgtttttgtaaatggtttttataaattttatataaataagttatatgaatttttattgatagagagtatgtaagcttttggcatttttgtcactcagcaaattactcctaaggtttatatgagttgatgaatagttgttttattatttttttttaccaccatgtatctaaccagatgaaagttgtttatatttgagagtagtatacatatttgatgtagtagtttatccattcacctatgagatatatttgcactgttttcctggttttaagtgctataaataaagatgctgtgaaatctacatacagcttttgcttttgcttttttttttttaggatttacaatcttaacctcttttttttcttttttaagagacagggtctcttgagaggccgaggcaggcggatcacttgaggtcagaagttcaagaccagcctggccaacgtggcgaaaccctgtgtctactaaaaatacacacaaaaaattagctgggtatggtgctgggctgttgggagccraaggcccatgggatgtgaccaactcagcattccactggaggctatatgatcaaacagcaaactttatcatgaatgcacgatgtgggcaaactcatgactgcttccgctgccagaaggtttgctgagggcaatcgcttcctggtgctgagctccttgaggttatctactgggacatctagagaatgccatcttgcaaaccctactctggactgagtagctgaccccttcttccaccygccttctcactrtctcttttgcctaataaatatggagggctgtgtaaagctcagggcccttgtccactagaggcaaggtgtcccctgatcccttcttccaaatatactcttttgtctcttttattcccgtttcccccacttttttcagtccccctaggtccttgtgggttacgtagtggcgccccaaacagtgacaggatcgggcgctctacagttggcgcctgtaatcccaattacttgtgaggctgargcaggaatcacttgaacctgggaggcagaggttgcagtgagctgagatcctgccactgcactccaggcctgggcaacggaataggctctgtctgaaaaacaaacaaaaacaacaaaaaaaagagtctctgttgcctaggctggagtgcagtggtgcgattatagctcactgcagcctcaaactcctgggttcaagtgttcctcctgcgtcagcctcccatgtaggtgggactatgtgtgtgcaccctcatgcctggctttttttttttttttttttttttttgtagagacagcatgttttaggccattcttgcattgctataaataaatacttgaggctggataatttataagaaaagaggtttaattggcttatgattctacaggctgtacaggaagcatagcactggcatctggtcctggggaggcctcaggaagcttacaatcatggtggaaggtgaagagggagcaggagtaagacagagtggagggggtaggtgctgcacactcaaatagctagatcttgctagtactcactcactattgcaagggcagcatcaagccatgagggatctgcccccatgactgagacacctcccaccaggccccaccttcaacattggggattacatttcctttttttttttttttttttgagatggagtctcgctctgtctcccaggctggagtgcagtgggacgatctcggctcactgcaagctctgcctcctgggttcacaccattctcctgcctcagcctcccgagtggctgggactacaggcgcccgccaccatgcccagctaattttttttttgtatttttagtagagacagggtttcaccatgttagccaggatggtctctatctcctggtcttgtgatccacctgcctcggcctcccaaagtgctgagattacaggtgtgagccaccacgcccggctgacattgggaattacatttcaacatgagatttggacagggacaaatatccaaactatatcattcagcccctggtctccctccccaacaaatctcatgtcctcacattgtaaaataccatcatgccttcctaagagtccccaaagtcttaactcattccagcattaactcaaaagtccaaagtcttatctgagacaaggcaagtctcttctacctatgagcctgtaaaataaaaagttatttgcttccaagatacaatgggggcatagacgttgggtaaacattcccattccaaaagggagaaagccacaagaaagggctataggttccatgcaagttcaaaacccagcagggtartcattaaatctagtgcaaggcgtgggttcccaaggccttgggcatcctctgctcatggggctccctcaggcagacatcatggtttgcagacagctgtatccttcccaggtggccctacagaggaaggcacaccygacttttccaatgtcctgcagacccagctgtctcaactcttatggtgatccaagagtgagggcccctccctacttggacaccacccaagctggcaagtcctgcttggctaggagcagggataagcacttggatggcagattaggtgacccccacccactcatggcattatgtttgtccacagagtttagtaacaattgggactgctgggccggaggctctagtggttggattttgactggggctgcatggtctaaatagcttttttcacatatttgggcttctgctggaatggatgaggcctttatttacacagtcaacaagaggctagtctgggctttcttacaatgtgttggaagatctctaagagacaagcaagscttgatgagcaagcttatttctcacctccatttgtgttacacttgctactgtcctattggacacattagtcagtcactatggagaatactatccaaagatgtgaatatagagatgcaagaataaatttatgcaataaccacaaaagtatttgtttccttataattgtcagatcaataccataaatatccttgcacatatttgttctcacaaagaaaagttctattgaatcaattcttaaaattcatggctcaaggagaaggaaaagtttaaactgggtaataacagactgtactacaaaaacattttacgaatttatatagaaacacaatcctatacctagaaataatgtaatgcttaagaacttcgaattatgaccagtatgataatatctcaattcatttaaagcagtatgtaattgacaacattattacctaccatgcagaaaaagaagacttaaagaggcttagcataacagaatgcctttgttccatggccttataatctaaatatgatttgtcattcaatctttacaaatcttaataagggttaaaacatttatatttcacgtttactttgcatttgtttgaatattagtaaaactggtattttttaaattgtttaggatcatttacattaaaaaaagtgtcctgtttatttccttcatgtatttatagaaaattttagggagcttttaagttgatcatcttttccttatttttatttatttttttttttgagacaagagtctcactctgtctctcaggctggggtgcagtggcatgatcttggctcactgcaacctctgcctcctgggttcaagcgattctcgtgcctcagccttccragtaaatgggactacaggcctgagacaccatgcccagctaattttttttgtattttagtagctatggggtttcgccatgttggccaggctgatctcaaactcctgaactcaggcaatcctcccgctttggcctcccaaagtgttaggattacaggcatgagccaccgcgcccatcttttttcttatttcttttcagatctctttataggccgggtgaagggtgaagtggctcacacctgtaatcccagcacttttggaggatgaagtgggaggactgcttgaggccagttcaagaccagctgggcatcatagtgagacccttgtctctacagaaaattaaaaaattagccaggtgtggtggtgcccacctgtagtcccagctattcaggagcccaggagttccaagttacagtgagctgtgatctccccaggcactccagactgggcaacagagtggaccttgcctcaaaaagagacaaaaaaaaaacaaaaaaaaagaaaaactctcatataccaagggtgagaakagcaaatggaacacgaacttgactctgaaaaatagtttgacaatttctctgtatatttatatactgatacctatatcacacacatagattcacacaggcatttcctttctctcattcttctaatataggaagtttggttggatttatatttacagttcagcattgccatgactttgcacatactattcgcggttggcacacgtagtataacgtgatctccttcttaacctttctttcttttgttttttttttgagayggagttttgctcctgttgcccaggctggagtgcaatgacgccatcttggcccacagcaacctcygcctcccgggttcaagcgattctcctgcctcagcctcccgagtagctgggattacaggcatgcgccaccatgcctggctaattttrtatttttastagagacagggtttctccatgttggtcaggctggtctcgaactcccgctctcaggtgatccgcccacctcggcctcccaaagtgctgggattacaggcgtgagccaccgcgcccggcctctttcccaaccttttttttctcactgaagtggtcctgttcccttaatttctggccacttctcctgagtccagccctcatatttggctccacctgggtcccaggctctcccctccgccttgggaactatactttctggcttttactggcttttccccatgcctttcacccaacataattttggcacgttccaaccgttttcattacctagtctgtgactgctacccctgttccgtcagcgtagctaacagccctcttctgcgttcaaaaggcgcttcaagctactttgttagaaatctggctttggccgaagtgtcccctctcggccggttctccttttccctcacaaggaactgtttcctaacctttgtacaaagtgtaaacgtcgcggccatcttagccttctattcagctgctgaaagggatttacctccacgccatttttgtcttgtgtaaactggagcctctgtatatggacccstatttatgaagggttgaggtgccaggaaatgggacagtttcagtgctctttcatcttcccggccatccccggtcacccccggtcacccccggtcaccagcgccaaaacgcgccctttgccttgtgtacgtcagatactcaaagatggcggcccccatggagccaaggcgacgagggcgcggccatcttgcatctgcgcaaacgctgggaacgcctccgaccctggatagtcgccgtcaggcactgaggaggccgagagatgaggccggagcccaccaagttctgggaagtaagttcagtcactgggtggtcgctgtggtgacgggggaggaaattctgtccgtggctgggcgtgttcgtggacagtggtgatggactggtatctgtcggcgccagcgtttggcgacgccagtggaattctttcaggagcttagcgtgggtccgattcctatcgcaggggaactacaagaggtccgtgatagggtgtgtgtgtgtgtgatcggggtacctctgggaccagtcacagggtcctcgtgtagtttgtggttaaagatctctagagatccgctactgagtgcccaagtcacattctggtgtctttggtgttgtcctttggcggggctcagtgattgcgaactggagggtttgttttgtcagcgaatcggtttatggttcaggttttgtttgggactaaatgattgaggaactgtcttgggggttaaggtacggaggtttctgatycaggttttggaattaatcccggtgscggtggtggtagcgccacagattccgatgtgggctgcagctctggaggcctgggaaccatggcaggtgatgggttagccccagccctggctgctggaacagaattgatgctcattagcattccccttctgcccaagacccttctccacgactggtttttaaatcccctttggcaccttccatcaccccttggtcttgaatcctcagaaatggaagtttttggcgagatcagtcatctagcatacctaaaagtagtatgttttatatttaagatgcggcttctaccctttgtcctgcaagtttccagcgtatcctcttggatatttcttttcaggttctttctgacacaagtaagataacatctctgccatggtaagctcggttactcaaagataacctttgtcaaattttcagaatatttcaattttagacgtgtatgttatgtgcttaatattcataattcagataaattatgtaaatggtactattatctttttcgctttatattatgtaataaacatttagaagttgtttttactgtttgagccggtggtactataagtgcattcacattaagtttatgcgtacatttggatagaagtgaaatgttttaaaatgtttaggtattatttttaggaacattttatgattatccatttatccatgaattttgtttttcctgcctttaatcttcaatctagactattacttwtattgcagtgtattgctttctgactcccctttccttataatctataacaaaagataaattaattttaaatatttattttatatttggtcatcttaattcttagtattacaatatttttctctctgcctaacatattattttgtgaaaatttttgaacctatggaaatattgaaagaagtttaatgttaataccaatatgcctaccacctagcttttaccattaacattgtattagatcagctctactggttttctaagtattcatccattcctctgtttgtgaatcattccttatttgttgtcgattttggtatatttcaaagtaagttacagacataagtaccattcctctaaataattctgtatatgattaactagaattctactaatagccctttaattgctttatttatttacttaatagggaggcatctgatttacagataattttggttcggtataaagtagagtaaaagtggattttgaagtgaaacaaaagtggattttcagccctgattctgcttcttgctcattgtgtgattggcataacttgtgtcgctttacttgttggccaaaagaggagttaaacatcttttcctcacgattatctctgaggattatttttggttttgtcttttgtaaaatttgtatttatattcatttttttctctcccttcctcccgcctggtttctctcttttttctattaatgaaaacatttaaagccgtaaacttatattactgaactaccatcagcaattttattttaaatgtagaatgctaatatttttctgatgtaaacctgtgttttccctatgaaaaatcaagtgaagaaagtaaaaatgacctgtcagatagcacacttttgccaatattaccttttaagaaagttttaggaatggrgttttgggttaccaggtatacctttattggcaattttcaatagaatgttaaattrttcccaagaaaggttctgctcttaatactgactcgatctgtatatgctttaggaggatataggatttttctatttaaattttgtatccagccacctgactaaaggaatacagacgtattaggcaaatactgataatttgccccttatattcaaaagtcatctttgattatttttttatactgcattctactgagtgacattctagacccaaattctcaactctgccattgtaatgtgataatagcctgagatgaratgtcatggaatgcatgtagctgtgttcytataagactttatttacaaaacaggtggtccaggtcctggatactatattactgactcttgatttaggtgaccatatggcttttctgcacaaattcacagttgggcaactagagcccatggactaaatctcccagcacctgtttctgttaataaagttttgttgggacctggccacaatcatttgtctatttttttgtatgtgggcatttttgagctacaacagtagagttgagtagctgccacggaaaccatagacctctcttttaacatggaaataattttttaaaaattagttttattgctgacactattgattacraacaacatataaacttatttgttaatgttatggtaattagtattttatactcttctgctatgcagatatcttaaaatacgttttcatttgccatcctcctactttatatgttcttttttgttgttgttgttttgagatagaatctcactctgtcacccaggctggagtgcaatggcacaatcttggctcactgcaccctccgcttcctgggttcaagcaattctcctgcctcagcctcctgagtagctgggattataggcacgcgctaccatgcccagctaatttttgtatttttagtagagacggggtttcaccatgttggtcaggctgatctcgaactcctgacctcgtgatctgcccacctcggcctcccaaagtgttgggattacmggcgtgagccaccgcacccggcctatatgttcttatggaatattttaacactatatatattaaaacttcctgatatattattatcagtattatttttccagtcaatactgatttaggctttattaattacttaccrttttgttcctcttcagaccttgctcctctgcttacactggagtcatctttcttttgcttgaagaatatccgttaggatttgctgtaatatgtaattcctcaaggatatttttgctgagtatcctttatacatttatacttagaatactttgcaagtatcaagatgtggatggcggccgggtgcagtggctcatgcctgtagtcccagcactttgggaggctgagatgggtggatcasttgagctcaggagttcaagaccagcctggccaacatggtgaaaccccgtttctactaaaagtacaaaaattagcagcgcatgtggcgttcacctgtaatcccagcttctcaggcggctgaagcaggagaatcgcttgaacccaggagatggaggttgcagtgaacagagatcacgccactggagtcttactcactccagcctgggcaacagagtgagtgaractcagtctcaaaaaaaaaagaaaaaaagtcaaagatgtggatggtaatgaataatttaaataagatagtgcttattatttgcttaggacagtgttctcagattgcagtatcctagaatgtaraaagacctctgaaaaggtagatgggtacacatggttttaaagaaaaaatgtgtgcatcttaactgtctatgtgacctctttcctaaaactggtctgcctgaggattgcccagctgctgggcatcacgttgtgacgattcttttccccacattctctttcacttactagcagtagtcataccacgtcaactttatatagaagggtgctgtacctcccatatattcagaatgttatattttactagcccagatataaaagcttctggagcactaaataaaagaacagagagatatttgggggccttgatttaaggtgagcatataggaacagtgacaacatctgggcctaaaaagaatgtaccactcagagtaatttgctcttcagcccacaggtgctgagaacaagagaaatcaagtgaaggaaggaggcggagtttccaagacttgggtgtcatcatttctggggacatccttgattggagattgaagtttttgaaccgaaatttagagctgattcagaagagacaaatacagaacgtccaagttagcagtcrtttcccaaatttaggagacaatgatgcaggcccaggtgacttttggtttgttttattctttcctttattctccaatgtatttttaaagtcctgtaaaaatcagggtaattaatcagaaaagtataaattggaaatatcaggacctggagaaatctgggcaaagaaggatcagggatatattattcataggattcatactacatgattcatgttggaatttgtgactgtgtgggaccccgtaggttacatttgctgtaaacttgcctctagtatctctgacaagctatacaagagaaacatgataagttatatcaactgtgagaaagcagaccagtttcttgagggatgttaatgtttcatggcttataattctgaggctcaaatacatctttgatagttcttcacggaggtgttatggtaggtggtgttcttaactgtagccttctcataaatgcaaaagtagatttcttttagctgtttcttcattgtatttaatgttattaacgctgtctaataacatacacatatatatgaatttgtctgtgtgcatacatgtgtctgcatatatattctaaggatttttttttccaaatttgcttaatcatggccaggcgctgtggctcacacctgtaatcccagcactttggaaggccaaggcgggtggatcacctgaggtcaggagtgtgagaccagcctggccaacgtggtgaaacctcatctctactaaaaatacaaaaattagccaggtgtggtggcgtgcgcctataatcccagctactagggaggctgaggcaggagaattgcttgaacccgggaggcagaagttgcagtgagccgagattgtgccactgcactccagcctgggcaacagagcaagactccatctcaaaaaaaaaaacaagcaagcaaaaaaacagatttgtttaatcatctaataatctttgtgctttatacatgttttatatagtctcttttatttcattcagaataaaataataatatggttaactatrttaaccatagttatttagaatgcattgtcttgtgatactagcatctgccatgtcttcattacagagtttgatattggcctgaaagctcatagtgaatttaagaatctgaattattcgtctacttgtaactggcatatacttatgactagtttggtattgggaaatagatgctacatgttatagatgttctttcattagcaagaggattggatagctgtgtattacagacatttctttgacttttcaacattgttgaatgaatggatgaccgcacagttacagaatattttactggaattcttattctgycaaaatgtactaagaaaaaaaccccaccagcttcctatgtggtgaaaatgagcggaatgacttccttgacattcttttcctatcaccaaaagaatatgacttcattaaacagaagtgtgttattacaggaatccctaacactggaggatgtggctgtggacttcacctgggaggagtggcagttcctgagccctgctcagaaggacctgtaccgggacgtgatgttggagaactacagcaacctggtggcagtgggtgaggacagctgccctgtgtcactcagagggtgcccagtcagtggccttcctttstcagctgcttacctgcagtactctgaagtggtagattctcacatcattctcttgccccacacaagagagtataatctaccttcttgttacagatctgatacctatgtagtccttaaaaygtaactctcctttttcaatattgccagccccgtttgatttgtctaaatcttctgtcatttcccatgaacagggtatcaagccagcaaaccagatgcactctccaaattggaacgaggagaagaaacttgcacaacagaagatgaaatctactctcgaatctgttctggtgagtgagaggagcagccaggtggacagccacagacaccatgttctgcccacacagagcaggcgtcaaagcagtgagggcatctgaggacacagcaacagcccctccatcactccttcttcccaaggaagagctcttttttgttrtagtatggaaaatatgccccactttcttttcttttyytttttttttttttgagatggagtcttgctctgtcaccaggctggagagcagtagcgcaatcttggctcactgcaacctccgcctcccgggttcaagggattctcctgcctcagcctcctgagtagctgggactacaggtgcgtaccaccacgcccagctaatttttgtatttttagtagaaacggggtttcaccatattggccaggatggtcttgatctcttgaccttgtgatctgcccaccttggcctcccaaagtgctgagattacaggcttgagccactgcgcccggcccccactttttttccttgagatttcatctttgtttattttatgcacatcttgtttttgtctacataattatcttcttaggattttcaaatctgccttttctygtccactgtcacagtgtctctgcttgtgtattacctctcttgctatgaaattccattttccaggcctctccggaaagagagacctttgaactcattacttttttctgactactgcatcttcctgccctagtaggaaaataataattttccttcattattcccactctgggaatcattattttccctcattttctccactctggatgctgtgcccatgataacctggtctctgattggcatttatgtgtttcttaagttctcttattcctcttatactgaatcctgagtttctccatactttttttttttggaaagaaggtctcatctgtcacccaggctcactgtagccttgacctcctyggctcaagcgatcctcccacctcagcctcttaagtggctgggactacaggcacacatcaccatgctcagctgatttttgtatttcttatagaggtggggttttgtcatgttgcctaggctggtcttgaactccttggctcaagtaatctgtcagccttggcctcccaaagtgctgggattacagcgtgagcctccgtgcccagcccatccttcttccattttctttactgttctcataacttttaaaagtttttttcattcccgtgaattaactcttcattctctggaagagactaccaaattaacttctgccttaatattatctaatgtatactttatttccatgtattttacttgtcttcatgacaactagcctgtaacttcccattttgtgtatgaggaacaagaatcatcttccctctaagaataatgcttttggctatccttatataattttatttttttaattttattttatcttttatgtttttattttagattcaggaggtgcatcaggaggtgcatatgcaggtttgtctcatggatatattgcctgatgccgaggattcactagaagctcaatcctgtcacccaagtagtgaacatagtaccaaataggtggttcttcaacccttgccttcctcccttcttcctcttggagtccccagtgtctattgttcctgtcttgatgtccctgtgttcccaatgtttagctcttgcctacaagtgagaatacacagtatttggttttctgtttctgagttatttcacttagggtaatggcttccagctgcatccatgttgctgcaaatgacatgctttagttcttttttatggctttgtagtattccatggtgtatatataccacagttatcctgttcaccattgatgggaacctaggttgattccatgtctttgctgttgtgaatcgtgctgcaggctgtcctgtttaaatccagggtctctttcattactgcacatcttaaattctggcattaccttaagtgttttctacatgctgaactctcttaaagttctctactttaagataatgttttgattaattagaaaagatcttttaatatcgtatattatttctagcccaaaccatcagacatttatgcctgctgcaaattacttccttcatagttttgctaattctgaactttctttaattcatgttagatgttttgactgcattcatttctgtatagcttttgcttttttcatcatatttgtaaactattattgagatacaatgcacatatcacatgatttcacccatttaaggtgtataagccagtggtttttaatctattcacctagttgtgtaaccataccacaatcaattttggaacatatactatgtataaatatatattatcaaatagtcttgatgattatggttctatagtargttttgaaattgggaagtgtgagtcctccatctttgttctttgctttgaaggttgttttgactattctgagtcctttgaatttccatttgaagtttagaatcagttgtaaatttctacaaaaagagtggctaggattttggtaggtactgcactgagtctgtgtaacaattttggggagtattcccattttcatcatattaagtattctgatccatgaacactggacagttttatatcctgttaggtctttgacttctttcgacaatgcattatcactttcagaatataaatttggtacttcctttgctaagtatattcctaagtatagttttctttttgtttctgcagttaatggaattgttttcttgattacattttcagattattcattgctagaatatagaaataacattaattacttttctatcatattttgatgacacctagtcccagttaatcatgtttcttgtcatatgattccttcctttaaaacttgtgttttgggctgggcgcggtggctcatgcctgtaatcccagcattttgggaggccaaggcagatggatcacttgagttcaggagttcgagaccagcctggccaacatggtgaaaccccgtttctactaaaaatacaaaaattagccgggtgtggtggtatgtgcctataatcccagctactcaggaggctgaggtgggagaatcgcctgaaccctggaggcagacattgcaatgagccargttcatgccactgcactccaggctggatgacaaacccccctgcctccaccacacacccaaaacttgtgttttgatagcctactatattccaacgctatcagcagtacaaataagaaagaaaaaacataccatgtccttattcttcacaatgcttttgttctcttagaagtaaycatataaccagtaataagcagatatataaataacatatcttggagtaaaaattgctataaggaaagttaaagcagctggtggaacagtaagtgttaggagttggcactgtgcttgtagggtgggaacagctctttgttaaggtgcctttgagcagatagatgatgaacaygtgtaggctccctggatgaagagtgttccaggtgtgagacaatgagaagttgaaaaatgaccctggagtgtgtttgaggaacttctaggaagcttgaatggatagagtagagtgagcaaaagcaaaactgtctggaaataagaacartgggggcatagttggaagttttggtacagaggtcacatactgcctgtcaagggcattcatgaccttgattttattccaaatgagttgagaacacagtagggagttttgagtagagaagtgacatgatataactaatttatttgatagattactttgcctgctaygtagaaggtagacgttaatggggaggagagggaactgctacactcatgattacagtttgtgacagtgaaataatacaaattaaaatcatcaaagataaaaagtatagaaagaagaatccaggagaaactgggtgcaagctttcagttctcctgttctagtrgagttgcacaaagtgctraattttccctgcaacagtgtttgtcaacacatgtgaagttattgccaactagggaagctcatctaagcccagtgtctgtagccacccagagtcaaaacaatacaaatgtggcccaaagcctgagacatgcaaaaccaggtgtccaccataaatcacattgctagcataaactatctgatatgacccaaggcctcaggcattaaaagatacccttagcaggcagaatattccaggggctcagaggttatcttttagaaggcagttaagacgagttctttctttggaatgtgtagggatggaatagcccaggcctgctgagttaacactttgctgcaaatcattgttccctctttctgtagcaacacgggatagtatgatccagttaggtcattagttggagtcttaagtatagaacctttcatctaaacttgagattgtgctttgggaaaattagtttaatggtggtacatagaatgaagaagaatagcaagtttggggaatgtgataatcactcagcatgtgacactttaaatcaaatgctgaggatctcacattcttctgttttttaaatttatgatttcttttctttatttttctactctgttacccaggctggagtgcagtggcacaatcatggctcactgcagcctcaatctcctgggctcaagtgatcctcccactttagcctagctgggactacatgccaccacacccagctaatttctgtattttttatagagaaaggtctcactatgttgcccaggctggtctcaaatttctgggctcaagtgatcctctttgcctcaccctaccaaagtgctgggattacagacatgaaccaccacaccaggacatgattactttttaattcctaaataaaaaatacatatatttatcatgtaaaacatgttgttttgaaatatgtgtacattgtggaatggctaaattgaacaaattaatgtatatactacctcacgtacttactttttttgtgagaacacttaaaatctattttagcaattttcaagaggctattacattcttaccactcctagatgtttgttttgtacacctgggtctccacttgtgcacctgatcataatagtcagcgtatggttcatttcagtggacttaacgaattcccaaactctacatgttggattgacaagatccctggccctgtgccttcattctttttttctacatgtttccaactaaagtctcatccagtactctttctttgaataatttgtaaatgttggatgtcatctacattgctgtttccagataaggccttttcgagatttatatattcaaccaatttcttcatgtttgtacttggatatgtggtaatggtcttaaactttatgtgtttcacaaggcatgctaaatttttcccttcattccagatagtaatattcctattttcatcatgaggttttttcttcctatccaatggctgaagccatatagttttgcgtttttttttttttttttttttttgagacagagtcttgctgtgtcaccccagctggagtgcagtggtgtgatttcagcccactgcaacctccacctcctgggttcaagcgattcttgtgcctcagcctcccaagtagccgggactacgggcatgtgccaccatgcctaatttttgtatttttagtagagacacagtttcactatgttggccaggctggtcttgaactcctggcctcatgtgatctacccgctttgtcctcccaaagtgctgggactacaggtgtgagccactgtatccagcctgaaaccatataatttttggaataatctttgagtcctcacttccattaaccctctttcactcgtcccattgaacctattagtgaaccttgtcatttctttaactatatcttgattttctccacctcttatatctccattgttccattaaccacatttcacaaaatgcaattaccttctttatttttttgcttccttgtgatttcattttttcctaactaaaattaaaccttcgtgaaaattggctgagtgcagtggctcatgtctgtaatcccagcactttgggaggcggagggaggtggatcttcttgagcttgtgagaccagcctagataacacagcaaaaacccatctctaccaaaaatacaaaaaattagctgggtgtggtggcacatgcctgtggtcccagctaatcaagaggctgaggtgggaggatcacttgagcctgggagggagaggttatagttgcaagtaagctgagattgtgccactgcactccagccttggtgacagagaccctgtctcaaaaaaaaaaaaaaaaaaaaaggaaggtgtttgtatatcccaaacatgagcatagtgacttacacatagatgtcattcagcaaacatttgtagaataaattaatacagcctttgtcatttgggatcaacctgtgtggtctgatatttctctttatttctgtggtctggtatcctgccaaattttggggttccctgcaaaaagtgacctgtttatatttgactatgtgtgtattgtataaagacctatttagaaagcagccaaatctatatacattgtgaattatctagccttgtttgtacagttgcttttacttttmggtgtgtttatattattgtgttttatttgtragaaatgaaggatatttatacatggaatttcctttatgtgtaagagataaaargaatcttacacatctctcccaatgtgtaagagatgagggatatttatacatggagtttcctttatactaaaatagggttttcaaccccctttarctgtaattttccaytacctacccaaatgctataaaactgccctccccttatcacccttttctgactcctttttcggactcagtcygcctgcacccaggtgattaaaaagctttattgctcacaaaaaaataaataaataaaatagggttttcactaaagagtcacctcacaccaaggcagttttaaaaaatagtttaaatagtttatttcaaaacaagatgatggagtgattgactgttctcttctttcctagaaatcaggaaaattgatgatcctctgcagcatcacttgcaaaatcaaagtattcagaagagtgtgaaacagtgccatgaacagaatatgtttggaaatattgttaatcagaacaaaggtcatttcctgctgaagcaagattgtgataygtttgacttacatgaaaaacctttaaaatcaaatttaagttttgaaaaccagaaaaggagctctggcctaaagaactctgctgagtttaatagagatgggaaatccctttttcatgctaaccataaacaattttatactgaaatgaagtttcctgcaattgcaaaacctattaataagtcccagttcattaagcaacagagaactcacaacatagagaatgcccatgtatgcagtgaatgtgggaaagccttcctcaagttgtctcagtttattgatcatcagagagttcacactggagaaaaacctcatgtatgcagtatgtgtgggaaagctttctccagaaaatccagactaatggaccatcagagaactcatacagaactgaaacattatgaatgcactgaatgtgacaaaaccttcctcaagaaatcacagctcaatatacatcagaaaactcatatgggagggaaaccttacacatgtagccaatgtgggaaagccttcatcaagaagtgtcggctcatttatcatcaacgaactcatacaggagagaaaccccatggatgcagtgtatgtgggaaggccttctctacaaagttcagtctcactacacatcagaaaactcatacaggagaaaaaccttatatatgtagtgaatgtggaaaaggcttcattgagaagaggcgtcttaytgcacatcatcgaactcatactggtgagaaaccctttatatgcaataaatgtgggaaaggcttcaccttgaagaacagtcttatcacacatcagcaaactcatacaggagagaaattatatacatgtagtgaatgtggaaaaggcttttcaatgaagcactgtctcatggtacatcaacgaactcatactggagagaaaccttataaatgcaatgagtgtggaaagggcttcgctttgaagagcccactcatcagacatcagcgaacacatactggagagaaaccctatgtatgcaccgaatgtcgaaaaggtttcaccatgaagagtgacctcattgtacatcagcgaactcatactgcagagaagccatatatatgcaatgattgtggaaaaggcttcactgtgaagagccgccttattgtgcatcagcgaactcatactggagaaaaaccctatgtatgtggtgagtgtggaaaaggctttccagcaaagatccggctaatgggacatcaacgaactcatacaggagagaaaccttatatttgcaatgagtgtggaaaaggcttcactgagaagagtcatctcaatgtacatcggcgcactcatacaggagagaaaccctatgtatgcagtgaatgtggcaaaggcttaactgggaaaagcatgctcattgcacatcagcgaactcatactggggagaaaccttatatatgcaatgaatgtggaaagggcttcaccatgaagagtactctcagtatacatcagcaaactcatactggagagaagccatacaaatgcaatgaatgtgataaaaccttcaggaagaagacatgcctcatacaacatcagcgatttcacacaggaaagacttcctttgcatgtactgaatgtggaaaattctctttgcgcaaaaatgatcttattacacatcagagaattcacacaggagagaaaccgtacaaatgcagtgactgcgggaaagccttcactacaaaatcagggctcaatgttcatcaaagaaaacatacaggagagaggccctatggatgtagtgattgtgggaaagcttttgcgcacttgtctatccttgttaaacacaggagaattcacaggtagtcattttgggaaagcctcttgccagatgtaggcccttaagatatctgcaaagaagagtaatttcatgaatgcagactacatggttgtttatttagtgatcagttacttcatgttttgtgtcagagaaaacatgtacaaaacatttgagaaaatattttaggacattatgtctaaaaattgtatactgagaaaaatcctatgaatgtggcagactataaaagcctttggtgggaagataaaccccctcagaagtgatcatagatcatgaataaactactaattcgtggaaatgtaataattataggaacgtctttgcccaaaaataaaacytcaacagattgagagagttcacactggagaaatactttcctctggcaaacccctgtggcagggttttcagtaaaatgttttgcctcatcgtgtgctaggaaataatgcagaaaaaactwatgaaaacattcaatgtagaagacttttaggaaaayatcagagaatttaatgaaggaaagaagccttggcaaaatgatggatgagagctttctgtcacaattctaaccttaacagataatatgcctcatgtgcatttgggaacaggatagcttgagccatattcctagttgccttgtcactgattttatacattttaaattgtgacttcctctaatcacgaactaaaatttaatattgtatataataccggagtattttatgcctgcctcattttattatatgattagctcctgcatttctttggttctaagtttgtgttatttcagaataactaaagtacttcagaatgaaactggatacagtatattcarttcataagtgtaattgaccatacttgaatatgtttaagtttataagtaacatcaggtgttatgaaattaatataaataagatgtttttgtaagtttttattttgaaataagtttagattcacaaaatcttaccaaaatattccagagttcttdcccttaacccagcttcttccaaagataacaacttacataagcatrgttcrttaccaaatacaggaaagtgaaattgttacaatactgttaactacagaatttatttggaaatcaccagttttaacatgcatgcatttttgtttgttttttatatgtagctttaagaaatcttaacacatatattgattcatgtcaccaccaccgtaatcgagattcagaatgttgcatcaatgcaaactccctcatgctccttgtttatagtcacaacctctcctcagccctaacccttggcaatcagaaatcttttcatctttagttttgtcattagtagcatgttataaaaatggaatcatacagcatgtacccttttggtattggctatttcaactaaagcagattaacctgaaatccatccaagttgttctgcatatcattgttctgtttttattggccactaataatctatgatacgaatataccactatttgtttattcacccactgaaggacattagttttgttcccggtttttcttactgttacaaataaaaatcctatgaacatttgtacacacaggctttgtgtgagcacaattttttacttctctaggataattactgcagagtatgattcatgggtcataaggtaagtgtatgtttacctttgtaagatactaaccagagtggtgtttcattgctcaccaacaatatatagaaaggttcagttgctccacattcttccacttgatgctgtcagtattttttttgttttgtattgttttgttttgagatgtagtcttgctctgttgaccaggctagagtgcagtggcacgatcttggcttgctgcaccctctgcctccggggttcaagtgattctcctgcttcagcctcctgagtagctgggattacaggtgcctgccactgcgcctggctaatttttgtatttttagtagtgacggggtttcatcatcttggccaggctggtctcgaactcctgaccttgtgatccacccgcctcagcctcctgaagtgctgggattacaggcgtgagccaccacgcaggactggaatgttttattttacctattctattgtgtgtgtattggtatgaatacaaacataccaattgtatgtggccttccatttgcacctccctaaaggctttttttttttttttttaagagacaaggtctcactatgttgctcaggctggagtgcagtggctattcacaggcaccattatagcacactacagtctcaaactcctggtcttgagaagttttctgtcccagcctccagagtagctgggactgcaggcatttgccactgtgcgctgcttagagcattgtttattaatgctggataaagattttatccagctggataaaggttttatatcacttgcaaatatttttccatagatgtggttctttctttttttttctcagagaaaaagattttaattatgatgaagtccaacttttttttttgagatggaatcttgctgtcttgcccaggctggagtgcaatggcatgatctcggctcactgcaacctctgcctcccaggttcaagtgattcttctgcctcagcctcccgagtagctgggattacaggcacctgccatcatgtcccactaatttttgtacttttgtagagattggggtttcaccgtgttggccaaactgggctcaaactcctgacctcaggtgatctgtccaccatggcctcccaaagtgctgggattacaggtgtgagccattgcacccagcctttttttttttaatggattgtggggttttggcattacatctaagtattccttccttactgtaattgataattctttttccacttcctttgacaaaataatgtagttttgcttctttttttttttttttttttttttttttttgagacagagtctcactctctcacccaggctggagttcaatggcatgatcttggctcactgcaacctccgcctcctgggtttaggtgattctcctgcctcagcctcccaagtagctaggattacaggcacgcaccggcatgctcagctaatttttgtatttttagtagagacggggtttcaccatgttggccaagatggtcttgatctcctgacctcgtgatctggccacctcagcctcccaaagtgctgggattgcaggcgtgagacaccacgcccagccagttttgctttttaatatttagcaatatccatttaaattcatctttgtatatagggtaagggttaatttaaagttcagcctatggttgcccagttgattcaacagtattgaaaacactgtcctctttccattaaattgattttgaacatttgtaaaaatcagttgcctgttcttgtgtccatttcttgactctattctgttgatgtgcgtgtctatcactccactaataatctacggtcactcccatcagaaatgacataatatgctctatgaggtaaaacagctatgttacctcatataaaatgttcaaagccagaacctggactttgggaaatgtcccatatccctctccggaagcccgcctcccagtctctcggtgttcttagagatggcgaaggatggggttgcagcaccagaattccagaatcggaagtaggttctgatacgtgttcagcctttggcagctgctactgtagccttgaaagcctgatgctgcgtgtgaatccggatggggagcttgtggggacgaccatgaagtggaaacgcatgtgaatgtccgtgttcaggggttttatttcagtttagtcaccgaggaatatgggtgtgagaaagagacccttgggatgtcaaaggttaaggcttagttttaagagtttaatgactgagggtcccacggacagagcttgaggtctatatgttcacttttcatgagtctcagtaatagaaaactggggaaagtgtgtctcagtgaatgctgttttttgctcagatttgcaatttaatatggggctcagatacagagaagcccgagctaggaagaggagtggcgtgaatgaaaggtctagggggaggagtgtcaaaggagtgcctctgtggtaagttttaaattgaatttgaaggcaattttatttagaggaagacggggcttgtctgtgtttgagaatgtaatgaggctggaggctttcaggtgtgcagttgaaggttagtggttgctttgagactaactggatgctggaaacacttcctgtcagtctttcaagtccaaatctgtcctgaaggtttctatttaaaaactttttcttcctaggtccactattctcattgtacccataaaaatcagagtaattcagggtgacgaagtggtgtctttaccgaggagtcttgctctgtcgcccaggctggggtgcagtggcgcgatctcggcttactgcaacctccgcctcccggattcaagcgattctcctgcctcaggctcccgagtagctgggattacaggcgcgcgccaccgcgtccgggtaatttttgtatttttagtagagactggtttcgctttgttggccaggctggtctggaactcctgacctcagatgatccgcctgcctcggcctcccaaagtgctgggattacaggtgtgagccaccgtgccccacttcactttcttaaatgttgtgtttagaagcacaaacttaaaaaaaaatcaagtccactttattaattttattttgttttgtgggtcatcctttactctcctctcagaattaactcacgtccatgaggattatctcccttttccttctctaagttttatactttctcttaaacttagatctatgatctattttgagttaacttttgtgtatggtttgagggtcctaactcatttttctggatgtggatatccaattatcccagtgccgcttgttgaaaagactattcttattgaattgtcttggcacttttgtcaaaaactcttaacaatatttttatactctcaattctggctctgctcttcccattggcacctttactaaaagtggcctttctaggaggcccaattcctttagtctgtcgtggccaggctcacatcgtaattcattctcaaaatctcttttctctcctctcctctcctcttttctcttcttttctcctcttttctcttccttctcctcctcctcttcctccttcttcttcttcttttttgtaaataataatcattttttcgaggccaggcgcggtggctcacacctgtaatcccagcactttgggaggccgagacaggcagatcacgaggtcaggaggtcgagatcatcttggccaacatggtgaaagccagtctctactaaaaatacaaaaattagctgggcgtggtggcgcgtgcctgtagtcccagctacttgggaggctaaggcaggagaatcgcttgaaccagggaggcagaggttgcagtgagcccagatctcgccactgcactccagcctggcgacagagcaagactccgtctcaaaaaaaattataatttttttctttcttcaccacccgcccccccgaatacctgctatttttctgttcttaaaaaccgcttcctgcaagctaattttcgccagacgctttcccgtgggtgtctgcctacctgatgtgttgccttttccctttctacctgatctgttaccttttccatttccaattcattctctgggatacctacacctggctgcactgttacttgtctttttcaaaacctttttttttaaatttaacaaagtggatggaaaagcgctaaaggcaatttagcttgccccatatttgcctgataaagcctgagtctctgaaaatctgccccctttcgcaagactttaagtgccaggaaacgaggcgatttcagtgacttctcttcttccctggctcctggctcaaaaacctgccactgccttctgtgcgtccaattttcaaacatggctgccgtcaggagccacggctatgggcgcggccattttacagagtaggaaatgccgtaaatgcgcttgtccttgctcttttaaacattttaggttctcctcggccgccgtaggtggaccataaacccgtgcgaggactccagaagtaggagcagtttacggaagtgtaacgttgaggcccttcttgtgtatctggagaaaatagaggtcagtgtgtggttttgtccctgaaagttttttgtcctagttcaggttttgtctcagtggaaggtttgggagatctgaggacgtggtgtaccctggaccacatagtttttggcaggaagactggggagcgccggggtataggcatttgggaggtacctggtgggagtctgtgatccccctgtctgtggtccgcgtgcctttggtgtgagtacagtgactaagggtctgtagtgatcaacggccgtgtcctaactgtcaaggtatggatcactctgcttgtaaaggatggaggtggcgattaggatcgatgcggcgtctgcttcgggttcaggatttaatttggaactcagtgatgttggagtctgggaggatgtccatcgctgtagagtgtctggtccgtggttcggatgagtaagaggcatggggccagtgtctgtggtacaaaggcttgtgagggctgaagctttcgagactttggagccctgggtcctgggttgaggttcgaacctcggttactggggcaaaaggcgacacagcccccagcattagttcgaaaccatatatctactcttctgatccttggggtggctatttacagatcggggggtcaagttcagtcataccctccgattatatattgtctatggctgcaaaggcagcggttgagttgttgtgacagagacctcgtggccggcaaaatcgaaaatgttgccaacctctgcattcacttcttttattttttatttattttttttattttttgagacggagtttcacttttgtctcccagactggagtgcaatggcgcgatctcggctcactgcaatctccgcctcccgggttcaagcgattctcctgcctcagcctcctgagtagctgggactacaggcccacgccaccacgcccggctagtttttgtatttttagtagagacagggttttaccacgttgggcaggttggtctcgaactcctgacctcaggtgatccgcccaccttggctttccaaagtgctgggattacaggcgtgagccaccgcgcccggccttcacttcttaatatatagtgagtgttgcttgcccgccttatattcacactttcttaacagaatctccatttcgtgaagtattcatccctgtggcaaggcgacccaaatcccagtttcttagtaaggccttgttggtcttagccaatcttgctggttccaattgccattgctagtgataggtttgacatggaaatgagcttaggcgtatggtgcaattctagccaactatgtatgtgaaaatctgcctgggagtttctgagggagcattttcttttttaaatatgtaatttcttgaatctctttttccatgttcgtgatgatatcgcctgaaaataacattaattttctgtcttactttgtaatgcttataattcattcttatcttaatgcattggctcaactttccagtataaagtaggaaaatagggtgttagtggacgttcttgttttattacccacctgtaaaattcacccgttgtgttgtctggagttaacacctttcctggaggtaaactgtttggtatggttgatctcttcctttactttgttaatttttctacatttatatattttaaatgtacaatttaattatcatggaggcaatatatgtataagcagtcattgcccaggtcaagaaatagaatatggtcagcacaccagtggtgttctgtgagtctttttccattctcacaccgaaaagtattttaggcttttctttatataattaatcattatttatcattgtagttaatacagttttgcctattttaaactctgtatatcagtggaattgtacatcactctttttttgtgtcagccttcttttgctcattattggtgagggtctttcctgttgcatctgagtatattttctttgctcaat

SEQ ID NO: 8876 - DNA, 15156 bp, Homo sapiens
ctggttatttcagcttattagctcatgctgctgtgtgagcaaggttgaggatttgttccttgaagcagtcagaggatctccaagaaaaaaaagcatattatgtgcttacaaaaaaaaaaaaaaaaaaagccgttttacccccaactagctttttcatgaatacacatcctttgtcacagggaaagggttgagcaggaaaaaaagtgaatagcttaacacaaatctatcctcactatggaaaaaaaaaatgtcttcccatgtggatctcacccagggaggagggcatggttggctttgagatcaagtagaaaactggaaatgggtttttccccatggggaaggtttcctcccctttgcccaggtctgctggggtcgggctacccacagttggtgaggagtaagttcaggagttccccatcaattcagtcccccagccacacaggggtcagaggtgctgctgagtctctgccttctgacagaccccacaacagcacaacaggacaacagagcacaaagccacagggacaagggaagaggcaaaacagagaacgccttacagccctaatgttgaatctaaaacaaagaacagcgtcactgcagcgtgagaaaagtggcaacgggctgtggcaccggcccttggttagggcatcacaaagtttaacgtgcacgggaatcacctgggagtcactaaatctgcagattttgattcagcaggtctgggacgagcctgagggtctgcatttcttttttgtgattattattttgtatttatgagacggagtctcactgtccccgaggctggagtgcagtggcacgatcttggctcactgcagcctccatctcccaggattaagtgattctcctgcctcagcctctcgagtagctgggattacaggctcacgccaccatgcccagctaatttttgtatttttagtagagacagggtttcaccatgttggacaggctagtctcgaactcctgacctcaggtgatctgcccgcctcggcctcccaaagtgctgggattacaggcgtgagccaccgtgcccggccaagggtctgcatttctaaccagctcccaggtgatgctgatacagccagtccatggcccacactatgtacaaggagccaggttctgaaccatacgtactgtgtctctctcacgtgtgctggacatggcaagtatgtattcctcatgacatttaatgtgctcatgttcttcagtggtttaccttttgctaataaatctcagtggtttcctgatcattccataatcatgatggcattcactttattgagtgggagatgaagtgatgcaggaatgagccaatcctaatacattttagaagtgtattaatcctaaataaagcctaaaatcatctattttcttcagtaattgtttccatggtgggaggttagggggagcttttgaggtgatttaaagtcattttcaaagcagatgaagacggcaacctgagctttctgtcaggacatgtgtgtagactggagacctatcacatccaacgggaccctcaggccaatccttttaagcagggggctccacccagccccttagcttccctactcccctaagccccttggttgtagacagtagcttcgggtgccaggtgggaggccatgccaaacaactatagccaaagagcatgtctctgatgccatttctttggtggcctaggacagaatctgagctatttccactagaggaataggagcttcagcagggggccttggaaatgtatccaaggtacccacctcctgtccttctttctggaagcatctggccctgggaagtagcatcccgaccactaatatcagggcactaatatcaggcaaagggaggaaaagttgcatcctgaccactaatatcagaaaggcccctcctcccagcccgtgaagaggggcctctctgggtgtgtacctggaaccctatcttggaagttaagttttgtggtcactgctaccaacacaccaactcccaggacacaggatactagggacttctgtgccccatcagtggacaagtcacaagttcccaaagcagggtgaccaatcgatctggatcaggtggcagggcctcggatcttaactgtccatttcattgttatgcacacaaacttatcttagagatccggccatctgcctgttcccgtcctggggatacctgcgggaaggcaggctgtgcctcccagaggtcatctgggctgcaaatgggtgccaagaccttcctctgcccctactcaggactccagactcctccacatcccctggagatactcaaagcccatgcccacagtaacccgtagggaaactgacccgctctgcctgggagctgctcccaggagcctcagcagtggcaaccaggagcttagagaccgctgtgcctctccctgcccaccctctccctctcatcctgccccatttctctgttgtctttcctctttcctctcttcattgttcacagcactatttaatctccttcccctctttcttcccttattcttgttctgactctattcccaggtccagagaggcccagaatcttctctgctcctgctccacctcctgacccactgccccctgggagcccctggtcatcccagaagcctgtaagtgcacacagcagccaagacccacatgcctgcaatgggggtggcacaggggaggcagggtgaagagcaggacagacttgcaggtgtttttttctgggctgcctggcttcatcaactgcaacactccagcactttgaatttttagcaattaatgccccaagtccccctccccctgagtccctgcagagcagagggaggggcacctgcaaagagaagtctctcccaggaatgggtcacaccaatcagcatgtatgtggtgtctttcatgtagcaaatcagagtctttcatattcaatagctgggcctctagagggaccaagctttgctaagcaaataagcttgtggggttggttcacatccatccagaaaagcaagaatgaaaaataaacttgggaaagtcagctccacaggtgaagctcaaccttctgtgcatctgcttggcatggagctacatttgcaactgaatggctcatttatttaactattgcacacattatgggctcttaaaacatcaaaagaatgggttttattcccaacaattagctcttgaaataaaagaataaacatactttttttttaacttccccagactctgttgaccaaagtcgctttcacaccagtggagtggaagctccaaaatggtatcatctggtgggaatttaaagacttcttgtccccaaaaaaccttttcgtcactaggcttaaaattttccattgggaggccctggctttgttttgacacatgatccgttattaacacaccactcattttgggaggggaatatcatcaagtcccagccaggatgtaaaccccacgactaggaagcctcgtccgctgggtaccttggtaggtcccagggccgagcacagtgcctggcacgtgagaaataggtgttgagaaaagttatttcactcttccttttctaactggaaaccaactccaagcacagatttgaggggggacgagcagggaggcacagtagataaagcctgtgagttactgcgcccagcgagaaaggggtcggtggagtcaaagagagaaggcactgcgtggggagatggaggcaggttgaaggcaacacttggagtccctatagtcctacaattgcagtgcaattgcccagaagatatcatgctaagaaaaggagggagcctcagccctcggcctccgaggagacctctggggacatctagggcagcttcccatccaggacagatatctgaaagatcatgaggctgggcttgaatcctgctgacaacaagaaacttactacctatgtcccctaccgctgctatggtccgcctcctctgtcagctcatggtatttgagcacctactaaatcagcaaattaatagcttctgcctgggggctgcttccacactccactaatagccaatcgctgggcatctcagagccgagagaggaaggaaaattggaaaatgagtctagaataaggggcctttccaaaatgtgtgcttatggcccagacactcctttaaccctaggttttccagaaagtctgttttgccccaggactgtggacagcattatgttttgtttggtgagctttcttttttttttttttttaggttgtattttataactgaatatggcatgtgtgaaaatatcagctaccagactctgttagtccaggcgtatgaatattccagatcacaagggaggtgtgactcccctgtgaattgcaatgcggaaggtttataaagttaatcatttagaaatctgtctttaaaatttaaatatttagattgggtcgctaggacacaaaaggcaattcctgtttctcactcacttaatttgatttttttttcttttggtcgcacaagttgtttttcaaagcctcattcctcgaatgttccctataggaggaatgtaattaaactccactggcctccccctgctgggaccaaacaggggccagagctgtagggagcataaaacagatatcctgcaaaagaatccttattataaagatgagaagagaatcaacttccctctggttatgaacaagaagctttagaaagccacccaggctatttttgcaatgggcttagtctccaagacattttaattagtaatttaagactggaaggaaggggataaactcctcacctccctggctataggcaagaacttcaactggatgagtaactggttcaagtggctgaaaaggagggaggtccagagggagggtggttccttaaaatgaaccaactttttcatgaaaatggcatagctagatatcccggcccccagtcagtcactgtttttgcagtcccacttcttaaggcagttctcacccctcaccagaggcaggcactgcctctctctgggacactcggctggcaccagagcaaagaagcttgtgctgagggatggttcccctcacaccgggccaacctggacttctctctgaccaaagagcatatgcctcccaccaagcgagaaggtggaaagatcctggcagggaaccccgagacctgggtgctagcatcatccccgccatgagagcacacggggcccctgagctgacacctgctggcaatgtgacgtggatcactcacataatcccttccttagtttttctgtctgtaaaatggggatagtaacattgtgtagctcataaggttgtcaccaagattaaacgagttaagaatacacgtgcaatgtttgaacagcgccagcattacgtacatatagctactctcattcgcctttctgtgactcagtttccttatctgtaaaagaaaaaggttggactagacctcttctccactgttattgatgatgatgatgataaatgaatgtttctgtgccagatcctaaactaaacaaaagttaacttgatactcacaatggctgtatgaagtgggagttatcaccatccccatttcatcagtggggaaagaaaggctggattagtcagggatctccagaggaaccgaactaataggacagagacagaaagacattcattttcaggaattggctcatgtaatttatggagtttggcaagtgtgaagtctgcagggcaggctggcagtttggacaaccaggcaggagtcaatgcaacagtctagacacagaattctttcttcgccagaaaacctcagtttttgctcttacggccttcaaccgattggatgaggcacgcccatattattgaggataatctcctcaaagtcagctgattttaagtgttaaccatatctaccgaagaccttcccagcaaccctgggattcatgtttgattaaataactgcacactatagcctagcaaagttgacacaaaagactaaccaagctaaataacttgagaacataagataataccctaggacagggcctaggtcggattggcactcacgtttcccgactccttagtctgtattcttttcaaccttgtctctaatattccatgattccatggttctgatgccattcctcagcgctctgctgttcttgcctgaccaagtggatcaatggtggctctggcatttctataaaggggatttcagggctgcctgctggggagggaggcttgaagctgtgtctgcactgcatcttcacagcactgagaaaatgccagtcattcaggaggacagggcagccctgtcctcgccacagtgcccgcatcttcattggttcacctttgcaggtatcatctgtgacctgtcatccaggctctgagccctgaggataataagtytccctcgaaggtcctgggtttgttggagctttttctccctcttgccatgtccttttcacggtccatcctctgagtttgtgaattatctttcttcgtggcccatgtggcacaagatgaagagtgcatgggcagcttctcccctgacatccctacctccctgacgcttaacccacatagggaagaacattcctgaaacagagacgtcacccagggttgctttctgccacagcaggcactctgcttcgtgcctttctcacttccatttgtaaatgatcttgtctccttccttgtagaaagcttttcagccattccaggctttctctttgggttccatccctctgggattttccacgaattgcatttccttgtagttcattttcatcattttccttgttagggaaatgcacctgagacattggcatgcagcctgattgcccccggcctcccctctgctcattgccagagctacctctgcacagaggagtcactctcctcccactccagggcctctgtcaggggccaggcttgatgctgtcaccagccagctcttcactgctgcccagtgccatattcatatccattgagacaagtccctgggaaatggttgggagccgggggacagccctgcatcctgagatcctaagatcagggaggttctccctgcactcccagctggaaggagactggatcggccaccctcaccaaattcccagattctctgactgaagcaagccagtccttggtttgaatggggaatcaactcagggttataaaatagacgccagccttcttgtaggtagaatctgacttcagacagcaaaagactctaaaacagcttaaattcctgtatatgccttctcctgtgcatgccaccggtcagaccaaaggccacacgccaatcaaggcccaagatcagccaggggtgtttccatgtcctcaagaacttttacaaactgtagctgattgggttccgcccctggagattcgatttagtgggtctggagtgaggcctgggcttcttagaagccccagcggattctaaaatgcagccaggaggaagaacsttgccagaatcccatgaggcacagatgcaaatgtgcatagtgacattgggttgcattatcaatggcaggactgactttataaacctccacatccttactggagctgctgtttgctttttagaaaagtccctcatcagattatcaggaagtcgtgggttttccgtgatcatgctgtggtcagatccagcccaaccagagagccaaaaacaaaacaarcatacaaaacaaacaaacaaacaaacaaaacccaaatccctggcaagccccacgaaatgactgctctgataacattcagcagacaagcctgtttgaaatcatctcagaatcataccagacccaaacccaagaggtcatctggtctatgcatcgactctaggagggtgtattagtccgttttcacgctgctgataaagacacacccgagactgggcaatttacaaaagaaagaggtttcatggacttacagttccacatggctggggaggcctgacaatcatggtggaaggcaaagaggagcaagtcacatcttacgtggatggcggcaggcaaagagacagcttttgcagggaaacttccttttttaaaaccatcagatctcgtgagacttactcactatcacgagaacagcacgggaaagactcgcccccatgattcaattaccgcccaccagtttcctcccacaacacaagggaattgtgggagttaaaattcaagacgaggtttgggtgaggacacagccaaaccatatcagagggtgaggggctatttctccatgttacagacaaggcacgtgaagcctagggacgttccatcacaggcccacaccttgtctcagaattaagaggaaatgcttctggctgccaggggtggggtggggtaggatgcagagcctctccctccaccaccayctccatccttttccctttctctgaaaatctcatttgatgattccccagcctggctgcaaattaaagatttgtagacctgaaagatgctaccgatggttatcagcaccaccaccaccatcgtaacagtaaacatttatggagcgccataattattcataataatttttatgtgttaaacaaatctgacctagctctataaagaaataggccctgttaaccaaaaatattggataaattaaaagtctcctagaagcatctgatgaaaggatctcaagttccataacacacggaccattcagtggtgttgtttctgggcttgattcactgtgggtcacttgaacgatgtcgggggtattgtccacctcccagtgctcagtctgtggcttgtggccagctgttcctctgtggggtctatgttggctgtgttaaggcctgctgcagaaacatctcatttctagcatgtttttctcaagcagtgatcctgtggggtcaagtcttcaatatcaaataatattgataataattatgatagaaataataagaggccaggcaccgtggctcacatttgtaatcccagcactttgggaggcagagttcaggtggatcatttgggcccaggagttcgagatcagcctggtcaacatggtgaaacccagtctctactaaaaatacaacaattagccgggcatggtggtgcacacctgtaattccagctactcgggaggctgaggcaggagaattgcttgaaaccagaaggcagaggttgcagttcgctgagattgcaccactgcactccagcctgggtgacagagtgagactctgtctcaaaaaaaaaaagaaagaaaaaagaaataaagaagaataataagaattatcagtcattgaacacgcgctctgttcttggtgctcttggtgttattccaggcaattctaacaccaattagatattttcccctattttaaagattaaagcaactggcgcagtggttcacacctgcaatcccagcactttgggaggccaaggtgggaggatcacttgaggcagggagttcaataccagcttgggcaatatagtgaaacccctgcctctacaaaaaaaaaaaaaaaaaaaaaatcaaaaattagctgaggctggtggtgcgtgctcgtactcccagctactcaggaggctgaggtgggaggattgcctgaggccaggagttggaggctgcagagagctatgatggtgccactgcactctagcatgggcgacaaaacaatagtcttgtctcaaaaaaactaaaaaagactaaagtgaaattgaaattcagagagtaagtgacttcaaggtagaggcagaaacagaggctggatttgaattcgatcctctggctccagagctcctgggagttatcttgggaatgactgcaaggtctgaggtagatcgttccaggagcaggtgcttatatacagtggaatggcacccactggcacaccgctaggaattctgttttcttaccaccaccggagccaggtctctgtcacggtgatgagaagttcccaaagtcatttctcctctctagggtgtcccctctctgtctgctgccactaaatccctaacgacattagagcgaataaatggcatttttaacttcagctttaagcaacaaagaaatactattaagtcaagatgtgtccatctttaccataaaaaaaaacaaaaaacttgcttcaataaccaataaacagatcaaacaacagaaaaataaatagcaaaagacttcagggctcgatggctcacacctgtaatcccagcactttgggaggcggaggtgggtggatcacctgaggtcaggagtttgagaccagcctgaccaatacggtgaaacccgcctctactaaaaatacaaaaattagccaggcttggtggcgtgagcctgtagtcccagctactcaggaggctgagataggagaattgcttgaacccaggaagcagaggttgcagtgagccaagattatgccactgcactccccattctgggcaacagagcaagattccatctcaaaataataataataataataataataataataataaataaatagcaaaagaaagaaaaaaccctcagctaagaagtatactgttgtgttttttggggttttttttatgtaacatttgacaagtttacattttccttgtctgccttgggtgccttaaaataaaactctgtcaatatttccatgtaacattgggttttgcttttttttttcctcacgtaaaatccacatatcaggaattcctctatttattccgtcgcctgggtttctttccttgggaataatttatatgtcaaacctgtcatttatcgatttattgctgtacctagcagcatttttctccctgccctcaaaatttagcttaaagaccacttaataaggcctgtgcgggtcctcagactccagagatttctgctgatatgagccataatttagcaaaacaaatcctgctcattgcgggcatctaaatggtatcctgttaaatttccatacatgcttttcttttctaaagttatggcctacaactagaagaagggatgaaacatcacccctacctccacatcttatttcctgtatcaaatttcgaagcccttggagatgcaaggcgggtttccctaatgagttgagaatcaatgcgaatcatctgaaatgagaggtggcccgtgggtgtaatccatccctgctggtgctccaacttggttacacatttccagaaaccagcacctccctgttgtccatgtctggtcatcagaggcctctctcctcaggtgggataaccagagaccaagaaagaaacatgtttctctcccttggaatttctcttccttagtcattttcagaaagttaggagtcggcaaccttaaggaggagtttcctatcatctctcctccacttcctcccctcatttcctccccgtcttctccttggagtccttcatcaatgtctctattttctgttcaggataaacaaagagtccctcttacctgcacaggcctcacctgccttccccccctgtcatttctgcagccagcctgtctcctgagcctggcctggcattctccaaagactccttaaggccacttggcttccggtctgcctctaggcttcactgtctgcaccagagtggaaattgtcatgtgccctcagcaacattttacccctcccttccagaacagacacaggcatttcttccacaagcagtattccacagatgaaaaaaaaaaattataaaagcgaaaccaaaaatactggtagtatatttttttcccttcaaaagaatgataatcatcagtaaaaaccacaacaacaaaaaactaagcaaagcagcctgaagataggctgaaagcacacatctacggatggcttgttgttgttttgtttttgttattgttatttttgagacacagtcttgctctgtcacccaggctggagtgcagtggcgcgatctcggctcactgcaacccccacctcccgggttcaagtgattctcctgcctcagcctcctgagtagctgggattacaggcttgtaccacccatgccccatgcccggctaatttttgtatttttagtacagactgggtttcaccatgttggccaggctggtcttgaactcctgacctcaggtgatccgcctgcgtcggcctcccagagtgctgggattacaggcatgagccaccatgcccggccaggatgttctgaatattaaactagctgaccggtggacattagctgtgctgtggaaaagtgaagcagaatggctttttatcccttgtgtatgatcatcaagacacaggacagcacagagattcaaaatacaatgcattccccttgctcgtctggtcaggctcaccttcctattgcacagggttgattggttggaggccgccaacctctagctgaaaggcagagacagtctcccctgttatttcggtaccaagctgtgtttcttaggcattaaaatggagggaaagcaaccactggcccctcactgggattgttcttgaggattccagacagaccataagtaattcattgagtcgctcacaaagggcctggccctgaaggtttgtggctgcagcatccaggcgagccaaaggtgtcagtgccaccaaaatgcagagaaaactcttatcagaaagatgtcatttttttcccctaaatgtcatatatacaatttttattggagtgtgatgacagatagtgaataaattaacataaatttgcataatacaatacagctgttaatttatgatcatattaaaacacaaagttttgtcgtttgaagcagttaaaagtcttaatcttctgaaaatttccctcttgtttgttatttgtttatgagttacttagggttattagataaaatacaggcttctggttaaatttgaatctcagataaactgtaaataattttttagtgtatctcatgcaatatttgggacatacttatactaaaaagttaatcttattgtatatctgaaattcacatttaactgaatggttatattaatatttttatttgataaatcaggcaactctgtatttcataagcagtttaacctctctctactggctcttctctggcagggcagaggggtgctgttttatggagaaaggcacttactgctgggaccttgatatctttagactgtgggggaggctggctctcctaggaacactaacagagtcaaagagatcagacaagagaggtgccagtgcaaagggggaaactgaggcaggcagcatgcctgggctttcttgacagtaccaggggtattatagccctgttttccagattttttggactacaatctcatcataagaaatataatttataattcaacccagaacacacatcccttataaatggaacaaaaagttttaggaaacatgtcaccttctatgtacaatctgctcgacatcctgttctagttgatttcatttctttaaatgccactcttaaccccctaaattgaattcatggattgaattcatggtcccctaaaggatcacagcccacatgttgaaaaacactgggttagagggtcacagttcaggaaaatgaacgaggaggttttttaaaatctactttacaaacgaggaaatgtatcgggttccttaagagcctttccaggaaaatttttgctcatttgtggccaaactcgaaataaaacttaggtcccccaactcccaaccctgcgttttctggtttccttccaccactctttctagtatccattttcctggtctccaagttgtaatacacattctgggatccacatttacttgttttattttacataattatattacttgtatactatttccttatacttcatattcttctcaaatttccatgttttatatcatttctgatgcaaactgattacatcattgcttatggcacattcttgactgatatcaacattttaaaccaaattgtcttggtacgcaccctctgatctttggcatcttactgccctgccccatcttcaacctcggctcactattttggtgcctcaggaggtctcaaccatgaaccttccatgtgctctcactgggattggtgccatctgtgacataagaaaaacatagaaacataaaaacataagaaaaactattatttgttgtgatttgttctccctaatctatgaagtcggtagggtatctgttataaagattcccttctagagtcgagaaaacagaggctcagagaggttaagtgtttttctcagggtcacacagcaaatacagaactccagtcttcttgctgtgtctcttaccctctgtcatcaggatgcaggggctgctgagctgagatgcctgcagatgagtaaactggcgggaagaaagacaccaacccaatagatctccatgtattttatatattttctcacctactcagtctagattttcaaacaacatacagaactttctgggatcttgtcatcattcagtgtactgtcctctggatcctctccaggagccgcccactccgcacacatttttttttctagttgtcataaacaaatttcaaagaaagccattttcccagagccctttcttgtgactctaccacagttcatcctggtttgcagaatccaaactcagggcttccttccaatatttttattagttcagtagtcgatcagtttgcacagagaagtggattggagctccccttcccttggagctgccagtggagaaagtctcctccaaccctcaggctcagcaccactcagggccagtgagatgcacaaacagcatcttgcaggtaccacaatgccttcatcacttgtatcttccccgaccctgtgatgaagtaggatgaagatggctgagggtatggacgttgggcccacctccctggcttaaagctgctggaccccttacccggccatgtggccctggggcatgacacagttccccctaagcctcgcttcttcactgtttaaaggggataataatagcatctgctctgttagactgagggctggttaagtggaataacatacttagcacatagcctggtacccacttattttttttattttgctactttgtttcaaatcttcaaatcttcctattattccttttttacagagccatgtcagaaaccttagattcacgtcccttccatgtgtcccttccacatgtccctccttgacctgccacaatgcctctgctccacccagagcctcagcacctgcgttctgccccctcagtaaccagggtccctcacctgccactcctgggttgctctctccttttgaactagaaatttttc

SEQ ID NO: 8877 - DNA, 14378 bp, Homo sapiens
  misc_feature (1)...(14378): n = A,T,C or G, or insertion/deletion polymorphism (see Tables 1-2)
cctctctgggactcttcaacctggtactccatacctcttgtgccctctcactttaggcagcttgcactattcttgaatgaatgaagaattatttcctcatttggaagtaggagggactgaagaaattctccccaggcactgtgggactgagagtcctattcccctagtaataggtcatattcccctagtaatatgagttctcaaagcctacattcaggatctccctctaggatgtgatagatctggtccctctccttgaactacccctccacacgctctagtcccttcaacctaccggtctattaagtggtggcttttctctccttggagtgccccaattttatattctcaggggccaaggctaggtctgcaaccctctgtctctgacagattgggagccacaggtgcctaattgggaaccagggcatgggaaaggagtgggtcaaaattcttctctttctcctccacctctcaaacttcttcactatagtgaccttcctaggctctcaggggctccttcagtccccatcctatgagaaactagtgggttgctgcctgatgacaaggggttgtttcagcccctcagtcatgctgccttctgctgctccctcccagcaggattcaccctctcattcccgggctcctgggccctgttcttaggatcagtggcagggagaaacgggtatctcttttctctcttctaattttcagtataaccaaaaattatcccagcatgagcacgggcacgtgcccttcaccccattccacccttgttccagcaagactgggatgggtacaactgaactggggtcttcctttactacccccttctacactcagctcccagacacagggtaggaggggggactgctggctactgcagagacccttggctatttgagtaacctaggattagtgagaaggggcagaaggagatacaactccactgcaagtggaggtttctttctacaagagttttctgcccaaggccacagccatcccactctctgcttccttgagattcaaaccaaaggctgtttttctatgtttaaagaaaaaaaaaagtaaaaaccaaacacaacacctcacaagttgtaactcttggtccttctctctctccttttctcttcccttccttccccttccatctttctttccacatgtcctttccttattggctcttttacctcctacttttctcactccctatcagggatattttggggggggatggtaaagggtgggctaaggaacagaccctgggattagggccttaagggctctgagaggagtctaccttgccttcttatgggaagggagaccctaaaaaactttctcctctttgtcctcctttttctcccccactctgaggtttccccaagagaaccagattggcagggagaagcattgtggggcaattgttcctccttgacaatgtagcaataaatagatgctgccaagggcagaaaatggggaggttagctcagagcagagtagtctctagagaaaggaagaatcctcaacggcaccctggggtgctagctcctttttagaatgtcagcagagctgagattaatatctgggcttttcctgaactattctggttattgagcccttcctgttagacctaccgcctcccacctcttctgtgtctgctgtgtatttggtgacacttcataaggactagtcccttctggggtatcagagccttagggtgcccccatccccttccccagtcaactgtggcacctgtaacctcccggaacatgaaggactatgctctgaggctatactctgtgcccatgagagcagagactggaagggcaagaccaggtgctaaggaggggagagggggcatcctgtctctctccagaccatcactgcactttaaccagggtcttaggtacaaaatcctacttttcagagccttccagctctggaacctcaaacatcctcatgctctctcccagctccttttgcataaaaaaaaaagtaaagaaaaagaaaaaaaaatacacacacactgaaacccacatggagaaaagaggtgtttccttttatattgctattcaaaatcaataccaccaacaaaatatttctaagtagacacttttccagacctttgtttttttgtgtcagtgtccaagctgcagataggattttgtaatacttctggcagcttctttccttgtgtacataatatatatatatacatatatatatatatttttaatcagaagttatgaagaacaaaaagaaaaaataaacacagaagcaagtgcaataccacctctcttctccctctctcctagggtttcctttgtagcctatgtttggtgtctcttttgacctttaccccttcacctcctcctctcttcttctgattcccctcccccccttttttaaagagtttttctcctttctcaaggggagttaaactagcttttgagacttattgcaaagcattttgtatatgtaatatattgtaagtaaatatttgtgtaacggagatatactactgtaagttttgtactgtactggctgaaagtctgttataaataaacatgagtaatttaacacctctggttgtttttgcagacttcctttgccttgcttttctactaagagggaggggtcctccttgcagtatgttataccaactactgaacagtttaggaggtaaacaaaaacgaagaattttcagcctagactgggaaatggaggagattttcctaccaggaaggagtgccttcaggataggagagaaagtctgacttgcctgtctacccaaagtagaaattaatcaaacatttgttgagtacctactgtgcacaaaacacattctatgcccagggtgaaataatgcgaatgatgacaatcatagggtctaccactgcttgagcatctcataaatgctaagtactcattgaattgtagaaacacctacaaaaggatgatcacaattattggtaaaaaaataaaagcccaagagagaataaataccttatccaaggctcatcagccagtaagtgacagaaccagaatttgaacccaggggtgtgtgatccaaagcatgtgctcatcgctttatgccagggaatgcagccagtgaaacccctaagctagaaaaatccaaagtaggaacataaatttgtttctgtcttaaatagtaactattttctgttctcttcactctgaacttttttatgttctcttccatctacctcattgctattccatatagtaatgtctgccttctgttttccacaagattacagtgaagtgaaaattagagacactcctatctagagtctattattttccatgtcccactgaaactggcaaattcaaagtcaaaacagacaggaaagctggaagtggtggaggacacctgtcctcccagctacttgggaggatcacttgagcctaggagtttgagaacagcctcagcaacacagggcaacaccatctctacaagaaattttaaaattagctaggcatggtggtgcatgcctgtagtcccagctactcggaaagctgagacggcaggatcacttgagcccaggaggtcaagcctgcactgaactgtgatcatgccactgcagcctccagacccatcttaaaaaagaaaaaaaagcgctgggcacagtggctcatgcctgtaatcctggcactctgggaggctgaggcaggcggatcacgaggtcaggagatcaagaccatgtggccaacatggtgaaactccgtctctactaaaatacaaaaaattagccgggcatggtggtacgtgcctgtagtgccagctacttgggaggctgaggcagaagaatcgcttgaacccaggaggcggaggttgcagtgagccaagatcgcaccactgcactccagcctaggcaacagagcaagactccatctgaaaaaaaaaaaaaaaagtctgggcacagtggctcacgcctgtaatcctagcactttgggaggccgagtcgggtggatatcctgagctcaggagttcgagaccagcctgggcaacatggcgaaaccctatctctactaaaaatacaaaaattagctggggccgggtgcagtggctcacacctataatcccagcactttgggaggctgaggtggatggatcacgaggtcaagagatcgggactgtcccagccaacatggtgaaaccctgtctctactaaaaatacaaaaattagctgggcatggtggcgcccacctgtagtcccacctactcgggaggctgaggcagaagaatcgcttgaacccgggaggcagaggttgctgtgagctgagatggcaccactgcactccagcctgggtgacagagcaagagtctgtctcaaaaataaaaataaaaaaagaaaggaaaagaaaaaagaaagtaagaaaacagattttagccccaagaagtgggttaaaggttaaaagaaaccatgatgggttgctggagggaaggtgaatctggtgtgttcaaactctagagtgagtcataaatgaacaatggtttccatctgtaccatcctgggtctgaatgctaggaggtccccttgccaccctagtgtcttcaactttggagacaactgggtggttggctgtggacagccattcctgccaggctgaagcttgcttgctttttttttttttttttttgagacagagtttcgctctattgcccagactgtagcacagtagcccaatctcagctcactgcaacttctgcctcccgggtgcaagcaattctcctgtctcagtctcccgagtagctgggattacaggtgtgcgccaccaggcctaatttttatatttttagtagaggtggggtgtcactatgttgactaggctggtcttgaactcctgacctcaggtgatccgcctgccttggcctcccaaagtgttgggattacaggcgtgagccactgcacccagcctaaggcttaagtctttccgatggctcttcagaggtaaatggagcttacacataatctttcaattaggggtcagattcactaatgagtggtgaaataattttcgtggtttttgatcagcatttattaaaatagagaacagaaagattaagtaaaaataaagaatagaacataccagcacacctatgacaagggtaagtatcgtttcataaagcttgtgtttcagttttgcatgtgcatgtaatcgtgtttgtgtgtgtactgggtaccaatgtaaaatgtattcgtgctatgaatctgggtgaaaaacgtttaagtcattagtccaggctattcctccatccatttgttaggtgacatacagcatagtacagcggagccagaatacctactgcacgtcagttcttcaatctttttttttaattgatttatttatttttgagacagagtttcgatctttttacccaggctagagtgcagtggcgcgatctcggctcactggaaactccgcctcccaggttcaagattctcctgtcttagcctcctgagtacctgggattacaggcgcccaccaccaggccgggctaaattcttcaatctttaaagtgaggataataatagtagctacctataggcttgctcaaagttaaatgagttaatatttataaagacgcttaccacagggccaggcactgtgccagagataaaaagatgaatgagaaatagccccagcctcaatgcacttcattgtgggattttctccatattggaaggagggattcacaaaatgcttgtttcctctcaggccttcctcttcgtaatcctacacctacctagtagaaggactgtcagagaaatgagcccagggcgtcccccggtggcgcagcgccgccttcggtctaagcacttggggcaggggggaagggggggaggggggagcctcttggcttcgcactacaattcccaccaagcatctgtccctctctggcctctaataacgagtgcgccttgtggtccagcgtctggcaactttcacgcctagcgtcgcgtataccggaaaactgcatcgtccagaattgcttccgagtcggcgcggcgcaaggcttgctgggagacacataacctcgattttcttccgccatccggctaaatagtcccatgtgcactttgttccatggataaataaacactaggaacgcatttccaccctagatttcagcagaaatgctgaatgtaaaggaatatttgagtaaagtgagttgccgttcttgaagcccgtctcctaaggattctcccggtgtccgcgtagggatctcatgctatataggagggccctgccaggcaccgtctcctstctccggtccgtgcctccaagatggtgagtcttcttgcgtggtgagggtgggggttcgggtgcagactctgggattgtggggaagtgagagcctggagcacggctgaggggtggaccgagtgtacatttcatttgctctgggggtcggcgggatttgcggagaaacaggagatccgagcggsgccttcctggaggctgccggtgcggcttgtggccggaaagggactgaggctgggtgagttgcgccgttttcctaacagttttcccatcctgtcgcagacaaagaaaagaaggaacaatggtcgtgccaaaaagggccgcggccacgtgcagcctattcgctgcactaactgtgcccgatgcgtgcccaaggacaaggccattaagaaattcgtcattcgaaacatagtggaggccgcagcagtcagggacatttctgaagcgagcgtcttcgatggtaagtgggtcaccggcgcgaactgtgtgaggatcccagtatcttaaagccttcgcccaacttcgcccttttggaggctctgttckttggagcctctcaggcaatttccacgtatttaaggttgttactggtagaagagaattctcttgtttgccgttttgattcttttctgggcagagggtgactttgtgatagagtgcacagcctttactctgaggtaaagstttgcctgtttcggttatgagattgcaaaaactagaaacttggtaaatttgacaattcttgtgctattgattatttgaatatttgtgaaaatatacaggtgaggaagaatgtcttcaacgtttcgagaatggaggccgtctagtttggtgtgcaaggatgatgtttggagcaataagaacgtcgctttgtttttttccttttatagaaagagcaaggttcagggtaggcattagggcgggtgtaggtgtagaaggaactggattattggtttattgcatttagaatgtcagtctggtccttgcggtgtcaagatgaactcacgtgggatgttaattcacttgtaaaactgagggttatacatatgtgctcaggtattgggctgaacaggtgctttgggggtgcttttatgtgcccgacaggcatttaaataggtttagttttaattgacgtaaacatgtaaggtgctcttcattcatgtaacaaaaaagcaaggtaggtatataataccagtataactctattttctattccttagcctatgtgcttcccaagctgtatgtgaagctacattactgtgtgagttgtgcaattcacagcaaagtagtcaggaatcgatctcgtgaagcccgcaaggaccgaacacccccaccccgatttagacctgcggtgagtattttaaaaggagaatggaakycaggggagtgatggttaaaatttcatcctggagggtcagggtgtcctatacctgtaacctcaacactttgggaggctgggacaagaagattgctagaaaccagcagttcaagaccccatctcttcaaaaaatattgagaaggaagccaagcatgatagtgtgaacctatagtctggctgctcgagaggctgaggcaggaggatcacttgagcccaggagtttgaggttkcagtgagctatgattataccacttgcgctccagccagggcaaaagtgagaccttgtctcttaaaaaaaaaaaaaagttgcttcctcctgtggtgcagggggtatcaaattaaggtctgtgcctcaggttaagctgtaaggcaggtgagacccacacctgaacatgcttagagacactgcaaagcagtgttagaatcagaattggtttttaggatgcagagtagtgttctccctccacctctatcagcttcccatgcatttgtagcctgaatacatcagtttgtgagaggatggtggtcaagttctttgggggaagggagtcttggatccatgggttttaatttactcttttgtttctttgtctttcagggtgctgccccacgwcccccaccaaagcccatgtaaggagctgagttcttaaagactgaagacaggctattctctggagaaaaataaaatggaaattgtacttaatattgcatgttaagtgtatctgtgccagataaggtggggattttgtgtgttagaccaagtgtgaagtgacacacattattttcatggggaagaaagcttattcatgtaatttaatttttttcttttttttttttttttttttggagatggagtctttgtcgcccaagctgaattgcagtggcgtgatctcagctcactgcaacctccgtctcccgggttcaagtgattctcctgcctcagcttcttgagtagctgggattacaggtgtctgccaccatgcctggttaatttttgtatttttggtagagatggggtttcactatgttgtccaggctggtcttgaacttctgacctcagttaatccaccagccttggcctcccaaagtgctgggattacaggcttgagccacctcgcctagctatttatgtaaattaaactttaattgtggtcgtatggttggcctcacaattcgcatagctgtgtgaaatggagattaggcatctgaattttggatttaaccacatcaagtttaagttggcatcctaaaaatgggtaaacattaggagaatgaggaaaagctattagttgagtgaggagcacattgggaagtgacctaaactgaggtgtttatacccctggagggggaacttgaatagtggatgtatgacttggatagcttcagagcataaaaggattaatgttcagatgctcatcttcctaccttggaaaagacactaaaggcatttctagaaacgagacatcccggaaatataaggtagagaaaggctctaccttatttttgtctgtatgacaatagtttaatttgtcctagaattcaggaaaaaaaaaatctatttgggagtaaattgttactgacttcgccagtgaaaggtaacacctgtatagcttggagattttagacacttgggagtcacctgcacccctgccccctttcaagcagttctgcctcaacctcccaaatagctgggattacaagcatgcaccagctagtttatttttttggtagagatggggtttcaccatgttggccaggctggtctcaaactcctgacctcaaatgatccacctgcctcggcctcccaaagtgctgggattataggtgtgagccactgcacccagcctaaggaacgggtagagattttagaatgtggaggttctgttaattggaatgcactccccaacagaaatctgagacaagaactgctgacctgacttgactgtcagtacaccagtgtttgtactggaatatctgtggcaaacccggagtgtgtaagagcactgaatgtaggcgataatctatatccttcagggagtctcaagacatcagtgccccttgcaacctgatcacaccaagggtaaacaggaagtgatagaagaaaattaagaggtccaaggcaaaaatgggtactgaatctgagtgatcccaaagtccagcttgctcaacagaaccagattcaaatagtaaatcgtgattgtgggtgtacttacagagctgatccaagattcctcttgaagtgtctagagtcacagcctgtcacgtgggtcctaactactacctcttctgtgggtttacaaactcacaacatactctgcattctaagcgcagagtatgttgtttgattgtctccatagattctactttcaagaacctagctggtaagaattgacttagtttttcgtcttaataatcccaaactttgttgtttttgagatggagtctctctctcttacccaggctggagtgcggtagcccgatctcggctcactgcaacctccgcctcccgggttcaagtgattatcctgcctcagcctaccagtagctgggattacaggtgcccgccaccatgcccggctaatttttgtatttttagtagagatagggtttcaccatgttggccaggctggtcttgaactcctgatctcaagggatcagcccacctcagcctcccaaagtgctgggattataggcgtgagccaccgcgcctggccaggaatctgcattttaatagtgtcccaagtgattgtgatgcaactggtctgcggactatactgcagagcagatggtgaagggaatgttgcatttggaggattttattgatgatgaatcctgggttccagaaagctgtgaaagggtttcaggagatggggaagagtgcaaatggggtcagaaaggactgcatgagaaccagaatctgagagacgtggaatgagctggaggcctgggcttctggtggtgactgcacgaataggtgcaactgagccatggtgaacatcatgctcacaagccaagtgtgcagtgtgacttggagtcccaactcactatctacaggcccagggaccctgacttcacagctgcctcccaaggctattttcctaaccttttctctctactctcttagatcagtgttggactcatcatttctgaaatatgagaatgtgtgggaaggcagcaaggtgagataggcccagaaacattgggaggggtgtggggagcactaggagaggaggagatcgattggggtggggaagaggaatacagtctccctcccacatccctggaccccagaaagaagtcctgaagacacatccttttttctagtataatgcactatttaccctgattcaggcactctgaatgaaaggtgacttccggatcaggcgccctggctcacagctgtaatcccaacactttgggaggctgaggcgggtgggtcacctaaggtcaggagtttgagaccaacctaaccaacacggggaaaccccatctctactaaaaaatacaaaattagccgggcgtgatggcacgcgcctataatcccagctacttgggaagctgaggcaggagaatagtttgaacctggaagtggaggttgcagtgagccaagatcatgccactgcactccagcctggcgaaagtgcgaaattctttctggaaaaaaaaaaaaagaaaaagaaaattgggtgactttctcaggctacagttaaagatgatgtcatgagtagttaaccaggcctcattgatgttagtacctcgggatgaccatagagggcagtgtcgtgcaggagttaagagcccagcttcggagtctgacagacctaagtttgagtccttccttcgctctttggtagctttgtgtgtagctttgggcaagttactctatctaaacctccaaaaattaatttaaaaacacttcacaagaacattttgagaactaaatgaaataatctttgcaaaggactttgcaaagaacctgccagataggccgggcgcggtggctcacgcctgtaatcccagcactttgggagtccgaggcgggtggatcacgaggtcaggagatcgagaccatcctggctaacatggcgaaaccccatctctactaaaaaatacaaaaaaaaaattagccgggcgtggtggcgggtgcctgtagtcccagcttctcgggaggctgaggcagnnnnnnnnnnnnnnnnnnnnnnnnnnnnnnnnnnnnnnnggtacagtagttcatccggaaagaaaagaaaagaaaaaaaaaggaatgggaacccaaaacaagtaacttgcccaaggtcacatatcaaggacaagtttaaatataggtctgttcaacttctaggtcccctgaattctgctgtactccactttagggactgtaattttcttttttctttttgagacagggtctcactctgtcacccaggctgaagtacagtggcgccatctcggctcactacaacctccgcttcccaagttcaaacagttatactgcctcagcctcccgagtagctgggattacagtcatgtgccacgaggcccactaatttttggatttttagtttagatggtttcttcgccatgttgtccaggctggtcttgaactcctgaccccatgatcagcctgcctccgcctcccaaagtgctgggattacaggcatgagccactgcgactggccgaagttttgacatatacccaagtgtatacccatgaaaccatcaccatactcaagataattaacatatagatcaccccagaagttgcctcttgctcctttgtaatctcaccatcctgtcactcccagcactgtccccaggcaaccactgacctgctttctgcaactatagattagtttgcatttctagaattgtagaatcgtacataaatggaatcccacagtatatatgtgtgtatactaaaaacatataaattagccaggcatggtggcaggcgcccataatcccagctacttgggaggctgaggcaggagaactgccggaacccgggaggtggaggttgcagtgagcccagatcgtgccactgcactccagcctgcgtgacagagtgagactcaaaaaaaaaaaaaaaagaaaaagaaaaaaaacttgctacaaacatttgtgtacaaagtctgtgtggacatatgctttcttttctcatatgtaaatagagtcatgtgtcctcaagaacagggatatgttctgagaaattcatccttaggcagttttgtcatatgaacatcttagagtgtacttacacaaacctagatggtatagtctactacacaccaaggccatatggtagagtctattactcccaggctaccaacctatgcagcatgctactgtactgaacgctgtaggcaattgtaacataatgatatttgtgtatctaaacatagaaaagatacagtaggccaggcactgtggctcatgctggtaatcccaacactttgggaggctgaggcgggctgatttcttgagaccaggagtttaagaccagcctgaccaacatggtgaaaccccgtctctactaaaaatacagaaattagccaggcgtggtggcaggtatctgtagtcccagctacttgtgcggctgaggcaggagaattgctttaaccctggaggcgaaggttacagtgagccaagatcgcgccattgcactccagcctaggcaacaaagcaagactccatcttgagaaaaaaaagaaagaaagagggagggagggagggagggaggaaagaaggaaggaaggaaggaaggaaacgaacagtaaaactatggcataaaagattaaaaatgggccgggctcagtggctcacgccagtaatcctagcactttgggaggccgaggcgggtggatcacgaggtcaggagttcaagaccagcctggccaacatggtgaaatcccatctctactaaaaatacaaaaaattagctggttgtggtggttagcgcctgtaatcccagctacttgggaggctgaggcagagaattgcttgaacccgggaggcagaggttgcactgagccgagatcacgctacagcactccagcctgggcaacagagcgagactctatctcaaaaaatacaaataaatgggccgggcacgatggctcatgcctgtaatcccagcactttgggaggctgaggcgggtggatcacctgaggtcaggagttcaacaccagcctggccaagctggcgaaaccctgtctctacaaaaaatacaaaaattagctgggtgtggtggtgggcacctgtaatcccagctactcgggaggctgaggcaggagaatcacttgaacccgggaggcagagtttgcagtcagccgaaatcgcactattgcactccagcctgggcgacagagtgagactctgtctcaataaataaataaataaataaataaataaataaataaataaataaatgggcagggcgcagtggcttacgcctgtaatcccagcactttgggaggctgagacaggtgaatcacgaggtcaggagtttgagaccagcctgaccaacatggtgaaaccccatctctactaaaaatacaaaaaattagctaggcatagtggcaggcggctgtaaccccagctactccggaggctgaggcaggagaatcgcttgaacccaggaggcggaggttgcagtgagccaagattacaccactgcactccagcccgggcgacagagtgagactgtgtctc

SEQ ID NO: 8878 - DNA, 59801 bp, Homo sapiens
tgggcagatgtttctgaagggcagaggtcatctgagggaggtctagagatcaagcagaagagccggtcttccattttggctggagtcattcccttctggggttccttaaccctttagccagaacatgtcatcaactcattcaggaagttctggcctttaaaatccacatctccacgactgtaagaagctctcaaagccctcaatgctctattacttttacagctcacagaaaacatttatctttgactctttgccccatgaaagtaagtaggaaacataaatatatttattaagaaacacactaggccaactaactctagccctctggtatgggtctagaaatcatagccattccaattcatcacagcttgtcctacagtgcacagtacaagattagcaaaaccagcccttctggtttttaactaactgatttctattaagcaaatggtgccaaaccggatttgttatactcatggctccactttcaacccctgtggtctctcactttaactcctttcagaaagctggtatcatcattgaccccattagtgctgtcttctttttaccttcactggggacatcaagtgtctcacaactatgtactgccaatgtcctcagtcagtgagtgtacagggtgaggcactttgctttttcttttcttaagtaggaacacttgggtaaagtgatacaccaagttacaaatcctctggaagcaatcccttctaatgttgtgagtctgggagagaagtagggagttgggaagaaaggaacgttctggcttcctttgctcccactgagagcagtggtgacccagagcctccactgggcctaattcagatggtttgggaagtgatggtgtgtgtgtagctcctgggcacaaggaaggtaccccagcaatggccatgcaagttttccatgagaaaactttccagggcaaggtaccatccaatgagaagcagaaacacagactgtctcaaggctgaaaacacctaaaaccatctgatttggtggtttgcatgcaacctcttatagccataggaccttttcttcaaacagcagagcctaatatgtcaaactcatacaagcatagttgctttcttggaattgcagtggggagaagaataaagccccacaaactgtcttccccatggcttctgaatagagctagacactatattcttttccttggttagggattacctcacctggaaaacctggcaaaggaaatgaagaaattttctgctacctggggcagggtggagagagaaatatcctgaaactttaattctaccctgataaaatttggcatcgtattataaatttggcaacatattataaagtggagattgcaattgtcagaaatgtagcagaactgtcaacagcatactaaactatgtgacactgaaatgtgagttacacttctagttgtctagttctggtataagaaatacaaattctttaccaacactcaacccacagaatacaatggactcttacatgtcccgcccttactcccatacacaacttttagcctcatgtacttacgaataaaacatatactcaatagggcagtaggcaaaagcagaatgctaggtttgaaaaggaaatcatatctactgtttaaggtcatatgttgacattagaatgaagaataagtcattataaagcattttttctcacctgcggttctaattgctacaggtgtttgctgagggttgaatagagagcatgcagttcagacactttattgatatagtacatgttcctcctaagtttaggactaaatcccagccagtacagggactcagtagactcatctaccaaagtccggtgtgcacattagaaaaaaacctaagaaagatcatgtgcatttaacacctttccctctagccattcaaaggagcttcacattgcagccctttttcacctttgttaggcacaccaagtggcctggaagatgctgagaacaaagaggctttcttccttgggttaccggttgaaatacatcatcgattcagcccggctcaatcaatggtgacagcagctcgcagacccaactcacgtgggggagagtcaaggcctccttacaacactgtaccaggactccttcaggcacgagctctcccacagctcctgtgccgcccagaggagtataaagacctgtgacagaatgtgggacactgcctagagcatagcatttgtgccacagtctgagaactgcaaactagagttgccaacatttggagacattaggaaagttaaatgtgaaattttgtggataaattttgtggataaatgcccaggatgtatagccctccaacatttcaattaacgtcaactatcatcacataaagcaggggtgtggagaccggaaaactgggctgttttattttaattttctaacaacatctactgcgcactgactctgtggctggcacagaactaagcctctgacacagattatctctttaactcctcacaagaccctttggtaagtaccattttaacccagttttacaaatgaggaaaccctggggcttaggttaagtagctggtccaagggcacagggctgacaagtggcagccaaatgtgaacccagctgggtagagctgtgctatgcttcctgtgcttgaaatttaatgcagatgccagcatcctcaattaatataacaattgtgaagctaaaataaaatcaacatttaaaacagtgccttccccatactaatgtacattgctcatgctaagcgcttaatattaaggaaacaaatattatttaactttttttggtgaaggacacaatcatacaatatatacaaatatctaatattagctggttgcagacagtctaaaatgatcactgcagctaaaaaaaaaacctcaaaatgtttctgagaatcaaaggagtgtgaataaacaacactattctaccaaagcaataaaataaaaaattgttttaaaaaaaaccctcaagtagttataatgcagataagtgtagtctttggaaatgatttaaaatttcatttcaatgtctaaattataaagcctcaaattaatcattataagttgttttaataaagtttaaagtttagcacctagtgaagtaacttatgcatagtaggtttccaataaatgattctggaatgaatgactaaattcatgaaggcacttttgaaaacagacagacattgtcctttccttgtgtttgatttttttttttaattccatgataaaggttgcatgacatttccttattagtaatttttttaaaggaatcccaggatctccagttcaaacaaaggaaataactatcaccttgaaagacaaaaagaaataattggctgaaaataattaaaaacaaatgaagtgtttgtctttacagtgagatatggggataaaaagagtagcagcttcttcaaaatatctttattaacatttgagaaaatataaaactattctctaggcaacagcatgaaaacacatgaaataagtgggtacatttaagccactgtgactggtgaagaagacatttccccgtacatataattaatataaacaggtaaattcagaccaataaaacacttctttctcaaaagcattttagtgccctgtgttactctggagactcagtagttgaacaaatatgtgctcaaaaataactattcattctttaacagtacttaaaaaaattaatatgaacataaaaacacaaattactccattatttccataaggtaaaatattaggttaaaactacaatggccaaactgtttagcaaacctctgtcctattttaaagggaaataaataaataagagataggtctatggaaaataatgaagttgtctagcaacacttttcacatcacttccaccatttcaacagaaccaacagcaaatctaaggttccccaagcgtttcccacttattagggaaatcgatagcattacctgcggggtgcctgcggttgcttctgcataaggcttttatctcattttagcaacatttaaaaaatgcaggatgtctataaccttggcactcatcattacgctggcatctttagtacaatttgctaatagagtgaaagcactgtggttcagtttgggaagcttcttcataaggttctgccaaactgcaaaggggacggaacaaataaataggctgaccgtacatacatcagaaaaagcagacccttaaaatccaaaagggagttattcattatttcaaaaacacgttattttacaaaagaagaaagaaaattgaggggataatattttcaaaaatataagaactataaaataatctaaattgaatttcgtttgtcctgtctaaactcatcctatactgatatatcatttccatagacaaagcgagtcagatgtgttagaataacatatatacatataaaatataccaagccatggatttaattttcataataactatctcatttgcctaaatgtttggtactaagtggtagaaatagaagacaaaatgttcacacctgagattacatattaaaccgccctaggttttagtctcatacttgctagaagaaatctgcaaggaatgatacctggatgcctgcggattccaagtgtgacaaagcattttttgaaaaagcattcagaagccttgctttcgactacacaaagctaagcataaattttaaaggccaaacgtcagtcagtaaaactgaattcctgtagttctcatggttccaacgatcttgaagagcataggtacctgactcaatttacactgtcattttttatgcttaaaaatataaaccttttttcacatttacaaaatatgcacgatatatattacttgagactaatcttagccacagagctgccttttattttcagctttgtatttctgagaaactaatgaatctatggtgtagataacagcaaaagtggaaataaattcatagtctggggcagcagtataattgggacacagtaaacttacaaggaaaagaaacagtacactactactgtaaaggaaaacaagttgcataatattttccagagtctgattacttttttgttaaaacttttctacttttttcattgattgttttaaaacatgtttgctactaaggagaaaaaggaagacatggttatggtgtgaatcttgaaagatccccaaagctagaaagatttatacagaagtctctcattttccaacttctgttataaagttcctgcgctagtacttagaaaaaaccaaacctggaaggaagctctacctagtttactttctgagttcggatttccgcatctatcagatgagctctttctagtgctctttccccctcaaatctccagagaaacacgcacatttttgcaaacacacacgatgtatctatgactgcacacacaggttcatcaacaccatgacagaggcgacacgtcacaatatgataaccagaacagaggacgatgacagtgagaaatgggtttcttttatggcccgcttggatccctaatgcccttatttctacacaatccagcctcagccaggaactttaaaggatcagaaagagaaaacaggttgcatgaaaggaagagaaagaaaaccgaatgcccgcttttcgagagcactgcaaaattagccccgggacccggctgcacaaaagtgcagccttaaagaatgccagcccatattctagacacccaagtaaagcatcctgtaatcgagagaaaataataaataatagtggtcattgccattaagcataaaaatagtaataacaattgtcaccacggcgttccgtacagcagctgcgcgtggagccggcttctcctccggcccccacggcccgcagcttcccctgcagccccacagtgcgtcggaggaaggcgagggctccgcgcgcgctgcaccgtgggctgggcctgcccctcccggcgcccgcctcgcctcgcctgtcccgcgcccgcctcgcctgtcccgcccccgcgcctgcgcgtcaagtggctgggctggcttagcggacyccggttgctagggtgtgtctccttggcctcctagagggtggggatccgtggtgcttcttcgggaacagcctcctgcaggaagaccctcgctggacctttacctcgctgcctagattccgaggaaaaggagataggagacgaaaagccagttggtttggaaagcggccgattatcctaaagggtagtgtgggagtccagcacttccatgcccctctttgggtactacggaagggagatttccagcatcgtgtggaacatatgaccagggagtacaccttgagcgcttgtgtgcagttatcttttggcggtaaacggcccatttgtgcagtttcagggtgttcccttctaggctatcaatggaataatgccgtgccaggcacttttgatgttgccctgcaaactaaaagcacattttgggggtgcatcttctcgcattatttctaaacagtatgagttgggatccagcagccctgggaaatctcattatagtgaaacccatcttattttaggattgaattgttttggcccaagcatagtggttgaaaaacaagccattatagaaagaaaacaatttgtttgtgaatggttagatatggtgggtcttcagaggcttatctaatgaaggcatcttctacacatttctgaccaaattctctttctacatttatagcgataacattttggagagagagaaaaaaaatgtcatttcgactattctgaaaaatcagtatttactagttgaaatagcattggcaaattgaactttgtactaacatggaaaattgtagaatgatcctgggtagtaataatacacatatttttaaaattctatgtttacttataaccctacattttaactggattctttctattaatagaagttttaaagaattattttcttaccctctttttttttcataaaggaattctgcctggattcagtagagtattggtacagaatgattttctttaagatgtaatctaaattcttattatttttcaacaattcaaacatattcaaaaccttttcaattctcatttaaaccaaggattatgaaaaacagcacttattattcattaaaatgcaaaagcccccactgcttcttcgaagacccttacctccaaaattcactaagctgtctttacatgagaaaaaaacccatacaggtatgtgtattaatcagatatgtgtattaacatttatgtatctttcatagaaattccttgacttgcacagctcagaatcacaataaatacactcactaataacttacaaatgtttgttgtcaggtgataacatccaattcaattccacagatgcatttactgatacttattggtggacttagtagattcaagtttatctcatcgataaaatttacttgtaaccccagaattggtactcaaagggctttctcagtcatgcgtggatatgtgcagagcactgaaaatgagtcacccaacacacatgcctccagctgaggtggaacaaggctacctctaccttcttgtttcagctctcatattgtaaacgggtactgttttccctgtctgtttagctctatgtttcttgaatgtttgtgcttttagttagtgatttcactgtgggccccaagcatagtgttgaagtactgtctagtgttcctgagcacaagaaggctgtgatgggccttacagagaacaagatatgtgttagataagtttccttcaggtgtgagtagtgttgttggccctaagttcaatgttaacaaatcaactgtttatatttattaaagtgtctttaaatagaaacaaatataaaacaaaattagtgttgatcagttgatgaaaatgttgaaaccagaggtttgcaggaacctagccccatatttcttccaggagaaatggttcagtaatgagtaattcattgtttgtagaacagaactactgcaaataacaaggaccgaatatatttagtgagcaaaaacagaccttacctgttcccttcattagttacccactgggatastgattgtaatcaatcaatcatataagtaaatgcaaaattaccctgtgataagtrctatgaagtaaagatgagccacttttataactataactttatctaatgcttaatcctctatttctgtgtatggtttctattccctccttattataagcaatacaattagcatattttctcattttccccttctcagtttcctcttccatctgattttagttgattgcagttttagtgtcaacatttatactgttcaaatatacctagtctataacttgatttataatgttaaattatcatcttttgacctatggctattaacartaggtaactcaacttacctgtaatactgccacaatttcctctcctactttctctcccaacttttgttacatgatttttacatcatcatttctacatttctataatgttctgcatttacaatctgttctgtaataatacagtatgcagatttacagctcaaggttaccagttatcttgtagtttctccattcatcttttgtttaaagtttatcttctagtacagaatttcacaaccttggcactattgacattttaggttggatggttccttttttttggtggggaaagcagagctctcttgctccaaaggctcttgacagagggctttgcacatagtaggtgatcaaaatttgtttttttatttcttctaaaaaaaaaaaaagcaggatacatgcacagaacgtgcaggtttgttacataggtatacatatgccatggtgatttgctgcacctattgacccatcctctaagttttctcccctcaccctccacccactaacaggccctggtgtgtgttgttccccaatctgtgttcatgtgttctcaatattcaactcccacttacaagtgagaacacacagtgtttggttttcttttcctgtgttagtttgctgaggatgatgkctttcagcttcatccatgtccctgcaaaggacayaatctcattcctttttatggctgcatagtattccatgatgtgtatgtaccacattttctttatccagtctatcactgacaggcatttgggttggttccatgtatttgctattgtgaacagtgctgcaataaacatacgtgtgcatgtgtctttatagtagaatgatttatgttcctttgggaatatacccagtaatgggattgctggatcaaatggtatttctggttctagatccttcaggaatccttatactgtcttccacaatggttgaactaatttacattcccaccaacagtgtaaaagtgttcctatttctccacagccttgccagcatctattgtttcctgactttttaataattgccattctgactggcgtgagatggtatgtcattgtggttttgatttgcatttctcagatgattagtgaygttaagctttttttcatatgtttgttggctatgtaaatgtcttcttttaagaagtgtctgttcatatccttcacccactttttgatggggtggtttgttttttttattgtaaatatgtttaagttccttgtaaattgtggatattaaacctttttcagatgggtagattgcagaagttttctcccattctgtaggctgcctgttcactctgatgacagyttcttttgctgtgcaaaagctctttagtttaactagatcccattttgtcagttttggctttggttgccactgcttttggcgtttttgtcatgaagtctttgcccatgcctgtgttgtgaatggtattgcctaggttttcttctagggtttttatggttttaggtcttacatttaagtctttaatccatcttgagttaatttttgtataaggtgtaaggaaggggtccagtttcagttttctgtgtatggctagccagttttccgagcaccatttactgaacaggagatcctttccccattgcttgtttttgtcaggtttgtcgaagatcagatggttgtagatgtgtggcattatttctgaggtctctgttctgctccattggtctctatgtctgttttggtaacagtaacatgctgttttggttactgtagccttgtagtatagtttgaagtcaggtagcgtgatgcctccagcttcgttctttttgcttaggattgtcttggctatgtgggctcttttttggttccatatgaaatttaaagtagttttttctaattcttggaagaaagtcagtggtagcttgatgaggatagcattgaatgtataaattactttgggcagtatggccattttcacgatattgattcttcctatccatgagcatggaatgtttttccatttgtttgtgtcctctcttatttccttgagcagtggtttgtagttctccttgaagaggtccttcacctcccttgtaagttgtattgctaggtattttattctctttgcagcagttgtgaatgggagttcacttatgatgtggctctctgtttgtctgttattggtgtatacgaatgcctgtgatttttacacattgattttgtatcctgagactttgctgaagttgcttatcagcttaaggagactttgggctgagacaatgggattttctaaaaatacaataatgtcatctgcaaacagagacaatttgacttcctctaccctttattgctttcccttgcctgattgtgctggccagaacttccaataccaggttaaataggagtggtgagagagggcatccttgtcttgtgccagttttcaaagggaatgcttccagcttttgcccattcagtatgatattggytgtgggtttgccataaatagctcttattattttgagatatgttccatcaatacctgtttattgagagtttttagcatgaagtggtgttgaattttatcaaaggccttttctgcatctattgagataattatgtggtttttgtcattggttctgtttatgtgatggattatgtttattgatttgatttatgtatgttgaaccagccttgcatgccagggatgaagccgacttgattgtggtggataagctttttgatgtgctgctggattcggtttgccactattttattgaggattttcacatcgatgttcatcagggatattggcctgaaattttcctttttctgttgtgtctctgccaggttttggtatcaagatgaagctagccttataaaatgagttagggaggagtccctctttttctgttgtttggaatagtttcagaaggaatcataccagctcctctttgtacatctggtagaattcggctgtgaatctgtctggtcctgggctttctttggttggtaggctattaattactgcctcaatttcagaacttgttattggtctgttcagggactcgacttcttcctggtttcatcttggggagggtgtatgtgtccagaaatttatccatttcttctagattttctagtttatttgcatagaggtgtttatagtattctctgatggtagtttgtatttctgtgggatcagtggtgatctcccctttatcagtttttattgtgtctatttgattcttctctcttttcttctttattagtctggctagtggtctattttgttactcttttcaaaaaaccagctcctggattcattgattttttgaagggtttttcatgtctttaactccttcagttctgctctgatcttagttatttcttgtcttctgctagcttttgaatttgtttgctcttgcttctctagttcttttaattgtgatgttagggtgtcaattttacatctttcctgctttctcctgtgggcatttagtgctataaatttccctctacacactgctttaaatgtgtccaagtgattcaggtacattgtgtcttcgttctcattggtttcaaaggacttatttatttctgcctgaatttcgttatttacccagtagtcattcagtggcaggttgttcagtttccatgtagttgtgcagttttgagtgagtttcttaatcctgagttctaatttgattgcactgaagagactatttgttgtgatttccgttattttgcattttctgaggagtgttttacttccaattatgtggtcaattttcgaataagtgcgacgtggtgctgagaagaatgtatattctgttgatttggggtggagagttctgtagrtgtctattaggtccgcttggtccaaagctgagttcaactcctgaatatccttgttaattttctgtcttgttgatctgtctaatgttgacagtggggtgttaaagtctcccattattattgtgtgggagtctaagtctctttgaaggtttctaagaacttgctttatgaatccaggtgctcctgtattgggtatatttaggatggttagctcttcttgttgcattggtccctttacccattatgtaatgccctcctttgtctcttttgacctttgttggtttaaagtctgytttatcagagactgggattgcaacccctgctttttttttttgctttccatttgcttggtaaatattcctccatccctttattttgagcctatgtgtgtctttgcacgtgagatgggtctcctgaatacagcacattgatgggttttaactctttatccagtttsccagtctgtctgttttaataggggcatttagcctatttmcatttaaggttaatatcgttatatgtgaatttgatcctgttattatgatgctagctggttattttgccctttagttgatgcagtttcttcatagtgttgatggtctttacaatttggtatgtttttgcagtggctggtaccagtttttaccttccatatttaatgcttccttcaggagctcttgtaaggcaggcctggtggtgacaaaatccctcagtatttgcttgtctgtaatggattttatttctcctttgcttatgaagcttagttgggctggatatgaaattctggtttgaaaattcttttctttaagaatgctgaatattggcccccactctcttctggtttgtagcgtttctgcagagagatccgctgttagtctgatggacttccctttgagggtaacccgacctttctctctggctgccttaacattttttccttcatttcaaccttggtgaatctgaccattatgtgtcttggggttgctcttctcgaggagtatctttgttgtgttccctgtatttcctgaatttgaatgttggtctgtcttgctaggttggggaagttctcctggataatatcctgcagagtgttttccagcttggttccattctccttgtcagtttcaggtacaccaatcaaatgtaggtttggtcttttcacataatgccatatttcttggaggctttgttcgttccttttcattcttttttctctaatcatgtcttcatgctttatttcattaagttgatcttcagtctctgatatcctttcttctgctgatcgatttggcttttgatacttgtgtatgcttcacraagttcttgtgctgtgattttcagctccatcagttcatttagcttctctaaactggttattctagttagcaattcatctaacctttttttcaaagttcttagcttccttgcattgggttagatcaagctcctttagctcagaggagtttattattatccaccttctgaagcctacttctgtcaatttgtcaaactcattctccatccagttttgtttccttgctggcatggagttgtgatcctttggasgagaagaggcattctggtttttggaattttcagcctttttgtgctagtttttcctcatcttcgtggatttatctacctttggtctttgatgttggtcaccttcggatggggtttctgtgtggacatctttttgttgatgttgatgctattcctttctgtttgttattttttccttccatcagtctggcccctctgctgcaggtctgctggagtttgctgaagggccactccagaccctgtttkcctgggtatcaccagcggagcctgcagaacagcaaagattgttgcctgcttcttccactggaagcttcatcccagaggggcacccaccagatgccagctggagctctcttgtatgagatgtctgtcgacccctgctgggaggtgtctcccagtcatgaggcacgggggtcagggacccacttgaggaggcagtctgtcccccttagcagagctcaagtgctgtgctgggagctccgctgctctcttcagagctggcagacaggaacatttaagtctgctgaagctgcacccatggccgccycttcccccaggtgctctgtaccagggagaaaggagttttctctataagcccctgactggggctgctgcctttctttcagagatgccctgcccagagaggaggaatctagagaggcagtctggctaccacagttttgctgagctgcagtgggctccacccagtttgaacttcctggtggctttgtatacactgtgcagggaaaactgcctacttaagcctcagtgatggcagacgcccctcccccaccaagcttgtgtcccaggtggacttcagactgctgtgctggcagtgagagttgcaagccagtggattagcttgctcagctccatgggggtgggatccactgagctagaccacttggctccctggcttcagccccctttccagggtagtgaacagttctatctctctggcattccaggcaccactggggtatgaaaaaaaaaaaaaaactccagcagctagctcgatgtctgcccccatggccacccagttttgtgcttgaaacccagggccctggtggtgtaggcacctgagggaatctcctggtctagaggttgtgaagaagatgggaaaagcatagtttttgggttggagtgcaccattcctcacggcacagtccctcaaggcttctcctggctagggttgggagctcccggaccccttatgcttcccaggtgaggtgaygccgyaccctgctttggctcgccctccatattgggaagatttctttaagcatcgyttctctacccaatcagactgcctttttcttttctcccatagtattccatacttactcctacgcaccacttattataactgtttacctgcctagtttctatactaaattgtgagatatttgttggtagtaaggtttgtgttatatcattgtacccccagcactatgtgtacagctggcacatggtaggtgttaaatgtttattgaatgaattgatgagaacaataaatatgtgttgtattatcaaagaaggatggattgcatagggtttaaggtagactttgaaagaaaaaaatgatttgaattggttgataagagaagattttccacatagcatgatgaacatatgaaatgaagtcatacatgagcaattgggcctttttggttgtcagaaataattgcagtaaataaggcttcatattggaaagttatgagtcatcacacaaaaaggtgaggtaaagtagatcctgttcacttagatttttatatcccaaactaagaaatctgaattaataccgattctgataattcagcgaaaacatggtatgacaatatcagaaaaccaatgggaaattaactctgaagactaggacgatggcagtgataatcaggggaaaaactttttttaatttttattttcccattttgttttcatgacattgggtttgaagagaggggttcataagtatatgggactgtgatattttgctgtctctcaagtgccatatggatcaaagttcaaattttgtcttcaagttcaagacttggttctgagtcagcagaggttaacccattgctactggggagtgggggtctgttggaagaaagaaggggacattggtgtgaatgactgtggaggactgcagatttccagaacccatctcaggccttggacgttttcaatatagtttatttgttgggagttgccaaagcagacccctagagcaacatggaatggctaggctgagattgtactgggagtggaaggttgtcaggcgtacagtgaacagctgatgagaacacacaccttcagggtttctttttctctgcatcctcactaacatctgttattttttatctttttaataacagccattctgactagggtaagataatatctcattgtggtttaatttgtatttctctaatgattagtgatatwgarcatttttaaatataagtgttggccatttgtatgtcttcttttcagaaatgtctattcatgtcatgcctaaggggattttttgttttctaaggggattttttttttcctgttgagttgtttgaggtccttgtatattctagatgttagtaccttgtggtatggatagtttgcaaatattttctcccactcaacaaggtcttagtcataaattattttcctagaccagtgtccaggagagttttacctaggtcttcttatagtatttttatagttttgggtcttaagtttaactctgtaatccatttcgagttgattgttgtatatggtaagagatagggatccagtttcattcttttgaatatggctgtccaattttcctaacactgtttattaaagagggtatcctccagttagaatggcaatcattaaaaagtcaggaaacaacaggtgctggagaggatgtggagaaataagaacacttttacactgttggtgggactgtaaactagttcaaccattgtggaagtcagtgtggcgattcctcagggatctagaactagaaataccatttgacccagccatcccattactgggtatatacccaaaggactataaatcatgctgctataaagacacatgcacacgtatgtttattgaggcactattcacaatagcaaagacttggaaccaacccaaatgtccaacaatgatagactggattaagaaaatgtggcacatatacaccatagaatactatacagccttaaaaaaggatgagttcgtgtcctttgtagggacatggatgaaattggaaatcatcattctcagtaaactatcrcaaggacaaaaaaccaaacaysgcatgttctcactcataggtggtaattgaacaatgagaacacatggacacaggaaggggaacatcacaytctggggactgttgtggggtggggggaggggggaaggatagcattaggagatatacctaatgctaaatgacgagttaatgggtgcagcacaccagcatggcacatgtatacatatgtaactaacctgcacattgtgcacatgtaccctaaaacttaaagtataataataataaaattaaaaaaaagaaaaaaaatataaaaagggtgtcctttccccagtgtcagttcttgtcagtgttgttgaagatcagttggctgtaagtatgtgactttatttcaggattctgtattctgttccattgagcatttcttgtagcgtcactcttggttgtaacaaatttcctcagcatttgcttgtctgggaaatactttatttttcctccatctgtgaaggataattttgctgggtagactcttcttggctgacagttttttttgtttttttttttttttaatttcagcactttgaatatatcacctcattctcttttagcctgtgaaatttctgctaagaaatccactgttaaggccaggcacagtggctcacgcctgtaatcccagtactttgggaggcygaggtgggtggatcacaaggtcaggagttcgagaccacctgggccaacatggtgaaaccccgtctctactaaaaaaatacaaaaattagctgggcatggtggtgtgggcctgtaatcccagctacttgggaggctgaggcaggagaatcgcttgaacatgggaggtggaggttgcagtgagctgagattgtgccactgcactccagcctgggcaacagagcaagaccttgtctcaaaaacaaaaacaaaacaacaacaacaaaaaacaaaaaaamcccacagaaatccaaatccactgttagtctgatgggrtttctttattggtgaccagatgcttttctcttgctttttaaagggtatgctttttatctttgactttaggcagtctcactataatgtgccatggggaagacatttttgcattgtgtttgcctagggattattgaagctcctatatctgaatgtgaatgtctaaaattcttgctagacttgggaagttttcttctattatttaattacataggttttatagtccttcctttgtctctttgcccctgggatgccaataatttgaatatttgatcacattatgttgtcccaaatatcacaaagcctttgcggattcttttaggttctttttctttatttttgtctgactggattatttcaaaagacgtgtcatcaagttctgagattctttcttctgcctgatctagtctattattggagctttcaaatatattttatattttcttcaattaattcttcagctccagaatttctatttggttctttcttaaaaatatctatctatctctttggtagatttctcattcatatcctgaattcttcttctgaattgtttgtattttctagaattctcttgtatctaactgagcttctttaaaattgaaattttgaattatttttctgggatttcagcaacttctttttgattaagatctattactggagaattcttgttttcctttggaagtttcatatttccttgtattttgatgttttctgtgtctttatattgatatctgtgtatctggtgtaacagttgcatmttcctattttttaattcacttccatagggtaggacttttttctgaagatgtatctgtggtgttggttgggtagggcactttggctttgattctgagtacatgtagtagtgtagtctctgtatgatttctttggctataaatagcattaatgctttcagtgatttccttagaggattaggctgcaattattagtgaaggctgtggtgaagttgtgctggggacaggccccaagggtggcaagagtaggctgactctacctatctttgtgccccagagtggtgtatgctggcacctgtgttggcagttactggtgggccggttcctgggccttaggtggtttgcatggatgctggtagtggcagcagtgggctaggtgactgaacaggttctcacgtcgctgggaaacaattgtgctatgggtcatggcagtagaggtggtgaatgaccctctgggtcctgcatgctgtgggctggtgttggtggtggctgtgctacaggtcaccacccacagttccagacatgctgttctcaggttcttctgctctctgcagcagcagtgctacagtgccatgtgaaaggaggaagaaccttgctttcactccagatcccaggcatgcaggccatgttacactgtgaggttgtagtcactacttagagcctcagtcaagcaggtctctggatcacctgccccaggcttcagcagcagtagcagaagtgggtgtgtggaggaggaggagrtgtcctgttctctatgtgtgagcctgagaacagagactcttccgccggtgggagaggaaatcaaactaatgagtataaattactccagtttgccattaaagggaaggataaatatggtgagatggtggtagttggaaggagttctggagtctattgaagcgtttgctgtgttaatgtgttttgttttaatagagagaaaatgaacttaaatatattggtrtagctattttattgaatcagttagctttaattagttccacttaagtaggaagcaaacattattttcttactactgcccttcaatctcatgtggcatatgtatctctctaaaagcttttctagtcagttttgtcaattagctctatctcattttcagatattgaattacttgtttcatctaaattagtacttccatatagtgtacaatcagactgtgtcccttctccaagctcaacctaggcctgctaattcttacacaagccaagggaaggaggggcctgatcagttcttcaaccctatttttttactctctttttctattcttttcatttttcctttttcttttttttttgacagggtctcactccgtcacccaagttgaagtgcagtggtacaatcatggctcactgcagcctcaatctcctgggctcatggtaccctcccacctcagccttctgagtatctgggagtacaggagcatgatgccacacttggctaattattttttttttgtagggataggagtattgctatgttgcccaggctggtcttgaactcctggcctcaagcgatcctgctatctcagcatcccaaagtgctgggattacaggcatgagctactgtgcctggccctactctctttctcaactcatattatagtttttggttcctctataagtggrgcaaggtgtggggaagagttaagttgttaaaaagttaaaaattaaagtgagaatcagcatcagtcttgtaccccatggaaatgtcaggagatacaagtcaagtagttaaaatgattctcttatattactctgatcaggaaacagcactagtaaaccaatacattttgctgytctacaagtatcagtcagggaggtggataggggaagagtgagatgttactttctccttgtggcatatattcctcttctctataaaaagtctccctcacttggtttgagataggggacatcatccctcctacaccctccatggggagggaaaaatcagggaaatgcatagaactccaatagctctgttcagaagaaatactgtctccaaactcagatcagtctctagcaatcccatatagacaacagatgggtaaagggtgaagtgttgaaggactaattttggccaccccttggcaaattttgccttaatgaatctattatctcctcatttgaatgtacagatcctcatcatttattgcactcagctgagagaacagaaaaatgtcatttcacattctgttgcataggaaagaaaaggcatatatgattcctgcctaagaatgcaagctcagtggattttctggacrtaagatagaaaagaatacttattgttataacctaaatgagcttatggcacctgtaaccactatcagattgttatcatcttcaaaagacacattggtctgacatctggcatttaaaagaaatgtaaatctttggtcaaggaaatttcaaatgagggagagctaatgatgtatgataaatagcaaaacttcatcaattgtatccatccctattgccagagttttagtgataacctctcaaaaatctagtctattattggagcttatatctccccttctctctaccaattctgttcttccaagaatagctctctacccttttaaaatctaatacaatttagccttgtcacttctccggttgctcactcaaactttataccagtcatgtcaacacacatcctggtagctgagcaagtgtatacagaaacatttttagaaggtgagaaaggggtgagtgggtaaagaaaagtgaatgctaagatattttgtctgtgacatattgataaatataatttaatttttctttttttcttttggtttagctaaaactggtaaaattgagtcactacatgtagcattcactgaagatgaaaccacttccattaaaatggatagaactcgttttcctgatgttttaagaaatcaatcactaacacctatcaatatccaaaatatctttcttgatcactgtgtacaagaaagagtgactgcaatttcatcaccccagaaatctactaagcatgtccgtgagcagattccagatactgctactggttccatattttttccacattgtaattcagcttctactcgaatttttgggaaacaaacaaacaaaatggaaagttcaagaaagtttaaaactrtgaaagatgtttatactgaaaaaaggctagaaaacattttaattctttcttccaagttttccaaacctaaaagtactcctggctcagttatcgctcaaaaacttgagaaaatgcaccctaagcatcaacctttaccagagagtccaggctatacttatcagcacatctcgagagacttaagtgcaacagtgccaagccctccacctrtgactgtatctatgaaaccagaaggacagtggcctgaacattttaaatcaactgctacattgacactaagagttactgaatttccaggttttgtttccttgccaacaccagttttaccaagaaaacctcacaggcagtctgtgataggtaaatacaatctgaacacggtataattatagrgtcaagtagagcaaaggggagagaaggcatgcaagctaatggtacccctcccgctttgggtttgcagartgggaggatggaatcaccttttatatatacatgtaatacttgagccatagggcaataacagaagtcctgaccttgcagatctgccaaggccagactgggtactccattcagatggtgataatgggaaccaacaagggaattcaaaggatcggaaaagctaatataaagaagcagtgagaatacacagtcattcaaaggtgatctagaagaactccagaagtagaatgccartgctgatagaygccttcatgaatatattttcatggataattggaatcyattaaatgatgaacaattatattgaagtcataaaaccctcaagtgaatttttacaaatatccaaagtcatcccatttgtttttcatttttctagaaactcttgtaacagaaaatggaaatatagaaagtgtcccaaagcaaatcccaccaagaccacctgaaggtaaatgctagatttatacaattcttttagaaaatgtatgtaagattatatctttaaaaaattatgggtgattttttgtgtttatgtgtgtgattcacacatgcataacacacatatgtcttacctcattttcagctccctaagtcatttatggagcagctatttttaatatattgactatgaaccaaatatattgataytgagaatataaaagctgatgcactcgtaatctgggtggggtggacaggcatacagaaatatgaattaactatttgccatgtgccaggcaaatcaaacaaatgaaaatgaaaaatatatttgaagaaagattataccatcctagatgttacattatgtctacaaacaatctctcaaatatagtgtgtggcaaataattcacaattaccaggcacacaaagagaaagacaaaatgaatgaaaactagcagaaacaataagcagtagaaacatatccacaggattatttggtattagaattattgggcacattttttaataacctggtgacttctgggttttttccattrctaagtagtttgtaatggactaaccttaccaaaatcaactattaaagctgccaaaaatatataaagtagctattgaaggaactggacagtaaccaatgtgggcgtgacttgagtagaactggacagtaaccaatgtggacattacaattcctgaaagaagggaagctctgcctttaccttggctcatgcctgagggtgtttgtggtgtgggagaatggattacaagtagaatgtggtggttttagtggattgaggagmtagtagtcagacttcagagmagccaatatacttgggacttgagggagaaaatcttggcgaggagagaattgaaggaaggtgaatcaaaaaatctgcatacaagctgggcacagtggagtgcagctgtagtctcagttcttgagaggctgaggtggagtatcactttagcccaggagttcgaggcccgcctggaacatagtgagactcagtctgtgttaggccattcttgcattgctataaagaaatacctgagactggataatttatagggaagaaagacttaattggctcacagttctgcagaccttacaagaagtatggtgctggtatttgctgctgrtgagggcctcagggagcttttactcatggtatacagcaaagtgggagcttgaacatcacatgatgagagcgggagcaagagagagagtggtgtgcggtacaggtgccacaaactttaaaacagycagatcttataagaactcactaycatgagggcagcacaaagccatgagggwtctactcccatgaaccagacacctcccaccaggccccatgtccaacactgggagttacatttcaatatgagatttagaggggacaacatccaaactatatcactccacctctggcccctcaaatatcatgttcttctcrcattgcaaaatacaatcatcccctgccaatagttccccaaaagtctcaactgatttcagcatcattcaaaagtgcaaagtctcacgtgagacaaggmatgtccctttgtattagtttgggttctctagagggacagaactaataggatatatgtatatatgaaagggagtttattaaggagaattgactcaccatcacaaggtaaagtcccatgatagaccgtctgctagttgaggagtaaggaagccagtagtgactcagtttgaatcccaaaacctcaaaagtagggaagccgactgtgtagctttcagtctatggctaaaggcccgagagcccctggcaaaccactgatgtaggtccaagagccyaaaagccgaagaacttggagtctgatattctatgggaggggctgccacaatggtctctgaaatgtctttgaggccttgttcctcttggctatttgtatttggatcctttttagttatgcacatctctctagcaagtggttactctatagcctgctggaatccctctcccaaagctttttctttccatgctgtatggccaggctgcaaattttccaaacttttacaatctgcttccctttcgaatataaatttcaactttgtcattgctttgctcccacatctgagcataggctgttacaagcagccaggccaaatcttgaatgctttgctgcttagaaatttcttctatcagataccccaagtcatcactctgaagttcagacttccacagatcattaggacatgaatagaatttagccaagctctttgctaaggtgtaacatgggtgacttttgctccagtttcaaataagttcttcatttcaatctgagaccttggcagcctggacttcactgtcaatataaatatcaacattttggtcatgctgtttacctagtctctgggaagttccaaactttccctcatcatcctgtcttcttctgagccctagaaacttccaacctctgcctgttacctggttccaaagtggcttccacattttcatgtatctttatagcaatgcccttctcctcagtaccaattttatgtgttagtttgttctttcattactacaaagaaaaacccaagactgagtaatgtgtagagaaaagaggtttaattggtttacagttctgaaggctatacaagygtagttatggcattcccttggcttttggggaggcctcagtgagcttttactcatggcagaaggcaaaacaagagcaggtatatcacaccactgcaaaagcagaagcaagagagagtgaaggagaggtgccacacactttttcttttttctttttttttttagacagagtcttactctattgcccaggctggagtgcagtaggacaatctcagctcactgcaacctccgcctgccaggttcaagtgattctcctgcctcagcctcctgagtaactgggactgcaggcatgcaccaccatgcccagctaatttttgtatttttcatagatacagggtttcaccatgttgaccagactggtctcaaactcccaacctctagtgatcctcctcggcctcccaaagtgctgggattacagatgtgagccaccgcacctggcctgccacacacttttttttttttttttttgagacagagtctcgctctgtcacccaggctggagagctgtggcaagatctcggctcactgcaagctccacctcccaggttcgcgccattctcctgcctcagcctcacgagtagctaggactacaggcgcccgccaccatgcccagctaattttttgtatttttagtagagacggggtttcaccgtgttagctaggatggtcttgatctcctgacctcgtgatccgccggcctcggcctcccaaagtgctgggattacaggcgtgagccactgcgccyggcctgccacacacttttaaacaacatcggaattccactcactaccacaaggacagcaccaagccataggagatctgcccccatgacccaaacacctccctctgggacccacatccaacattggggtttacatttcaacatgagatttaaagaggacaacatccaaactatatcacagtctctttaaaaaaatcttcatacaaactccaaggttgctagctaattgtaagctgtgaatgtatagaacaagactccaagaaacacagtagaaaacatcagctgagaagacaagaaatttatcatagagttttgtgtttgcacaaaagatggataatagagttcaagctctgccaaagtgttggggcctttgtaaacacattggaatttccgttgaaattccattccttaggaataaagatgatgttctaggaaagaggacaaaactaaaatagccaagccctaacaaagctcaaaccaatccttgataatggtgttttctgcctaatcaaggaaaacctaacacgttgagagaaagakagagagagaaagagagagggcgtattatccagacttcttaaaatagttcatcctcgaagtccaacattaaatttaaaaaattacaacacattctaaaaaaaaaataaaatatctgaaaaatggtagaaagaaacaggcaataaaacagccctatatttgattcagatattagagtttcaaatggatttaaaagtaactatgattactatgtccaagaaaacaaagaggtcattggagaatttcaccacagaactggtatttttgttttttaaaatgagtcaaataaaattctagaacaataaaaataatatacccaattaataattcaaatagctgcatttagtaagaggttatacacagcagaacactctaaccataacctaccattcctcccagaacttttgtacccttgtctatgatgtaaattaacttccgggtgtcttccatgtcatgctgccatttttgctttattgagtttcttctctggtagtttcctccttagaaaatttaagaatcctcagattcttgagagatcacatcctcttcatctccatcttcctcatttctactcaacaaccaactctgtgggcttagagcagggagcaggccacagacttatgtcttaattcactctctttcccttcttgctccattctttctaccaagccaaggcatctctatattacattatatatctttctttattctgtggtcagctttcacatctcttgatctgaaatgggcacagaggttctattttagaaattaaaaacctttttttgttttctttgttctaggatgcttattttctctcatcaaaccagtagcataagaattactgacattataaaatatgtttctgcaaacaatgcagcaataatggctgcaaaagtaaaatatataaaattttaaaatactttcctgccacatttggtgtatacttgcataggacatttttgatggaaggtgaaacccatagggtcataataaagtaaatttaaatttagatggtctttctttggcttactcctragatgtttgtttgtttcctatgggggatctacaaactaaaggaagagtttaattacacagggcatttgaattatacatcaaagtgatgctaaggaaaaagtgaggctgatgtcttcatgaggtattcttacatgatgttgcttattaattttatgagccaagaagttctttatgtaattcrtagtaaattttaagagaacatttttacacatagtatacaaagactgatattgatggaatctaaattatctagacagaaatctatgagcatatggtttactttggggaagataatggtgcatttaaaattacaaaacaaaacaacacccactttggcaaacagaactaactgagtttgggtagatgaaggctatggggaatccctgccagaggatgtgtacacttaagtccttagggtaactcaatattatcataagataaatacctcttaactttcattctaagtgataacacatttaaattttatgttttgttttgttttgtttatttaggtctcaccaaaactgaaaaaatagaatcagagatacacgttgtacgtggtgaaggttttaagactgttgcagcaacacgatatgaaacaataacagccatgaccaacctggccatagtaaactgtcaagtatatgggagaaatgcacttaatctgaaggtatgctagatctttttaatgacagtgccctcctgtattatcaattatttttgctttaaatttcccaatatagattagtttccatggtattgaggggaattttcctattacaatagagatttcttaggaacacattcaaattrcatctctaaacctatattcctagtttgccttcagtttaaaaagattctgaggttcaagtcaatcacagtgctttttttattacttagcataagagaatttgaattcagatttattgtatttttaagttattagcaatctttggttctgtgacaaatctagtactaggatggcttttcactgaacacaagctcaatatcatgaatagcaataatattagttatcatttgttaagtatccactatgtgccaagtacacattactcctaaaacacaattatgtaacgtaagtattataatctttaccctacagataagaacactgagccttaatgaaagtaacttgtataagatcacacagtaagcaagttgtagagcttgggtttgaacccagaactttctggcctcaaaatcaatgcttttttattttaagttttattttgaaataagttctaactcatagaaaagttgtaaaaataggaaaagctacagagagtttatttgaaaaattaggcattaaaataatattcacatatactgggaaatttggaaagccaaatgcatggctggggctagaaacattcttagaaaagacctgagaagaccctaagctttcacatttcgctgacctctaaatgcagtacaagcaggaagtaaaggctaaggtggttgtaaatggcctggctaagcattgaaggagtgccttagcacagagtcgatctgwaaagatgaagttctctctgtcctcctccctctgtcttctgttgtgtaaggaaatcatgtcaaaacaataactgaacacaagttaaaggagcagagattttaaagaaaatatatgtcaaagaatacagacttcacaaaaaaagtttagaaaattattaaacaacccaatagctatagctcatatcaagcctacagaaattctggagctgaaaaatacaataactgaaatgaaaacttcactggaagatttcaatagtagatgtgatcaggcagaataaaaatagaaatagaaaccaaaacaacaaaacaaaccccaaagagaggggaaaatgtgatttccagagttaacacataataattattaagatgtccagttccactttttaacaaaaattatggaatatgcaaaaaaaaatgcttgttcacagaakaaactaacagaagctctattttttcacgtcagatgggtaatgtgccaatgtcataaaaaggcttgagggaggcatattttattcatgagcataaaaagccaatcatcatgcttatgaactactaaaggattagaaactacttatgaggaagcacagacattggacttactggaaaaaggaccttaaataaactgtcttaaatatgttcaaactgctaaatgaaactatggacagagagctaaaaagaataatgtgtgaacaaagatttcaataaggagaataatgtgtgaacagagatttcaataaagagatggaaatgacaaaagaaaaaacacaaaacaaaacaattctggagctgaaaactacattaccaaactgaaaacttctctagaaagtttcaatactagaaatattgattaggcagaataaagaattatagaactagaaaatcggtcaattgaaatgatcaagtatgaagaacagaaagaaaaaaaataaagaaaaatgaacacaacctaagggacctctggaacatcatcaagtataccaacatacatttaatggggtctctggagaaaagaagagagagagagaggaaagggcagaaaaagtatttgaaaaaataatggccaaaatattccaatttgattaaaagcacaaatctatacatccaggaagctcaatcaactccaagaaggataattgccaagaratccacaatgagacatataatctaattgtcaaaagccaaagtcaaagaaagaatcttgacagcagcaatcaagaagtgttttgtcatgtacaagggctctacaatgaaawtcacagccagtttgttgccagaaactatggaggcaagaaaggaatgggatgacatctttatagtgctgaaagaaaagcaatctgtcaaccaaaagtctatacccagaaaatctatccttcaaaaacaaaggagtaattaagacattccccaataagcaaaagctgagggcatttgttgccagtacacctgccctataagaaatgctagagagttgttcaggctacagtgagagaacattagacagcaactcaaagtcttaagaagaaataaagaactctgatgaaggtaactacaaaggtaaatataaaagtcagtattattttggttatcggtttatattactttttctttcttatatcacttaaaagacaaatgtgtaaacataattataaatgtatattaatggacacacaatgtataaagatttaatttgtgacaaaacagaagggagatgaagccatataggaacagagattttgtgtgccattggagttaatttggtatcaatccaaactacattgttgtaaatttaggatgccaagtgcaatcccatagtaactactactgaaaaacaatattaaaacatacacaaaaggatgtgaggagggaattaatgtggcacactacagaaaattaattaaatacaaagaaggctgtaacgaagggaatgaacaaaaccaacaatgacaaaacattctggaaagggcaaaaatgtaaaggcagtaaaagtatctgtggttttcagggttgtggcagaagggaagaaaggatgaataagagaagcacaggtgatttttagggcagtgattctgtrtgatactgtaatggtgaatctatttccttatgcattttgaaaacccatagaatatataacacaaggtgtgaactataatgtaaactatggacttgggttgataatgatgtgccaatgttggttcattgattgtaacaaatataccaacatggtgtacaagttgttaatgttgggggaaggctataggtacatgtggtgaaggggtatgtggagaagaaaaatctcaaattaagaacttaactttacaccttaaagaacttgaagaaagagagcaaactaaatccaaagctaacagaaggaagaaaacaataatgataagagcagagataaatgaaatagagaatagaaaaacagtagagaaaattaatggaaacaaagataggttatttgtaaagatcaayaaaataaacaaatcattagmtagactaagtaaaagagagagaatgtacaaataactaacattagtcatgaaaattgaaatattacaactggccttacaaaaatgaaggggattgtaagagaatactataaataattgtacaccaatgaattatataacctagataaaatggaaacatttccagaaaaacacaaattaccaaaacagactcaagaacaaaaaaaatccgagcagatgtttaataagtaatgagattaaatcagtaacaaaaaacttccaaacaaagaaaaatccaggaccagatggacctaatttcaggcaaccctaatttcagacaaaacaggctttaaaccaacaaagatcaaaaaagacaaagaaaggcattacataatgttaagggctcaattcaacaagaagacataactatcctaaatatatatgcacccaatagaggagcagccagattcataaagcaaattattagattcctacaaaaagactgagactccctcacaatgaatagtgggagacatcaacactccactgacagcrttagacagatcatcaaggcakaaaattaacaaagatattcaacattggacaaaaatggatctggacctttacagaactctacccctaaaacaacagcattcttcccatttccacatgacacatactctaaaatcaaccatgtaatcraacacaaaacaagtctcagcaaatgcaaagtaattgtattagtacattgtcatactgctatgaagaaatacctgagactgggtaatttatwaaaaaaaaagaggtttaatggactgacagttccacatggctggggaggtctcacaatcatggcagaaggcaaaggagaagcaaagacatgtcttacatgacgataagcaagcatgtgcaggggaactgccctttataaaaccatcagccctcatgtgacttattcactttcagcatgagaaaaactcacccctatgattcatttacctcccaccagatccctcccacgacacatggggattatgggagctacaattcaagatgatatttgggtggggacacagccaaaccatatcaataaccaaaattataccaaacacaatcttggaccacagtacaatgaaaatagaagtcaagacttttaaaatcactcataccatacaattacatgaaaattaaatgacatgctcctgaatgactcttgggtaaatctgaaattaaggcagaaaagaagtactttgaaattaatgagaataaaaatgcaacatattagaatctgtggtacacagctaaggcaatgttaagcaggaaattcatagcactgaatgtccacatcaaaaaattagaaagatgttacattagtaacctaacatcaaaaccaaaagaattagagaagcaagagtaaaccaaccccaaagctagcagaagacaagaaataaccaaaatcagagctgaactaaagaaaattgagacacaaaaaagaattcaaaagatcagcagatccaggagttgattttttgaaacaaataattagtaatataggccactagttagactaataaagaagaagaaagagaaaatccaaataaacacaattagaaatgacaaaggggaagttactcctgaccccacaataataaaaataaccatcagaaactgctacagacacctctatgcacacaaagtagaaaacctagaagagatggataaattcccagacacatacatcctcccaagactgaaccaggaagaaattgattacctgaacagaccaataatgagctccaaaactaaatcagtaataaatagcccaccaaccaaaaaaagcccagtgctacacagattcacagctgaattctgccagatgtacaaagaagagcttgtactatttctgctgaaactattccaaaaaaattgaggaggargggctcctccctaactgattcagtgatggcagcatcatcctgataccaaaacctggcagagacacaacagcagcaacaacaacaacaacaaaactttagrccaatattcttgatgaacactgatgcaaaaatcttcaacaaaatactggcaaactgaatccagcagcacatcaaaaagtttatctaccatgatcaagtagactttatccctgggatgcaagattggttcaacatatgcaaatcaataaatgtgattcatcacacaaatagaactaaaaacaaaaactatatgattatctcaattgatgcagaaaaggcttttaataaaattcaacatcactacatgttaaacactctccataaactaggtattgaaggaacatacctcaaaataataagagccacctatgacagaccmacagccaacaacatactgaatgggcaaaaattggaagcattccccttaaaaactggaacaagtcaaggataccctctatctctctctctttttctttttttttttttttttttgacggagtctcgctctgttgcccaggctggagtgcagtggcacgaycttggctcactgcaagctctgyctcccaggttcacgtcattctcctgcctcagcctcctgagtagctgggactacaggcgcctgccaccacgcttggctaatttttttgtatttttagtagagacagggtttcactgtgttagccaggatggtctctatctcctaacctcatgatccgcccacctcggcctcccaaagtgctgggattacaggtgtgagccaccgcgcccggccaaggatgccctctctcaacactcctattcaacaaagtattggaaatcctggccagggtaatcaggcatgagaaagaaagaaagaacatccaaataggaagagaggaagctaaacyatccctatttgcaaatggcatgatcccatgtctagaaaacctcgtagtctcagcccaaaagctccttaagctgataaacaacttcagcaaagtctcaggctacaaaatcaatgtgccaaaatcacagacattcttatacaccaacaacagtcaagctaagagccaaatcaggaacacagtcccattcacaattgccacataaagaataagatctttaggaatacagctaaccaaggatgtgaacgatctctacaaggagaactatgaaacacaaagttcaaaggaatcagagatgacacaagcaaatggaaaaatgttccatgctaatggataggaagaatcagtattattaaaatggccatactgacgaaagcgatttatagattgaatgctattcctgttaaactaccagtgacattcttcacagaactagaaaaaactattataaaattcatatggaaccaaaaaagagcctgactagccaaggcaagcctaagcaaaaagagaaaagctagaggcatcatgctacctgccttcgtactatactacagggctatagcatggtgctggtacataaacaaacacatagaccaatggaactgaatagagaacccagaaataaggctgcatacctacaactatctgatctttgacaaagctgacaaaaacaagcaatggggaaaggattccctattcaataaatagtgctgggataactggctagccatatgcagaagattgaaactggaccccttccatacaccatatacaaaaattaattcaagatatattaaagactttaatgtaaaatgcaaaactataaaaaccctggaagacaacctaggcaatactatttgaggcataggaatgagcaaagatttaatgataaagacaccaaagcaattgcaacaaaagcaaaaattgacagatggggtataattaaactaaagagcatctgcattacaaagaaaactatcaacagagtgaacagacaacctacagaatgggagaaaatttttgcaaactatgcatctgacaaaggcctaatatccggcatttataaggaacttaaacaaatttacaaaagaaaaacaaacaaccccattaaaaagtgggcaaagrccatgaaaagacactccaaaagaagacatacatgtgatcaacaagcatgaaaaaagctcaatgtcactgatcattagagaaatgcaaatcaaaatcacaataagataccatctcacatcaggcaggatagcaattactaaaaagaaaaaaaaataacagatgctgttgaggttgtggagaaaaaggaacatttatacactcttggtgggagtgtaaattagttcaaccattgtggaagacagtgcaacaattcctctaaaacctaaaaacagaaatatcatttgacccagcatcccattactgggtatatacccaaaccaatataaattattctattatagggacacatgcgtatgcttattgcagcactatttgtgataacaaagtcatggaatcaacctaaatgcacatcgatgatagactggataaagraaatgtggtacatatacaccatagaatactatgcygccattaaaaagaacatgagcatgtcttttgtgggaacatggatggagctggaggccattatacttagcaaactaactcagggacagaaaaccaaatattgtatgttctcatttataagtgggagctaaatgatgagaacacacggacacatagaggggaacaatacacaccggatcctattggaaggtggagggtgggaagagggagaggattaggaaaaataactagtgggtactaggcttaatacttgggtgatgaaataatctgtacaagaaacccccatggcataagttttcctatataataaacctgcatgtgtatccctgaacttaaaagctaaatttagaaaaaaaagacctagaaaacatatttaaggaaataatggctgaaattttcccaaatctggagataaccagcagcactcaagtacaggaaattcaaaggtcaccaattagattaaatgcaggaggaatttcccaaggtacatcataatcaaattagcaaaaatcaaagagaaagamtatttgaagcacaaagaataaagaaacatgtgacgttcaacagagccccagtacagctttcagcagattattcagcagaaaccctgcaggctaggagagagtgttgaagaaaaaaaaaaamaaaaaacctctcaactgagactactatacccattaaagtgtctcttcaaacacaaaggagagataaagactttcyccaaataacaaaagatgaaggaattcataaacaccaaacctgtccaaaaaaatgctacagggagtccttccatctggaagaaatggaccctaaggtgtaacaagaaaacatttcaaaatataaaactcactgcttcaagtaagaaaattgaaaactagacaaattcrgaatatattaatactgtaattgtggtaagtaaaccacttacatcttaaatatgaagactaaaagacaaaactattaaaaacaacaattgcaacagctggttaagagataggcactatggaaggatgtaagttgaaacatcaagaagtcaaaatatgtagaaggtgctattaaagtgtggagtttgtttttgatgcttttccttgtgagcaaagtyaagttgtcatcagtttaaaattgcctattataacatgttttttgtaagcctcatggtaacctcaaagcataaacctgtaatagcacagaatcaaaacacattactagagaaaattacttaaacacaaaggtagtaagrgargtaaaaaggaagaaagtattcacacaataagcagaaaatgaataacaaaatgacaataggaaacccttacctatcaataaaaaccttgaatataagtaaataaataaataatgtaagccccagctatatgctgtctataagaaactcactttctctataaagacacaggctgaaaatgaagggatggacaaagatattccacgtaaattgaaaccaaaaaagagcaggagcaactatacttatatcagataaagtaaactttaagtcaagaatggtaagacaaggagggccatcgtataaaaaccaagaggacgggctggtctcaaactcctgacctcaggtgatccgcctacctcggcctcccaaagtgctgggataacaggcatgagccactgcacccrgcccttggttatamgctttaaagaatttgtttgctattttgcacatttctgccttaagactgtgtttctagcaactatttaaacttataaactcttcattgataaagaataaatcttatatcactaaaagatgaatatgcaataagatgttttcagacaaagaaaagctgaattcatttttctcaagcttatctctactacaagaaatgttggaaaaaaacctgaggagtacaaaaaaaaattataccaaatagaaacctagttaattaagaaacaatgaatagcaccataagtggtaaataatcagtgaatataaaggaccttttgaaacaatcttgaaatctctttaaaagaatactgattatttaaataaatacattaatcatatattgtgggtgttatagctaatataaaagtaaaatatttgacaacaggagtacaaaaggttggaaggggctaaatgtatatatctattgtaaggttctttttttttcttacccttttctatggtgctgatattgtaaggttctttaatcatgaagtagtagaatattttttgaagggtggttgtgttaaggcacatattgtgatccttaaagaagtcacttttttaacaacactaaggagaataacaagaaagtcatttttaaaaaatggtgtttgaacaaatcgtctgttcacagtaaagaaggcaagaaaagaatagaggaataaggctgagtgctgtggctcatgcctgtaatctaagtgctttggcaggtcaaggcaggaggattccttgatgccaggtgtttgaggacagcctaggcaacatggcaagaccctgtctctacaaattttctgtttagaaattagccaggaatggtgacatgtacatgtagttctagctactcaggaggctgaggaagatcataagagcccaggaatttgaggttttagtgagctatgattgtgccactggaytccaggcagggtgacagagcgagaccttgtctctaaaaaaagggggaatagagaatagaagaacagaaacagatcagacaaacagaaaacaagtaccaaaatggtaaactttagcctaaacacattagtaattttgttaaaggtaaatgggttaaacaccacaataaaaaaaatagagattgtcaaactggctaatgaagaaccactcaattatttgctatttactaggaagcgtacttaaataaagatactgatggttraaaagtaaaactggaaaaagataacagtaggcattataaagctcttatggctgtattagctgactaggtagaaaataatactaaagawaaagaatattaccaagtatagagaaaagtttgaaaatgtttaaagggtcaattcatcaagaacacagaacaatctaaatgtgtatagwtataattagaatgcctcaaaattcataaaccaaaatttgacagaactaaagtgagaagtagaacaattcaccatcataactagagattagacttaatatatcttgatcaagaattgatatgtgyagtcaaaaacaattcaataaagatatagaagatctgaaataactccagcgactaacttgacctaattaacatttatagaatgatacatccaacaactgcagaataaacattactttttaggtacacatagaacaatttcaagatagaacatttgttgggccataaaacctgtctcargaaattttaaaagattgaaatattgtagttctcgtaccacaacagaaataaaatagtcacartaagatatctagaaaagtaccaaatatttgtgctaaatattaatttaaatattaaaaagcactaagtgtttggaaatcaaacaacacactaattaaaaaataggtcaagaaagaaaacaccgaggaaatcagaaatattttgaactgaataacaatgaagacagtacagaaattggcatatttaacaagaagtttcagatagatgctagagtaacagatagaaatcagagaaatagaggtggagatataaaaagggggtaaagaaaataattaaatataaaatagattcaattatatttcagcacatagcaatgtttgcttgttattgattgaaataattctgtcacacgtgtaatactacacttatcacatacagaaatacttagtctgatatggtttggatctgtgtcctcaccaagtctcatgtcaaatggtaatctccagtgttgaaggtggggcctagtgggaggtgattggatcatggggatggatttccaccttgatgctgttctcctgatagcaagcgagttctcatgagatctgttagtttcaaagtgtgtggcacctcccccgtcttcctgctgctctggccatgtaagaccgcttcccccttcacctgctatgatcgtaagtttcctgaggcctccccagaagctgagcagatgctgccatgctttctttacagcctggagaaccgtgagccaattaaagctcttttctttataaattacccagtgtcagatatttctttatagtagtgtgagaacagcctaatacacagtgcttctactttgcttctatcttttacataccaaagaaattattatcatgacagactaaaaaaaaatgaatggacgaggagtataggcttgttagtatattgtgtaaaacattctcattcaaattatgtgctgattttgttttacycttgtataaactattttgtgccttgttagtgattaacaccttatctcttgtcactttcttttagggcttttttatcctaaattgtccagacttaacacctttggctttccagttgatatatcttaatttatcatttaatgatcttcattactttcccacagaagtgagtcaacttttattgttatgtactgatataacttgtcgtgaataataattataataaaaatagacgtcttttaataccttgargttactataaagtactgtaaatgtattttggattgcatcttttgaatggcttattttcagaagcacaaaatgtacagtacatctttcttaggaaatcccatgatgtaatcctcaaagactatgttatagtgagactctcaaatgtgttctcataattctataatgtatattaaatatttattcttctaactctgaatgtaatctaaaataaaccttatttatgtgccaatcagaagctttaaaaacaaagtaaacatgcagtgttgtaayaagttttaattaccaaacgataaaatataatattctgcttaataaaatgtatgaaggataatcagatatgagatgagctaatttaatgtcatttcaagtgaatgaaccattatgagtgattaggacaaattacgtttttcgtgtctttagtcattgcttcattgattactgggtaattggtggttttgtgaattgatttccagagtattgtcttttagtgagtttatttttggcaaatgtattttcttctttcaatcagatggtattgaaaacatatattttccatactttctctataatataatgtttttattttcaattggagaagttatttcttttctaatacataacaccagttttattaatttgactaggagaaattgacaagaattcccaaggaatatagygatctgagttcttcacactaatttaacctttcttctaagtagatacagataatatttgtgtatctgccaaagaaaactccatccactaaaaaataaatgtgtgaagacaggagagctagtcacttgkaagatataaagtgctcattgttaaagtgacagagatcaacttgtcattaaaatgcaggtctgtgttatatagctatagataaaatattccaatgaagatggtaatatctaagcttagagaggctgttttggggacaggctaatgaggcccagttgttagcatggcataaaggcaatgaataaaaggctggggactgaggtaagtggggtgattcaaattattaccgatttcatggaaaattcaaaatggttgaatyaggcaaattgcagtgtccactaaaatagtttcagatgggagaaggtagaagcagaaatgttaaataaagaagattaatatagcaaactctatatacatatacttggtcttcttctctaagattcttaaacagtcataaaatcatagtaataagtataataatgtattgttaggtctgtaacatatatggatatgatatatgtagaaattatagacaaaaaaggaagaaggaattgaatatgtatgaagaacattttcatatctcactggaattaagttagtataaatctgaagtaaattctgataaggtgtatattataacctctaaacaatcactaagaaaataactcaagagaacatactgaaaacatttattgaagtcataaaatgttacactagaacatattcacttgatgcaaaaaaaggcagtagaggaagaattaaaagaacatatgacatatagaaagctaaaagtgaaatgacagatgtaaatccaatcatgtcaataataacattaaatgtgaatatatcaaacaatccaatcaaaagatacagatagtcaaactgtacaaaattatacaagttcttatacagattcaatgatacgctgtctgcaggaaacacacttaagattaaaagaaacacacttaagattgaagaggttgaagccaaaagcatgagaaaatatatatcatgcaaacagcaacaatagaaatgctggagagactatactaatatcagacaaaatatattttaaagcaaaaaaagttactagagataaaaagagacatttgtcaatttatcagataatagaactttataaacaaatgtttatttagtaacagagccccaaagtatatgaaacaaaaaccaaaggaattggaggaatagaaaatgcaactataataattggacacttcaatatcccactttcgataatgaatagaaaaattaggcagaagaacaagagggaaatagaagaattgaacaacactataaaccaattagacctaataaatctgtatggaatgtattagggtctaactcaaaccaatagcagcagaatacacaattcttgagttcatgtagaacattttccaggataaatcatatgttaggctacaaaatcagtctcaataaaaggattgaaaaattacaaaagtctatttttggctacaatagaattaaattataaaccaaaaactgaaagaaatttggaaattcacaaatatatggaaattaagcaacatactcctaaataaccagtgggtcaaagaataagttataagtgaaattagaaaatatttttagataaatgaaaatgaaaacacaacataccaaaatttctgagatgcattacagagtactcagagggaaacttatagctgtaaatgtaaatcttttaaaaaagaagaaatacctcaaactaacttttcatgtaaagccactagaaaaaaagggcaaactaaacctaaacagagaataagcaaggagatagtaaatattagtacagaaattagtgaaatagaagatagaaaaacagagaaaatttaaaaacagaagttattacttttaaaaaatcaacaaaattgacaaactttacgtagacttaacaagagaaaaagacagaagacttatgttactaaagaccaggatgaaagaagaaacatcactactgaccttaagaaattaaaaagatttaaagaaaatactataaataactgtataccaatcaattaaataacttaggtgaaatgaacacattcctacaaagacacaagaaaggtctttagaaaatatgaatggctccatgatcttaaaaattatatagaaatgcaaaggattacaaagagccaaaataattttgaaaagaaaggcaaacttggagcactgatgcttcctgattacaagaatgaacttgctctactccaccaattttggacctttatgatgataacaaggttgaatttaatattaaagagaactaatataagaccttgttaatattcaccagagaaaaatatactaatcaagtaaagatcatagattatttctttgtttttctttttaaaatttgtataaatttaagaggaagataatagatttaaatggtttactctattttttaaatttcacatgaaaaatcagtgtacctgaaattactgggatgtcagaaataatctggctttgatctctaacacttttctgatcactaaggttaattccacctttcttcctggttctgcagatacctccttcctccctcattattccgtgatttcctcgtatgaaaccgtgagcttgatcagaaagggtaactttcacacttaggaaagcaccattcttgagtcaagggtgtatgagtacagtggttgcactatttcaccatatcatacctattaatgctggtcacttgttttgaaggttgaccgagggtgtttactgagttacatgatatagccaattaatgttgctataatgattctacattagttcagagagtttataaaaggtaacaaataatgatttgcatactttattattccgctcatgtttgtttctcttttctgttccccagatattatgtcttaaaaatttacaaatactgaaattgagaaataatcctatcaaagaaattccttctgaaattcaacaacttgagttccttagaattttcaccattgcttttaatttaattactgttcttccaattgggtaaggttgatggtctgagattataaacacagaaaataattcataatttcgaaaaagatcaatttcccctttcaaagcagctagcagctttttggctatttagtaatttgtattctattctaattagctaatacgcttcttcttatggtgttaaaaacaatcctaccagctacatacagagcaattaatatgggtctagtgactatacatttagaaacacgttatctgagtacgggttaaattaacaggaattatctaaagcagttcaggtgagagccttgcacctatctcttgacagcctttttggatatggaaagagcactgaatttgggatgaggaaatctagtcctttgactttaaarttgatgataattatatatttgatctggagaaagtaatttaaccattcttggcctcaatttcctaatctgtaaactaaggagattggcttatatgatatctaagaccctttcaactccataagaatgctgatatttggacataaaagagatgggtttcttcccacgtatggactagtaattatttaactcctaatgaaaattttaaaccaaaaccttaaccamatgtcaaaacaagatacttattccaatcagagtttaacaaattgaatctctcagtacaaagagaaagggactcataaatagttgaataatactttgcaaaataagagtcttatctatagtaattaaggaagtgcatccaaattcatttataaagatgttcattcagtattgtttgtaattaatgatctaaaaaattgtacattcataaacattcagttatttaaaagaataagaaattatattaaaaaattataccatttctgtataaaatgcatatacatatcacacattacacactacatatataaaaagaaagaataaacactaaagaagtaagaatgttacatatgggtattttatttctgtttgactcatccggatttttccacagtacataaactgtattttccctgccctgacactatctgccatttctctaaggaaatcctgtttccttttattagaaaatagtgtttaaaagccaagatctgggtgttgggtatcctcatcaccattaggttatcattccttctagaccctctcattggagagagcaaagtaatatatgtatgtatactaacccatgtgtacacacatatctgtaattgtttatatagatacaaacacatatacaattacatatatacacacacagaactatatatgtataaatatatatgtatatatacagcatctaaacatgaattcctactggataatctataatcataattatacattttcaataatcataactaccatttaaacaaaataaaaattcctaaagcaagtgaaatgtgattataactaaaaggtcaacattttgttcattgtttagatattggacaaataagtatgaattgttgattataatcaaaaagtttgcagaagctatttttaaaaactattagtgtttctgaaataaagcggcatatttttattaaataacataggatatgtatgcatatcaggggaagaatgacagcatattaaagccaagaatgaaaaacataatggggaaaacttaactttattgacctcaaagaagacttcaagcaagctctgacataataaaaatgtttatttgcaaagtttgttcaatgaaaactcaccaggagggcacttatacagtgaagaatgaaggtgctgaattcttcatatctaagggttgttgtcagaaatctaccttgctgagcaaagaagacctcacggagtgtggtgagacttggagatcagtaactgaattaaattgagtgaaatttagtgaaccaaaccattatgtaatatatttgagatattctggctccatgtaaattctggagtttggacattattaccatcacaagcaattgcactgatacactttgaatgttatactttcattcttgtaattaattcagcagatgttcatgaagcatctattaatactgtgtgctcctaggagctcaccacctaaaaggaaggcagacaattcaatacaattgagtaaagtaaaataatggwgatgtacacagtaaaatgtatgagttacatgtaacccattctgaagggtgagagttggttccctggaagatgtagtatttgatccaaagktgactgagtgtgaattaggtggattaaacaggagagacaacaaaggatagttgggccaatgatagggtggatatttcttcaatgaaaagttacaacgtatatgaaaagaagcagcatatataacatgagatgggaaatacaagcagtttgctggttttgaagcttagagggcaatgccaagtggtaagaaatggtacagtaagcagggaccagattatctaggaagccttatgagctaaggtaaagaatttatgctgtatgcaacaagaaaccattacaggttttccatatgtgagtggtagagtcaaacttatattttacgttattctagtggcagtgtggaggatggatgtgaggggataaacagaattaaaggtgaccagttggaaggccattgcagtagttcaagcaagagatgaagagaacttggaccaaggcaatggtagtgagcatggagaaggaggaacaaattgttatgaaattgaagtaaaacctgcaagatctagaactgagacatagaggctataaggaacagaaaagtcaaagtaaaaaaaaaaagtcaaggtaatgcccagatctctagttagagtgaaacaattcaatcatgtaaaatgtatttattgagtatttactaaatactgggctctgtcctaagcattgggttcagattgttaaaggaaaaggggcatgatcttttcccttatggggcttagaatccagagcacgatacaggaattttaataaacaccataataaatatatgaatatataaatataaaacattctaagggctttgactgaaaagaacaatatgatgtcaggagaaaaaaaaattgartcactaagaaaggtgtatctgaggaaatgacatttaagcagaagtttataaatccagtccaagaataagaaaaagaatattcatgcagtgggaataacatgggaggtaatgagagcttggactcctcaaaggctgacaggaagccagcatggcttagaataaaacccaggtgaggtttaggagttggatagggactacatcccatgaagctgtgagggtcaggtgaaaatatttataatttatttaaagtgcactgagaagccattgcttgtttttaagcacaagagtgacaatgaaggctgaggaggtttgaatgaaggaaaataatkggttttgttttagattaacatgttgattttagatttctgtttttcatcacaattctggacctagacctattaacctcacaggagagttttgtgctggagatatttctggagaaacatctgtgtttcaaatacagacagataaagaaattataaagactgaggaaaagcctcaaattgcataaagagaaccaagagtatcatggaagccagggaagtggattattttgaaaaagaagtatgaccaacagtgtcaaatacaacagagaagctcagtaagagtaaaggtgagaacagttttagtggaatgatggaaataaaagccagcttgcagtgggttgtgatggaatgggaagaaattggtgataatgagtgtagaccattctttgtagagctttagatgcaatgtgagaagagtgattagacaaaagctatagagaaagtgggatcttagaaacatttttattgttagttttttaaagactcgggcatatttacaggatgttggaaagaaaccaatagggaatagattgaagatgtggaaggatgacagatgaagcagaatttcacaggagatgggaggggaagaagtcatcagctcaggtggagattctggtcttgaacaggaggagtaaccattatctcctaaaactggaggtaggtcctaaaaatgaacatgtaaaatatatagttatatgggtaagaaaacaggaaattcatttagtcaacaaagatttatttagctcctataatgcatcagttgagagaggttactatgaaataacttcagataatctttgagagcaagaagaataatgattgaaaagaagttttaaagaaagttgtgatgatttagtgttgatattgagaggaacagaaaagaacagagcacaggaaagtgaatgtttgagagatgatgctgtgggcttagctgagactggaaaccaaggattcatggtgacacgaatctgcatttctgctgattatcttcagtagctcagtcattcatgtgtaagatggagaaggtagattttagcctccataaaaagacttctttgggaatgtccatagcagttttatctgcaatatcctgaaaaagtctgcaattcaaatgtccatcaacaaaacagtggaaaacctaattgtttttattcgcaataatcaaaaggtggtaactcaaatgtccattaacagattaattaatgaataaacaaaatgtgatatatacatacatagaacattattcatcttgaaaacagaatgaaatgctagtatatgctacaacaacaatgagccttgaaaacattatgctaggtggaataagtcagatacagaaggataaacattgtgttattgtgcttatataaggtacctagaatagacaaatttacagacacagaaagtggaatataggttactgggggctcaggtatagcagagaggggagaattgggagtagctgttcaatggatatagagtttctgtttgggatgatgggaaagttctggaaatacatatagtgctggtggttgcataatactgtaattgtaattaatgctgctgaatggcacacttaacaatggctaaaatggcagattttatgttatctatattttactataacaaaaaatacatagagcctgggcaacatggtaaaaccccatctctacaaaaaaatacgaaaaattagctgtgcacagtggtatgtacttgtagtcccagttacataggaggctaaggtgggaggatcacttgagcctgggaagttgaggctgcagtgagctttgggcaacagagtaagaccctgcctcaaatatatatatatatatatatatagttattagtaacctcaatgctttcatctttcctcctagtcttccttctttctaaaatttttaggtataatttatatacaataaaatgcacaaatcttaggtatttgatttaaagtgtttaacaaatatacgcacccatataactactatccaaaacaagatatggggtattcccattatcctagaaagtttaccctagaaatgtccccatgtacatttctagtcaattcccagacttctaacatcatagacttatttcacctgttctggaaaattataaaagttgattgatacaacaaatgattttttgagtgtgacatctttcactcaacatacattttggggattcacccatgttgtatatatcagtattccattcctttttaatgatgacctcatgtcacatggcctcagccatttcagcaaagtcaaaaatagaaatgggattaactaggaacgaaatttgtggacaagtcttttgtcttatggaatgaatacccatgatatacwtgggaaacccactaggttcttgaagattttatactaatagaaatgttgccagagtgtattaagaaggacaaagacagtatgaaatgaaaaaaggctgtcagatctccaaaattccatgggcaggaaacagctgaatatatgtgccaactttcatgaaaaagggagggtgattcagagggtggtgccaggaactggggaggatgaaaccaggagcaccgaaggtggagctgtgattctaaaagacagagccagaagccaggagggcagaaactggaaagcaggtggcagagctgggagctgctgctgattattcccaggccttgaaaccagatgaagtttactcagtcctatttcaaaattgcttggaattggtaattcctgtttacctttcattttctcccttttgaaccagaatatctataacttatcctatgcctgtctcaccattgtattttgagagcagataacttgtttctttaatttcatagatccacaaatggagaaaagttgtgcttctggatgggttatatctggagcctcaccyatacctaatttagatgatgagatatgggacttttgagatttagatgagatgttgaactttgagttgatgctgtaaaggttaacctttcgggaaattgagataagtgaatgtattttgcatgtgggatagatgtgaatctttagggatgaactgtgatagggcgaataatggtccccaaagatgttcatattctaccagaacatgtgaatatgttatmttacatggcaaagggaaattaagtttggagatgaaattaagggttctaatcagctgatcttaaagtagggagattattctggattagttgagtggtcccaatcaaatcacatgagctcttaaaaatggaagggggatgcagaagcatttgtcagagagataccacctgaggacttgacttgcttttgttggttttgaagwtggaggaagggagccatgagtcaaggaatgaggcagcttgaaaacctgggaatggccttcagcatacagccaacaagaaaacaagggcctcagttctacagccggaaagaactgaattctgccaacagcctgcatgagtaagaaaacagattctccctagagcctccagatagcaatgcagtcctgctgatgccttaattttagtagagtgagacctttgcagacttctgacctatataactataattaataaatctgagttgttgtacgccactgtttgtgttgcaatttgttaatggcagtaacagcaaactaaaayaaaaccagtcaaagatttcaactcttgtgggatcacattcccccaggaggagacagtcaatatatgtaataaataaattatatagtatgtgagaaggyaataagtgatatgaaaaagaacaaacagtaaaagggagtgagagtgtgattttaagtgggrtagctaaggtaggccttattgagaaagggacactggaacaaagtgggggtttgtgatgtaaatttagcagttcaagtctaatttaacagtattttattaaataaaacaattggttactcaatttgtttgaagccctagtgttaggatttaaattaagatacatattttttctagatattatctaacatagaaaaatggttgtttattttggtggctaagcattgtatttaaaagattgtctttttaattcttttcattattagtctttttcttatagtttccatatgttaaaatatgcatatattttttttcccagatatattattttggtaccttctcaaagttttactaaaagtgtaatggagtactttcactgttatctttccattcctaacaagatctttctagtttcatgagactcaaagtgatagagtagaaaaagcaagacactttcagaggcaagttctgtcccatatatgctacaaactctagcaagccagtgacctactcttttttttttttttttttttttgagacggagtcttgttcttgttgcccaggctggagtgcaatggcacgatcttggctcaccacaacctctgcctcctaggttcgagcaattctcctgcttcagcctcccaagtagctgggattacaggcatgcgccaccatgcctggctaattttttgtatttttaktagagacggggtttcaccatattggccaggctggtcttgaactcctgaccttgtgatctgcccacctcggcctcccaaagtgctgggattacaggcgtgagcccccgcacccagccctgacctactcttaacttcagtttccatctgaaagtttagaaaacttatacttgtcttcaaggatgttacaaaaattaggtaagaaaatcttgtaaattggctgggcatggtggctcacgcctgtaatcccagcactttgggaggccggggtgggcgaatcacgaggtcaggagatygagaccatcctggccaacatgrtgaaaccccatctctactaaaaatacaaaaattagctgggcatggtggcgtgtgcctgtaatcccagctactcaggaggctgaggcaggagaatcgcttgaaccaggggagttgcaggttgcagtgagccaagatcacaccactgcactccagcctggtgacagagcaagactctgtctcaaaaaaaaaaaaaaaaaaaatcttgtaaattatttttaaaatcctttcaattattttcacagattagtctcttttccttgacctaaatttctaaaataaaataaaatatgcaatatttttgaaattatgtaacaattgattgtttcaatatagggcaaattagaagttaataaagaaaaaagttctatttgagtaaagcacacatttmctgaggcctacattttygttcstaaggttttgctttgagcaacttagggcatactgtgtgaggcagcatggaggcaggaaagctcagcttctgtgggagaaagaacaggggcctcctattagtggccagtggatcaacactcccatgttatgcttagaactttattactatgaaaagctctttgatttgtcttttcaactctcttataaaatgaagataataaatcacttcaaaaatccaaatgtttttttttcctgttcccaaagcttttgtagaaaagataaaaaagggagaaaaagggaggtgggrtraaggacagagacatgttttagactcatgccctgaggttatgcagaaacaactgtcacaaaggttaaaacaaaaartctttatctttttctcagtggatagcaggagaaaaatgacayaggaaatagctacttcaactgagggagtcaaatctttgccttacttgtttgactcaatttactttaattggcaggtaggttcttcgggaaagagaaactatttggaacaaaaagaaccgaacagcctatttgaaagccstgtcttaacagcagatctgaaattgtacacatttattttcccatattgttatttattaaagaaggggattaaattaccttgcctccacatatctgatgaaaagggatagctacattttatttcataccaaattggatacattgcttaacctcttatagcttccatttttttaacctgtaaaaaacaatcctacactggtatgttaaaagatcattctaaattaccatatagtaggcttttaataaatatttatatcagtgtggtggtcatcactgttaatacatgaaattattattgctagtctaatcttgcaagctaacagtagggctctagtttaggcagctcattggccaataatttgctaataaatcaagcaatgaaataaatgtaaaaagttttacatatcctaaaaaatgtgatagatttggtactggtgggacatagagtatcagaccaaacaggctgtctgaacagattttctctgtaaaaatcatatatagatgacataaatttcaactctagaacctattcagcttcctcagtgctgcctacacctgttacatctcacaatcagcaggaatatgtcatccatagtgaaagcctggaaccaaactaggttgccagagccaaggtaatagggaagatagaatgactccagaaactgcctgaggcaagaaaatgatatgatattgaattgaaagatagagcaaatggtattaacattttctttacagagatgataagaagtcagagatgaacactgaattgaataggcatttcctttgttttcctagtcagtctcattaacttctcagagcaaattattttaaattaactggggtcaccattcctttcattcagttatgatttactcagcacttacgatgtactagacagcatgtaaggcactggatgtatagaaatatgaaattgaatccgtgccctctagaagctcataattttaggaggcagacgtttattgcacgatgtgatgggtactatgagagagtaagcagagaagtacagaagaggcatctcacccagtctgaaggatttgggaagagtttgttggaagagatgacatctgagccaagacaaaaaatgaaaagacaatgatcagagtcaagcttggggaaattttacgtgttatttagagatatgtgataactggttaattcagggaattttagcaaataaatgctggaccacagaggaatatgggggattgtgagaggcaagctggacaagtagcatgggaccagatcatgaggacctttatatgccatgttaagacagtaagaagttggcgaaaaattctgctcatgatgccttagttaaaaatcatacaaataacttctcaccttttatttacatggaaaacaagaaagtctttgagaacagcacatacagagaagggggtgtttactagggattatgatgactatgatactgagcccttcaattccagtcttcaagaagcaattcccacttccatccaacccctaggagtcagggcttctgacagcacaactatgtttttgcagagtgtttgtattctttggttctcacctttaagtacttgtcttgatggaaagaaagattaaaggtattttactagaaaagtcttaatgcaattgtagtgggttgaatagcatccctcggaaattcatgtccttatagaacctcagaatgtgacctcatttggagatagcgtctttgcagatgcagttagttaatataaggtcatacttatactaacttggataagggtgagccccaaattcaatggctattgtccctataagaaaggcatgtgaagacaaaggcagaggttggagttatgcttccacaagccgtggaatgccaaagatggcaggcaaccactggaagctgggggagaagcaagggacagtttctccctcagagcctatgaagggaaccagccctgctaacaccttcatttcgacttctggcgccctgaactgtgagaaaatacatttctgttactttaagccacccagattatggtaatttgttaggaaactaatgcaacaacaacaacaaaaaagtatcttagtgataatgaaaatttttctaaatagggctttgtccactccaaaaatctcaaactggtcttaatggatagatgagtaattcttaggaattttcatagtaattacacgatctataatgaaaagaagtccatataaatttcaagatcttagaaatctggtttctatactcctgcctacttactcaagtacttatttattcccagtggtgatacataatcatttctacaattaattttctctttctatttaaggttattttccttgtcttatcttgaagaacttgatgtttcctataatgaacttacttttattccaaatgaaattcagaaactcaggtattttggaagtacacagaaagttatatgccccttaattatatatttaataatgattgtgatagagaaaatcgatcctttcatttatttaatagccataaaatgtaatctgtgaagtacaaagtttaccaaacatgtaatttgaatgattggtgtacagtatttttaagacataacatttccagaaattatttaaagaaagtgcagatgactacttaacagaacgataagctacttatgtccatttgtctgtgtgtgtacctgtggctcttattatgtttcatttattttttgtgaggaaatacatttacgcaaaatgctaataatacaaaatataattttaatgcaaagcttcaattctttctaacattaataaaagtctgaagtttatctatgtccttctaggtcagtactatactgttttgattgtgacttcagaataatttttaataactagtagggagattatttttcagtaatagtctcttaactattctctttagaacataatctttcagatcattttgtataatttctagcacatccagcagcacacataatcacagagttagaattttaattgcaattgcatagagtttactcataaatttgggagaatttatatttttgatcaatttttctactctaaaacttttttttcattttttcagatcttgttttatgttcttcataggaatttatgactcacgtcatatttttcttaataaccttttctaagtgttttatgattgtgattgttactatgaatgtaatgtaatatttctcttatttccacttgtttctaattattgtcagtacagaatagagaaaaactatgtacttctttacattaacttaaaactaatgtgtgtaaccaagttcttctgttagttctgatttagttttactacattttattttgtttcctaggaacgtaatcttccatttagcagaatgagataattttacctttgcttttaaaatatttagatcaattatttaatttcctatgtgacaatctctatattttagtaggagaattcagtctgttcatatttattatgaccaacatatttaatttttgcttttcattttactttgtacttattatttatttactttccccttttcctacctatttttttaaggatgctgtttgttctctttttaaatttttgaattttatttttaatttttagagacaggatctcactctgtcgcccaggctggagtgcagtggtatgatcatagctcactacggccttgaactcctggactcacaattctcctgcctcagcctcctgaatagctgggactataggtgtacaccagcatgcctcgctaatttttttatattttgtagagatgggggtctcactatgttgcccaagctggtctcaaactcctagcctcaagtgatcctaccacctctttttttctatgttattaattttggcattctattgtactaccctaatctgctatttggctatctttccttttcccaaactcataatcaaactcattttctttaatattttataaaggcaatataaaaagtacttcccccaccatgatggtctgtctccccactgctgccttccactgttcgttgagacctttagaacagttattttctttggaaagatgctttctttccaaactcatcttccccttatccaactctaggctttgctgaaatagtttagaaacttttgtttcagattctcattagtattttcctttgcatcatgtctctttttattaaagaatgtttatttagcacttaaatcttacaagcattttagttcattctccttttatatttatctgtatgtatttcaagactcactgtttacagctgtttcgctcctttcctctcacctggaacctggccgtgtctcttttgattcattggctgtttagcgtttttccttaagtattttcctcagatggaatacataggtaattttttctctgaatctttaaccctgacaaataaatgatgtcctgagtgagtggacaagctttcattcagcgtgtttcacagtagcctccatcattgtgtcctcctctagtttccagggtgctggggaggcacctgatgccagtttgattcttttttcttcctaagcgacttttcttcttgactggaaagactaagattctcccataatctttgacctttcagaattttatgagattacgcttacaagttgtctttttcttaagctgtctttcccggaattcagtgaattatttgaatcagccagctcaaacttctcttttctagttcagaaaatatgtttaaatagttcctgtccttctccatctgtttcgtattttcttcctaaaatgcctattgtttacatgttaggtctcctagatctgtcttccatggtacctagatttttcctcatggtttttatttatttatttatttagttagttagttagttttgaattatttcttctacttcgtctttgcctctaatttggatccccatgaagatcatgttcttctttcattcatccacttaactttttagttttacacatcatgcattttggttccagaacatctctgcgtgtctgtgtgtgctgtatttgaatcttgtttccccacccccctccccaactttgtatccatccctccacagaagatgcttgtcccaggacctttgctttgtgtgttctatgtgtttttctcttctggccactctttcttccatgcaagtccaatggcagtcacataacaccactcagaatgctaagaaagtgagtggtggatgaggaggaagcttctctgcacctcagggtgctcagctgccaaggcagtctcaacacagagctattctagctttaaggatggcttagcagccaggtgcagtggctcacacctgtaatcctagcactttgggaggccgaggagggtgtattgcctgaggtcaggcattcaagactagcctggccaacatggtgaaaccccgtctctactaaaaagacgaaaattagccaggcgtggtggtggtggatgcctgtaatcccagctactcgtgagactgagtcaggagaatcacttgaacccagggggcagagcttgcagtgagccgagatcaggccacttcactccagcctgggcaacagagtgagactccatctcaaaaaaaaaaaatgtttagcctgcctagctctcttagaactcattgaggggaaggaggcagctaaacaggtgtgtcctccgaggtaaaccaactcaggcagggagagcctcaccatggctattcaggtgagccatggtgaaccttcactagcatttgcctagagtgtgccacactcattctgattgtccacatagaatttgtatttctcagcttgggctactataacaaaacaccataggctgggcagttataaaaaacagaaatttatttcccacaggctgggaagtccaatatcaaggccccagcagatgtggtgtctggtgagggcccacttcctcatagacagccatcttctcactctaatctcacatgacagaaggggtgagggctctctcaagtctcttttataagggcactaatctcacgcatgagggctcctgccctgatctagtcacctcctaaaggccccacctccaaataccatcaacttaaggtgaagatttcaatatttgaattttggggggacagaaacattcagaccagagcagggctctctgctgccggcccctaggcttgtgatttgcgcagaagaaaaaggtgacc

SEQ ID NO: 8879 - DNA, 15043 bp, Homo sapiens
tgtcctggtctaaatgttcttgactccttaatctcttcaatccctttttccctgagtggatgtgaatactacagggagctccagctcaggcctctccctgacagaattcagattccaaggactctcttaacagagttgcaagtagggatcatgccaagcccaatctaacatgccatgtctctcctgctatacagggcacaggttccctaagtgagagctccatcccctctgtctctgacaccagcaccccaagaagaagtcgtcggcagctcccacccgtcccgccaaagccccggcccctcctttcctacagctccctgattcgacacgcgggcagcatctctccacctgctgatggaagcgaggagggctccccgctgacctcccaagctctggagagcaacaatgcttgcctgaccgagtcttccaactctccgcacccccagcagagccaacatgcctccccacagcgctacatctccgagccctacttggccctgcacgaagactcccacgcctcagactgtggtgaggaggagacgctcactttcgaagcagccgtggctactagcctgggccgttccaacaccatcggctcagccccacccctgcggcatagctggcagatgcccaacgggcactatcggcggcggaggcgcggggggcctgggccaggcatgatgtgtggggctgtcaacaacctgctaagtgacacggaagaagatgacaaatgctagaggctgctcccccctccgatgcatgctcttctctcacatggagaaaaccaagacagaattgggaagccagtgcggcccgggggggaggaagagggaaaaggaagatggaaggacaccatgcattatcagagaagaggaagtaaaggacaatcagaacaccagtcaaacccaccaaattgctttattcccctttgcaagatgggcactgccatagttctgcctctttgctggggaaagaaaccaggaacgtggagggttattactgcgggagaagggacacgaggatggctttgcttccccttgccccttcccacttttctaaaagctgtggagggatctagctggcctatgtctacactcagtgccctgagaagcctggaagactttctggctcttaactggggagtagtggagaccataggagaggactctcctccctcaccagctcttacgcctcagccagcaccactgccaccagggcaactgcagcagcatctcatgcataaccctgtggcttgcttcccccagggcagcacaggctaagtcaggaacatcggatgccagggagggaggagaaagccgaagcgaaaggggtcagggtgctgaggcaacagcagcaagggctggtctggacaagaaaagccatagcccggcagcccctaccatgagggagacagagaaacagaactggtggtgctggggggtatagccccccatccttgaggcctgtcacccacacagtaggtgctgagagttaggacaggtcaggaagtcccccagggtccacaaaggtgcctgaggctctggtaagggtgaagataaaagtatttaacaaccgctatggcatcaatgtaagtggagtttggtcctagtgccggagcccatgctattccaggcattggctctttagatgccagtcatgggggaaccctgagggtgtgggtagagtagcaggggccacctaagagattaaaaacagagtctgttttccaaccagtgtggaagcaattaaatatacgtaacagtgctacggccacaccagcacctcctggctgaaggtcagcccacactctggtccatgaggcagcaaggccagtgctgtgccaagcccggtaaggccaagtgccgaggcccagccttccctgccactcctctgagagggcagaacacacatatccaagtaggctacccaccactgggtagggatttctgtaaagatgggaaaggctgatagattgaaataagcttctgtgaaagtctggatttactgaggacctcccctgaggagggaccgttgggaccgcagattctgcagctggtgtggggttcaggtcagtttgtcaggatgctttaaggtgattagtaaatatacctcagcttagacttgggctgctccttctagcaaagcaggctccagtggggcctcatcatacaggatgacaagactggggccctgttcaccttgaacatgcccctgggccaagatggggcttcacccctccccagagtaagagctggggctgacagtcccaccctgtcattcctaatagcccaaacgcagaagcactgagcaagagagccctttcttgccaagccagtgctcttttggtatatggcatacagctccattggaggggacacatcactggctttatctggtggaaatgtacctttcccttaagttcctccttagtgccatcacagcaggtgaatgggtgccctacggggccctccttcccccaccaggaacagatggaacctgccacccaggatcctgatctgccctgcactgagcactcagtggataaacactcctccagcccagacacactcctcctcttgggcaggagcaatccagagttgttatttttcttagaaggagcctcttttccctctattttttaaattgaaatataatagctgcatcagccctgaaaagccaaattcaaccacatggctggagaatcatttgtcatggccccgccttctcttctgatactaatggagcttcatgacccacggtcagcccccaaaccaaagttgtcccaacagaggaggccagtgaggcagagacagagctctcccactctcagaccctcttttgtcttcattttcctctcccacttagcacatgtgtgcttgagggtggctgggaatgtgatatacagcaccctgatcctaacaggtgtgattgttacgtaagacgctgatactgggccttgtattgcttttaaagtttcctctgctcagcatcatttcatgccaaagtgctgctatgggctgctttgtgtgcacaaaattgctttttccacctcggaaatgcagctttccctagggggaggcctacaacaggacgaccattctgagccagtgagtctattgcatggtgttttgagaaagggaattttagtgacaccttatgccatttcaagaggagaaatgcaggctggcagagcaatttccagaaatggaatttgcctgcaaatagtataaacaacactaaatttactgtgccaggaaatcttcctgaactccttgaactcatacacacaggtatttgagtcctgaataaagtgttggaaagcactgcagatgcggtcacctgactgaccacctgggttttctattaccagtgaatttcttttattcaccttcccttgaccaagaaattgggtttcttttccctcagcctgcacttactcttctattaagaccagaaaataaaataattttccgttgagtcacaaactcatcatcttgtttggtgttctgctgcctctgaacaaaagtgaatgccagccttcccttgctgggtgtcagagtctgcctcccttgaaaagaggcccctgtagaccccaacacctattcttttctctggttaattacagcagcatctgagaaattccatgcaaaagaagactacaaccagtgtttcagatataccacaagatcaaatttgggcactggtggtccacctcagaagactcttgagtcatatattcagtttctcttgctaatatatgactcgtcttcaccatctcctcaaaacaagagcaaagccaagatagaggaaggtaaaaggaggaggaaaggaaaccaaggcagggagatgttctaagtaggtttgcatttagttacccctcatttcacttaaggctccagacagactccaggtagggaatgcatgctgtctctttctctgtgtctgtctccccatctcctagaggacagagtgccagcgacctctggacaggggcagggctccagccaaggtgcccctgagccagggtcaacatagaatttcctgccccgtgaagggctggcaccagctagcatccccttggctccacatgagtcatgaacacaattgtcagtgggggtctctgctgctcttctggctgaagaatctgtttttcttctgggcttcacttgtagttcctattcaatgtctccatagggcactgagatcaccaagaacattacccagaagctgaagtccaaatgttctagattttgacctctcttgactctggggccacaaagagaaggccccataatccacctctcagccagtatctcccttctttgcacagattcctcccaaccccatagagcctatgtggtgagcatgagggtcgtcttccctctgttctcccatcccagcctctgttttgctgcatgttagcgctgatccagctcctgagatggttaattccacccaatccaagcttatttgcttgcctgactgactccaccactctctcagctatgggggaatattgcattctaatgaaatagggtttggaactcacctggtgctcctcgcaagacaactgacacaaggtgtagggtgtgggggtggacacaatgcccacctactggataaaagctcactgcaggaaaatgaggtctcctggcataatgcaacaaaaatctcatataattttgatttttaaaaagttgttctcaatttttcattacatcctacttctcagccctctggatgtttcatttttttggacaaagtgtttctttagtggttggggccagggacaggttgagggatatttctcggctcatttataagatataaatattatgaggttgtatgtaaagaaagggcaaacgtacagcagaaggggagcaaatagctacctttcaaggattttgagatttgaaggttaaggaatttttactgctatttttgttcatcagtttcatgtctgttatgttttgagatcctcagaggcctagggttagcgtataccaagaatcctggtgagaggcgttgccatgccttggggtgaattcttccccactagctctctcacccagcctacaagtccttctctcatagatcccagagcaatgggcaccgtccaggaggtacaggagaggactttatgatgcaggaaagaaggaagaagtgggtcccttgcaagtggccagacagggaatgatggtttgactccagaaatcaggaatcaggttcaggtttggataacttctctttaaaatatctccacattgagactcttattttaacaaaatccaaacaaaattaactcagggcttgtgacctaacctttgtaagaaggtgatcaaagagatcctacattaataagcactgcctgtagcaccagctttgtctttttgtcttttgttgtttctttcctgaaccaccctgtacatcatagccaggtctaccccaaatagagcagcagctgatggcttctctgctgtctgtggagggagggctcggctgcagacctatggtgttttgtcagctgttaggtgctacagcccacccagtcagagtacatagacatagcgctttaagggacaaaggacaaacagaactatctttgctttccggaggccatctttttctttccttgaatcctttctgctttaaacttctgaggtttatgcatcccagagaggtcacaccaagccaaagagaaaaaattcatagattgtcccagcctacccaaagggcctgaaaagcctctctaaacaaaactcaagatagctgagaagtatgaatggggttcacagcaaagtccaattgatggcttttgaggctgggacacccccaaactgcccttctgtttttgtagttttgctttcttccacccaccctctctccgcatgctgtaagttaggggagttagtatcttgaacttctaaatgcaaaaggagattttataataagccatgctacctgtaaatacattattgaggtttgcatttttatttttggaggtatgaaagagttgagtagaccaagtcaaaagaggtgtggggatttatgtttatttttatttgtttggggttgtttggttggtggctgggtttcttgtaacagacctattctggaatagcaaagaaggataccttggtgatctgcaatgtttctgaatctgtttctctttaggaagtgattgccatcaaatttagtgatatgatatttgagtcaaaaatctgaggttatagtaccagctgtcttttctctctggtctcctttttgtcgtctttctctttctgtctaaattggcctctgtcttttcctaaggacttaaaatataacccaaattaatgaagaactgccccaaaacttcagtgaaagccaaggaggtacagaattttttcaggacatctttaaccaatacaaaatttatgtcttaagaagataatttttacaatagtgtagtaatctgataaatgaaaactattggaagtcaatagttttttatattccagctttctgtattcaaacttgtgccttcagcaagcatctcttcactttctttcccttgtcaattgaaacatgaatgtttggctaactcatgatgtaaagtgtctgttaagttaataatacataatttaaagcacttagtctccacaaagcaatttagaaaaatcttcacttgttagatcccatgaagtacctatgaaattctcagcattgctataagcrtttgattttttttaaggaaacttcctgtttaatggaatctgaatccaagatttgctttaatttcactctrttcttcccattttcccttattcttcttgttgtctctctaattaaaaaaaaaaaaaacctaggcttttttttttctatccagaaagttgggttttcatgatctgagcttccttatgtctccttctctttgtgcaaacttaaaccagtcatagattgtcacccagacatattctccaacccagcattggaaatctgaacgaatcttttctctttttgtcctacaagtttgtcagagatgagaatggattgctgtstacattctacaaccagaccctagactttataccaggctgtgccacttcctcttcacttcactcagaggatggccccaaaactgaaaaggaaatgaaatmatcaaatataccaaatccgaatttgactttatttgatgactcaatattttccttccagtactctaatttttttttatggcaatggcctatatggcacaagaaccaccacttaaagcaaatctgttgaacatttttataagggatgagcaagaaaaacacactccaaaattttaaagtgccattaatcaatttttaagaataaaggtaatatgaaatgagggctaaacaatgtaatataactgccagttaaggtagacagtagttgtggtcttagttacatttgatatggagttgtgtaatattaagcagatcccagtggagttagtaaaaacataggtattgagttttaatggctaccaattgggatatatacttagcctgcaggctgaactttagtcagtgtttttctatcatgttgttttgtgaacaagtcaaaatttatacaaagctaccctaagtgctgcaattgcagaggaacttgcctcttcgtgatattagagggcagtccaactccgctcaaactgagtccaagatttgaattcatccagaaaaacaaatggaggagaaaagcctaatgcaccacatgtgtttggcatttcatggctgggacaatggagtagagggtaggaagacaagctgtagaacaaaagcaaagtgaggtagaaagtaacaggtcccagamgaggacagacttagagatgtgtaaccttggatcctctttttcacttagaatatgggtaaacttcttagcacaagactggattaagagaagttctttctgttaaactcacctagggtagtggctttgaaggcctcagaggattaatagattcccaaaattttcttccagacctgggagatggagagaaagaggttcttgctttaaagcggctcgaagacaatctttatgacttcagcaactcttcaacatagtagcaccaataaaggagagattatgttaacttcctagtggtgagaataccatgggatgggagaagggccagtgagtgggatgggaatgagcttcatcaggaacagatttcagactctgcagggtgcaccggttctagcctcaaataacaacattgcaaggaggtggactacagggtccacaccctctgtccttcggggcccatggtcaggccattccctctttgttttgctcctagaggatgagcatgtaagatgagatcaggagggaaattgggtgctctgcctcaggctgttaaaatgctgctacctgcattctaaaacgtgcaagtcatgccccacaagacacctccttagggcagcatccactgtggtgtgccagcctgacacccctgcagtcacggtgtttgaatggcagctgatgctggcccacccagagtatcggtgcatctctcctaaagccacagttcagcactgcatgttgaccaggcggatatcctataatatagatgctcgtttggatccaaaaggaaaaccattaaaaataaaagaaagatgaaaaactttaatgttttgggggggataaaagaaaagaataaataaaaccttgttgtaaagaatgcatcggcctgatttccctcacttgatgtgtttctttgctgctaccagaaagggaaatcatgggagtgaagcctgccaggaccctcagggtaagctggcagcaggctctgcagctgcacttagttggggtctgctcagaccagtcaggaggaattcaggaggctttcaaagtcccaaggacatcctggctctgaaaggttttcttttgttaaaaaatgcactttgtgctgtgtgtggtagctcgtatgtgttaccccagctattcaggaagctagggcagaaggattgcttgaggctaggaattcaagactggcctggatgacagagtgaaaccctcatctcttaaaaaaaaaaaaaaggaataaaaatgttctctgccttggataacatttttttttaaagattccatacaaactcattccctgaaagagaaaaacagattttctaatcaggacattgtcctgatctgcaagcgaggagtttaacaaggtaggcagagaacttccttatggaacaacagggctctgtgaccagaaaaactatgaccagcctcctctgaaaaaaggtggggggattatagggcaccagctcagccgccaagttcaggaagcagctgattcccaagactcttaggagatactgtccattcttcctcctgtccacatcactccccatttaactgcaattgctcccttgccacagggaaagcagcaagccccaggcccaggcctccatttgatttgccactccgagaactgtctgcttcattctgcttgaggagatatcttcacctaatcctagtgttaattattttaatctgagcaacgcttttatcaattagatagaaaccagcattccaaaataagtcccctaagtttgtagtttgagccaagatattttcttgagccctaagatatatgactttattagctaggatttttcttatgattaaaaacatccaaaaatgtgatatgtggtcatctctcagggaggtctaggtccttgcaggctggattttagaaatttctaagattctctacaacttttaaattttatgttatttttcaatcataatttctttcctgtggcttctatcaccattggagttagaatctgacaacctttaacttcacacttttatgagataataagttggtttcttgggcaaaggttggtttgtaagccatttacatggattgatgatttctgttcttgttttcttctaacctagaactcaggtccacagttttccacaggctaatggcactatgaaacagatataaagaaaaatagacactgttctgagtttctcttgagtgtttttgtgctatgatctgatcatctattggttacctttacacattacattcctaaatcttctatcctgcctctgggatattagaaacttgtctttacttgtgtatcacattactttgctaatgagctgggaaaattcccaaactaaagacccggatttcagtttttaaaatatttaatcacaaaatattgggactagtcacaggcacacatagcccgggaactccttaaacacctgcaacaaaaagaaaagaatagaggctacaaatgcaagcgctggaatagaaccaactgaggtccaacctgtgcaccaccagttacatgctgtgaggccctgcgttggccacttaacctaaaactcactttcttcacctttaaaatgggaacaataatagcaacaaccccgtagggtggttaggcagagtgaccaaattattgtgtatgaagagaatagcccgtgtctgtccacaataggcatctgataaatgtcaggtctcaccatcgttgtcatcattagcaccacatacaagtgcattccccaaacccaccacatctgagaaactgaatctttcagggccacatgctgagaatacactggtgggtgctccccttctgttaatgaaacacagaggacgagttgatccttaggcaagtttctaaggaaagggggatacatttaaaaagcaaaccattactatgtagctattttaaaataatgctgccactcttgcatcagaaacaagtcataattttgtttattcttcatttctcatttccatattcgtttaataacaaaatgggagaaacattagtgggagatagtaattgtaaaagtagcaataaagttaatggcaacattaaaaatactgtacacctataaacacggcaatattcaaggcaatttgaaatatcaagtaactcacaaattgatgacacatgtaagtgaaccatacatttagggtcagtggcctgttagtccattagaaaaaaggaaaaataataataattctgtttaaagaccattcctaagtggtcaataaagaatgattagttcataaaacatcaactctggacataaataaattgagaaaacctttccaggagatcgccaggggaacattcaggataccagaaggcaaaacaatgtaagactgaagccaagcactataaatccatccagaaagagggctcccatgcctcggggcactgcttccagatccccatcctctgcttctgcaggcaaaatcatgggtgtgtttaaaatcaacaataataactatagccttcatctgctgatctaaatgattctacaacacacaggaatcatagagcccagaacgttggcttaagggagagcctaggtattgattctgccagagtctatttcatatatgagggatctgacatttggaaaaactctaaaatgggttttccagaggccaagaaagtatcctgtgaacctggactgccatattaggctcctgagggtagcctcagcaaccctagcacaaccgtccaaaaaagaaggaaaaaataactgaaacacaccccaggagccttcttttgctcatgtgtccagaagactcctttgggaacctaatggaagctgtgtatcctctcccttgaaaagggtaccaaaaaatctgagtgtttacatcctccagtcccaacctgagcctgtttataacccctgcaacagtagcaggtggtatcatggaaagaccaggcataaatgagctattttcatcaaagtaattcaaagagcgagctatgacagttggatcaaactattcaggcctggaaatagaggacggaatccaggctgatttcctgccatgttggaaatactgcttgcctctgtgaccagatcagatggcttgacaatgatgggaatacagtgtggctatctgggaggtggggtggaagagaaaagggcaacttatataaatatagctcagtaaatacactggcataaggcattaggtagacctgggtacaaattctagctatgcatttaacagtgaccccagccaggttacttagcttgtaacccttgacttccttaactgtataattaggataacaagactaaccttgcatagttgtatttaggattagggattacacacatacacacacacacacacacacagagagaaagagagagagagagcgcccagcatggtgtctatcacatagctggtatgcaataaaacatgactgctattattgttgttcactcattcattgaatgtatttattaaccatttactatggtgccaagcactagggttttaataagcaagccagatgaagcagtgtccttaagttgttcacagcctaatggaagctacagataagaaaacaaaccactgcaccatggtgtaatctttgtgagggtgaggaattttcagggtactatggaagcccctaaaacaacttggggagtcagaaatggcttccagggagaactgctatttgagacaaaacctaaagaataacaagggttggctgggccataaggatggggcgaagatgtcaggtagaggtgcaggaggaggtatcttgctctagttcaagagcagatatttgagagagcttgttaaaggacaggctggagagtgaagggagagcttacaagccatttctcagagtttagccttcacaccatccctgtattggcaaacagcaatggcaagtattaaatcatggggagattaggcacagacaacacatcgataaaaccaaaccaggtttacttacctgaataaggaagaaactcaaaatacagagataactgtattatccaagaccaagatacaagcttctggccactgaattctgcatgagagggtacacagctaacagtgaaaacatgaatgagtaaaggtcacaccagaccctctggagacctgattttctcccccatttttagcctaccacagagggtctcatttaattctttcagcaacataagctccacatgtctatacccaccagtggaaggcagtcagtttgaccagccctagtgaagccttcagacgttccctgctgattctgcactgccctgagagacccaagggaccgtccgtacgatacctttcaagtttcctttaagggcatatacagctctgtaatgaacatcttcagcttcttcagaacatttctcacaggatgagccaaggaccaaaagaaatcagaccacagtctcattttctagtaagaaaatcctctgatagaatcatggccagtggttgagataaattatagaagcttgatgtatgtcatcaaagcagtctttgcttcattaaaacacaataatggtcccttaaaaataggattgtgttaataaattgatgcatgaacaatttccaggagcatatcttaaagtgaaactcacctcaaatatttgtctaaggagaagcaaactagtggctgtggtaaaactggttaaccagttctacttaaagtcctctcttgtattaagtccctttgcctgggactctatttccctgttatatttctgccccagacctatcagatcacctttcttattttccaggcatttggaaactatctttttcaatcacttttcttttgttcaatgtggtgtgcgtcataaaaataaaggagagggtctccatagatagactgtaattgtgaacagtttcaaagaagttttaaataactccctgattcttagaatcaatttaaaataagcgatgttgtatgggcatgagtgcttcttggggagattggtaatgctccctcggctagcagtggagtagctgagctaacaaggagttcctggtgccaggtgggtctttgcacactgaattcgtgtctgtagggagaagcagctgccgctcagatctgaactgggaagagatgactttaaccttgggcaataactagagttctgaatggcagctgctctgcaagattgaggaaataacagaggttctcaggcagcataattggataccagcataagttgttgttttgttttttttttaagagagggagagagaaaaaaaggtatggaaaagagaggaagaggaaggagaagaaaaagaagaaaaatggtaactggcaactttaccattatcaagcatcacaatctagtcactaagcatagaagaaaggttcttttttaattagagaaataagcaggttagtcacacactaatcaagacctatttttgcttgaattaggtcagtcttcgttaaatgcctctctagaaataggcggaggtcgaactctccatgggtggtttgcatggatgcagcagaggtgactcacgtttgccgatcttaagagctgtacagatggctgggagcggccgattaaaacctccttgacaactcctcggagactgaagaccacccacctccatcttcactgggagcaaatggactgtagagtgagcaacatggtttctgacctgatcctcaggccagggggtaaacaaaggcagcttgaccttttgctaaacagagtgtccgggaaaataatcctcagcttgttttgaatgcacgctggacagagaattactggtaattttgtgaaccggtaggtctctgcactgcaataagaagccaccgtaactgggtcctcgtggtgtgactgattcattttcagtctacccagactgtcctggttttaaaatggaaaatcctacaacctgggaatccccttagttcactgcaaaccaacaattggtcatctttgctctcctcacaaagagtaagatgcaaggccaaattttggcttgaatgatgttccaggttctccacagttggtgaaaaatcattgaatgagaaaatgtgcaggatgaaagggatattagtaactacctgatccagtagttctcaaacttcagtgtgtatcagaaccccctgggctgcttattgaaaatgtaaatgtctgggttctattgcaaaaatctgattccatccatatgtcttaggtagggtcccaaattctgcaattttataagcaccttagatgactctgattatacatggtccaagga

SEQ ID NO: 8880 - DNA, 82683 bp, Homo sapiens
cattaggctcctctcaaagaggagaaaatggatgaatacagaagctttgaggctgccctaggccatgcacaaatacacggtttgaatgtttaacgcacctttaggggacccagcatgtgcaccataaccgcatttaacaaatcagactccaaagcgttgtgggagggatcagtgtggccacaggctacgaatttgatctcttttagagtatttcaagaaaagctattagatgctggatttcctttcctttcaaattatttttggttactagattgtacttctataaatgcaagtggcccacatgggcaccagaattaaaaagttatgaacataaaatatagacacattaaaattctgtaagaaaagactatttggtagaaatttgtatcttttttccttcctcatatttttctgaatttttaaatgaacacttttacttctataacagaaaaaataaacatcaaaaataaaaattaggaagaagaattttgaccttggcattttaggccaggacttgaatactgacttcacattgactggctaagtgacttgtatgacatcactatcatcttggcccatatctataaaaacagatgaaaatatcatctaattgtcaagactgtggagactcaaattaggtcttgaagtttcaagtgcctcacatggagtaaaacacatcacatgtggcacgcatgcgtggagctaccacatcctttctctccctgagcagcgagtcagctgccagtagaagtgaccacggctcagtagtgtccaagatgcttcttgcacaccccagtgcaacactgtccacagccaacgcctcatttgcaaatcagtctcccactagagtattagtcgttataagcagactgcatattcatcctatgccaacatcccccagaacagctcccagcatgtggtaggagtcaatatattttgaattcataaacaaattaatattactcaaccatatggtcttatcaattttaagaaacatgaatattttagaaggacagaccttttctttaatactattttacagtttggaatcctgacaatgcatttaaaatgcagccctctaaatttggggaggaaagtgtcacacgactaatatctctgacctaaaaggatcaagacatttaaatagcaaaacaagaggaaaatatagaaaaaaaatctgaagacatgaaaggaagaaaaattaacttttggctagctcttctacctggagatagtctggagtcctgaaacacacatactacgtgaactccacgcttcaattatcttggaagacatcaaaagtttccttcatgccacattgtcataagtggagtttgcagtgtggattgttagtttttaaacagcccaataagtcaatgcccatactgcgctgaaacttatacacttgtttagagtaatggattgctgaaacttacacacttgtttagagtaatggacagtgcagattttaaggcaccaactaaaaacgaagccatggcaaatataccaaacaagctccttaggcttagaattcttcaccaagtagttacattacccacttgaattatatttttaaattctgtataagttaatctctaaaatagtaaagattaatataaggatttcaaattttcagagcgctaccatggcaaagagtcctgctgcttgtatccttacaaaagtgcatgaatttccgccgggtgccgtggctcatgcttgtaatcccagcactttgggaggccgaggcaggtggatcacctgaggtcaggagttcaagaccagcctagccaacatggcaaaacctcatctctactaaaaatacaaaaatttgctaggcatagtggtagttgcctgtaatcccagctactctggaggctgaggcatgagaatcacttgaacccaggaggtggaggttgcagtgagccgagatcacgccactgcactccagcctgggggatagagggagactctgtcacacacacacacacacagacacacacacacacacaaaaagcacatgagtttcctttgctgtgcagaagctttatagtttcatatcatcccatttgcttatttttgcttttgttgacagtgcttttgacatcttattcataaaatattttcccagtccaattttctgaagcactttacctgggtattcttccagtggttttagtttcaggtcttacatttaggcctttgatccgttttgagttagtttttgtacagggtgagaggtgggggtctagtttcattctcctgcgtgtgggtatgcaggtttacctggcatttaatgaaaagactgtcctttcctcaatgagtattcttggcacctttgtcaaaaatcagttggctatagatacatggattaacttctgggttctttattctgttccattggtctgtgtgtctgtttttaggccagtaccatgctattttggtttctacagctttgtagtatattttgaagtcaggtagtgtgatgcttccagctttgctcattttggttaggattgctttggctcttcaggcttttttttgtggttccattcaaattttagattttttttttctatttctgtgaagtatgccattgttattctgataaggattgcactaactctgtagattgctttgggtagtattgtctttttaataatattaatgcctccaattcaagagcatgggatgtctttccatttgtatccttttgaatttctttcatcagtgttttgtagttttccttgtagaggtcattttcacctccttggttaatttgttcctagggattttattttttatagctattttaaattacgattgccttattgattttttgtttgtttgtttgttttgagacagagtctcgctggagtgcagtggtatgatctcggctcactgcaacctccacctcctgtgttcaagcaattctcctacctcagcctcctgagtaactgggactacaggtggccaccaccacgcctggctaatttttttgtatttttagtagaaacaggctttcaccatgttggtcaggatggtctcgatctcctgacctcatgatccacccaccttggcctcccaaagtgctgggattacaggcatgagccaccacacccatgcttgatttctttttcagctagcttattgttcatgtatagcaatgcttctgatttttgtatattcattttgtatcctgcaatcaacagactgaaaacacagcctacagtatgggagaaaatatctggaaattacacatccaacagggggataatatccagaatatacaaggagctcaagcatctcaacattaataaaacaattaattcaatttaaaagtgggcaaatgagctgaacaaacatttctcaaaagaagacatacagatagccaacaaatgtattttaaaatgttcaacatcagtaatcatcagggaaatgcaaatcaaaaccacaatgagatatcatctcaccccagttagaatggctgttatcaaaaagacaaaaaacaaaaaatgctggcaagaatgcgaagaaaagaaaactctcatacactgttgatgaaaatgtaaaccagtgcaacccctatggagaacagtatggaggtttctcaacaaactacaaataaaacaaccttatgatctagcaatcccactactgggcatttacccaaaggaaagaaaatcagtatattgaagagatatctgcaccctcatgtttattacagcactattcacaacagccaagatatggaaccaacctaggtgtccatcaacagatgaatggataaagaaaatgtggcatatatacacaatgggatactactgagccataacaaacaataaaatcctgtgatttggagcaacatggatgagcctgaagggcattatgttaaatgaaataagcgaggaatggaagattaaacaccacatgttctcactcatatgtggaagccaaaaaaaaaaagtgcatctcacagaagcaaaaagtagaacagaggatgctagaggctgggaaggatggagggaggaaggatgggggagatctgttaaaggacacaaaatcatagctagacaggaggaataagtctgagtgttctatgccactgcaggatgaccagagttaacagtcatagcttcaaatagctggaagaagacatcgaatgttcccaacatgaagaaatgataaatgtttgagatgatggacatgccaattaccctgatccgatccctgtacattatacatcaaagcattactatgtacccaagattatgtacaattactatttgccgattaagaaaataaaatagacaaagtttaaaaagttcatgagttgctgtttcctatgcatgtataatacacatgtacatataaacatatgacatagatatacatgtgcatatatgtacacaatgtgcacatacagtcagccctctgtattcaaagtttccacatccatgaatttgacaaactgcagatcaaaaaaattaatcaatcaataataacaatgcaacaataagaaataatacaaatgtaaaaaacaataaacataaaaactatttacatagcactcacattgtgttagctattacaagcaatctagagattatttaaaatatacaagaggatgtacatagattacatgcaaatcctacaggactttatatcaggacggtgagcacctgtggattttggtaaccgcaaggagtcctgaagccaatcccctgcagatcctgagggatgactgtacatattcaacatacacatgtgtttgcatgtacatatacgtatccagtgtaattgtacgtatgctatgtaagtatacatatgcagatacagacacatttattctcagacttccaaagtcaataaatagagttttgttttcagtcgtgccacactctctgtattgaaagggggaattagatttaatactgcttggtagcaatggagtaacatacccatctgatttttttaagatggcgtttttacctgtatcaagcattttttttaaaaaaatctaactgctattaaacatgcaatatattctgcccttacatttttcagccatacctcatattcataaatgggcagattctatggctgacaggaaagtgacagatcattcaaaacatacactttaaaaataacaagtgattctacagacctgctgcttatgaattagacaggcaagccacttatcctacataaatttgtttatgcatctgtaaatttagaatagcaagtgctgacttccagaataagggttagaaacaataatgaatatgcgagcaatttctaaattttaaggttatttagaaacacaagcattttattataaatgctagtcctggaaaattgatgtcatgtttgttatgggacttctattacctcaaagtcctttccatgtcctatcctaaatcgaagagcctccagtgacatgtcttcccgaaccttctatttttctttttctttctcgtctgcatctgtttctaacagatgatgtaacacttacatctctttaagaattctgctgggctgcttagcaggctcctctgaccaattttattgactgttgagacagatttgaaaaaatctgagttttagaatcaatattttaaaacgcagtacctttccaaaactctgtaagctggcccacagctattatggttgataaagtgctgactcacacctttttttgtggaagaaagaaggccgtatgttttaagagacacagccattagattttttcataaatgcaggtggaatctccactttgaaaagtaaatacctccagcatccccccaaaccaatcatttcatataactggccatttttacaagactccaaatacacattcagggacaatttagaggtggaaacctgtgattgttcaaaccatttgatcgctttttcttttaaggagaattaaggcagagaaatctgctctgtcccaagctcaggtgggataccacgctcagagtgggctctttaggaggactccatgcctgcaacagctgccaacagggagcacgcaaaacaggtcatccaacagccacatttcaggkaatcaggggctcgctggcggtttccagactgttctgtactctcacaaaaagaaacacaaaccaacttactgtggattcgagccagtcgaagatatgcttccaagagccagagaaaggcaatgaggtgatggcgggacttccagcagtgccacagctgggcgtgtgctcacttaccagcttacatactgcctgggtattgtttatggccattgcttttctatgtgaacgtatgatgagggttgatgtaaatctatgtcaaccatataatccaataaagcaggagctgtgttttattaaaaaataataaaattaaagtactttagggataagctcatggtcttgggagaaaatatattttctcagtgcctcaatttctcagtccatgaaatgggtgaccagataccatgatgttataaggtgttgtaagacagaaaaaaaaataaaaattcaaatttaactggcattcaaatcacctgagtctcttgttgaaaagtaggttctgattcagcaggtctggggggagatcagatattctgcccctctaaccagctccctggtgatgctgaggctgtattctggggaccacacggtgagtagcagggagatagaggagaacgctattcctaggcagcatagtgttttatgcttcctagggttgcctagtcagataaattgaagaaaaggaactttacagtgaaatataatccaaatgccataagggctatcaaaaggcaaagtgcattaaaatattttattagaaacaagatagaacaatgggaagacttgagtaattgtttccagtctactttcaatgtgtttcctgatgaccaacatccaactcatttctcctggctcagttcagctagtgaggactaagcagaggtgtgttattcacacctatttagatgctgtgtcctggattgtcgagcacagccctcattttaaagttctgcttcatcgctccttttagcacattctattggatcataaatccttagttctggttcagacaacatggccactatgttagtttaggctgtctcactgctctaacagctacggtttcgccttatgctggctggcgtcgagttggggctgcacactgtccttcggggcccagctctcttcttcctagtggctctgctgttccctagagtctcaagttccttgggtcctctgcatttgggtgatgttttagagaccaggcctgaaagtggcagacatcgcctcgtctcctggtgggagcccagccccatgactcccctgactgcagggcacgcagagccagacacagggccaggagggaaggaaacacagcattctctctgcccggctgcccatttagcactaggtggattattaactctctaaacaatgaagaacacactggacttgaagagtgagtgccaacagggaagggaagggayggyagcggaacgtgagctcaggacaggctctaagctgggccttgggacccatctcttgcccagggaaagggggtctttggagaactgttagctccctcagaccamatgcattcccaccacagccgaaaggcctcccaggaactagagcagtccacgagtgaggcccrggaagaggagtacaggacagtctgcagatacagggggtctcaggtgcagctcagaccttaggaatctgaatattcccccaaggcccattccaccccatccatgcctgacaaaaacactccgcttcttgatgaggaaggaatcattacccggggcccaactggactgcccccaggggtgtgtgtagggggtggggggtgagtgtggttgtgtgtgtgttgtgtgggggagtgtggttgtgtgcggggtgtgtggttgtgtgtggggttgtgtgtggagtgtttgtgttgtgtgtggtttgtgtgtgtgtgttgtatgtgatggtgtgggtgttgtgtgtgatggtgtgtggtggtgtatgggatgtgtgtgtggttgtgtgtgaggtgtgtgtgtggttgtgtgtgggtgtgtgtggttgtgtgtgtgggtgtgcgtggttgtgtgtgtgggtgtgcgtggttgtgtgtgtgtccgggaatggcaggagagggccgtcacagttaatgtatatgttacactcagagaagactcttaccaccaaagctcaattatttttcaaactctaaatgcagacaatgtagccatatggaaaaattggttgatgacaacaaaatggtttgttgttgttgttgttgttgttgttgttttgtagtttggtagatcatctctatctggccgagtattgttcaaaccccctcctgagcctcagccagggactgctctagctcctggaaggccacgtggctagcgttggaatggatttggcccgagagagctaaagattctccaaagagaatctttgtcacaaatatgttcctttagcaccaacttacatgacatgactttcgggtcaaatgcaggtgacaatgaccggtctgtgcstcacacagggttcccaccgtctgcttaggttttaaggtgaaactgattctaatgatgttttcagtctgtgtggttttgtgtgtgaaactaaaggcttgctctaagaaagcacatggggctgaggcaggagaatggcgtgaacccaggaggcggagcttgcagtgagccgagatcgtgcyactgcmctccagcctgggcgacasagcaagactccgtctcaaaaaaaaaaaaaaaaaaaaaaaagcacatgggcaggctaatgatgattttgtctctgagtttgaaggaattcagccagtgggcrgagggaaagtcctcattgtagaaattaaatttatatcccaaggaaagtcagcctctttttggaaaatctcaggtagcatccaaaatttagcaaatggtttgaccacgaacagacaccacatggaaacctaggagcagtcaaaagacctggcagcctccatctgaggtacctggctttgttcctctgtcaccacagagccacctgcctagggggccttccccactctctaaaagctgaggggaagcacagactaccctgagatatagctctcagatttgcatatttttgtttgacaaatatttggaattatccttttttaatttgaatgtctcttcataacaaagacaggcytagaaaaaaattgatgggtcaagagagtggtatagattaaaaagataaaaagtacccagtttccagtgtaccttttgtttgccagagaaagaaggaggaaagggaagcacggagggtgagaggaatcatgagtacagatatgtcttctaaagggyacccaaaaatgacacacacacaaccctaatcatgggtttatgtataaagtaccttagaattaagtcagagtcactgtaggcttggaaaagtattcaaggggaaatttaaaatgcattacctcaaacttttgttagtatatttgaagctattccactttaaaacttgccatacattcccatctcaaataaccaaaggactttcaatctgctgaaggttctatttcaggtcctctagtttccaccacaatcttccactgaagtctgcagaagctccttcagtcagtggcctggaaaacagtatggacccaagtgtgcctgtctctcctttactctgatctttctcactctgggcgcacgcggtagcagcagcacccagccccagtgcactctgctggggaagcaggggatgaagcataagcgagaatacggtgtttctccttcttccctgccaccaccattgctgagaaaacttgtacggatgtgcccatcccaaatgttcatgaaatgctctcacatttatagggcaggcccctgcgtggaaaatgaggaaaaaatactggagttgaacaaactggctctgaatcctgctttccaagttacaactttgggcaaattatttaacctctttaaaactcagtttcttaattggtaaaaggggcattatcacagttcattcagcattgcattgagatttagtgagctggttgtcaacagcagataatcaattgcatccatttattatgtcccatcatggacacattctcaaggacagcagctctctgatcaccctggctctctactgcattagaaatttctatatttctttttttgttgtttttttagacagagtcttgctctattgcccaggctggagtgcaggggtgcgatcttggctcaatgcaacctccacctccctggttcaagcaawtcccctgcctcacctcccaagtagctgggattacaggcacaggccaccacgcccagctaattcttttgtatttttagtagagatcrggtttcaccatgttggtcagaccggtcttgaactcctgacctcaggcaatccgtctgccttggcctcccaaagtgctgggattacaggcatgaaccactgtatctggccagaaatttctctatttctaatggatgattcccwtcaagacaaagtcaatctccagtatatctctgtttaaaactctgtaccttgattttacaccccatttctgttttcttcatagacaaactatcttagtccattttgcattgctataacagaataccacagactaccccaatagtttaaaagcaaaagaattgtacttcttacagttctggaggctgggaagtctaagagcatggcactggcatcttgtgagagcctcttgctacatcgtaacacggtagagggcatcacatggcgaaaggggaagagggtgactgttagctcaggcctcccttccttaaaaagccatcagtcccatcttaggggctccaccctgatgacctcatctaatcctaattacctcccaaaggccccacctgcaatcaacacatgaatttggagattacattttcaacacatgaaatttggggaatacattcaaaccatagcacagcttttcaaagatttatctacaaatgctgccttcatttttaccactgatttatttctcttcatcctttagtttagcttccacccccaatatgccacttgtcatgcataacctccattttatcaaatttctgtcctgatcttacctcaggtagcagtcttcatagctgagactccatcctaaaaacaccatcctttctggcttctgccattttgctctattctgggtttcctttcacctggatagttactcctcgtctgtcttcttggtgagattctcctccccttttgaaccctaaatattttgtgatcytaagctttctcatttttcctaggaatttaattatcatctttatgccatgaactctaawgttaatctctagcccagactttcttccaagcttcaaacttttatatccaactgatgtgatatcactgccatctcaaactcagcatttctgaaaaaaaactctttgaaatgtacrgccagcacccagacccttcctcagtacacagggcaccattcattcagttaaacctagccattgcacacaaattccccctttgttttcaggttcacatccaattccaagcaaacctggtcaatcaacttcctgaatgatcccaatcctcctcttggttctgtctccatgtgtccaacatgtsctctcatctttcatggagatgaatgccaacacccaacaggtctttccgtacttattactgtgtcttagscccttcagttatcctctttttctttcctgaaaactactcaatgatttcccaaatttcttatcatgacttttacaaccctgcatgtcttacaggtttttacctatcttatctctctaacctcatcataatctactctttccctcaactcactcacatgacatttagttggttcctagaatatgccacatatgctacattttttttttaactgaagggttcttcatacaagctgtttcctctgtctggatttctcttatccaaacaatttgtatgactagcctttttcatgctttgtgtctaagaaaacatcacactctaagaagttagttccatctcccacattctataatgacagccttgtttgtttgctctagagcaagttctcttagagttgggctcagactgtctttttttttttttttttttttgaggcggagtttcgctctgtcgcccaggctggagtgcagtggcrcgatctcgactcactgcaagctccgcctcccgggttcacgccattctcctgcctcagcctcccgtgtagctgggactacaggcgcgcgccaccatgcccggctaatttttgtatttttagtagagacggggtttcaccgtgttagccaggatggtctcgatctcctgacctcgtgatccgcccgtctcggcctcccaaagtgctgggattacaggcgtgagccaccgcgcccggccagactgtcttgtttaacattgtgcccagcacctagcacaatgcttgacacatagtaggtccttaataaatatttgaagagtagataaaaattattatatttaataataaaacttgcactgcctacttcatagggtaaggaaaatcgaacagaacatgttattggaaaatactttgcaattgtaatacaattaaagtaaaatatattaacattttacctactatgcatatatattggtacatttcaatatatgtgatatctcatccataaaggccattgatattttttaaaggaacacatatgtataattttaaaaaatcctcttcagcaagttaactttacgtgctaataccattaatatgggagcatgtttttatttatctaaaattatatctatttactttctggcaagctgtgttttaccagttggaatgcttttgtctgtaagtaacaaaaaaactacaatcaaagcaacaacaataacaacttgactcaagctgacttaaagtataaaataataaggagctttataatctcacatagcaagaatgccagaggtaggtgtagtacagggttggtaaacacggtccctcagagagctcatctgaggctcagggtctccgatggacacatctctgcactctgctatccttagacaaagacactccttgactcaggctcctctgagcccgctctcggctgatggtatagatgaaggtggtggcaatggatataggggaaattgggagttttaagatatcttttaaagcttgaaaccacaaaactgactaaagaataggatgatgggaaaaggtaatcaggggtgaccatctagtttgagaaactgggtgtgtggttggtgatgccacttactgagatggcgaggaagcagtttgggaggaggaatcaggaattccattttaaacaggttacatttgagttgcctgtgaagcgtccagtaagaggtattcctaagatgatgtaatrgtcagacttcatttcaaaagaaatatctgagttagggatataattggagtcttctcaatttgcaaatgacatttatagcyctgggaattaatgaagtcacctaaggaaagagtactgataaagaatggagtgtggttaaagaaggcaaatgatttctttctgtttttaatttaacttttattttaagttcaggggtacatgtgttatayaggaaaatttgtgtcataggggatttgttgtacagattatttcctcacccaggtactaagcctagtatccaatagctatttttcctgatcatttccctccttccaccctccatcctacaataggccccagtgtgtggtgttccccaccatttgtccatgtgttctcatcatttagctccctcttacaagtaagagcatgcastatttggttttctgttcctgcattagtttgctaaggatgatgccctgcagctccatccatgttcctgaaaaggacatgatctcattctttcgtatggctgcgtcgccgtctatggtgtatatacagcatattctctgtatccagtctactaatgatgcacagttacgttgattccatgcttttgctattgtgagtagtgctgcagtgaatatacatgtgcaggtgtctttacaatagaatgatttatattgctttgggcagtatggccattttaaygatattgattcttcctattcatgagcatggaatgtttttccatttgtgtcatctctgatttctttgagcagtgttttgtagttgtccttgtagagatctttcaccttcctggttagttgtattcctaggtattttattttgtgtgtgtggcagttgtgaatgggagtttgctcctgatttggctctcagatatatacccagtaatgatatccagtaatgggatcattgggtagaatggtatttctgtttttaggtcttcgaggaactgccacactattgtgtctttcacaatggttgaacgaatttacactgccaccaacagtgtataagcattcctttttctctgtaacctcgccaacatctgttattttttgacttttcaatagccattctgactagtgtgagatagtatctcattgtggttttgatttgcattcctctaatgatctgtgatttgagctttttctcatatgcttcttagctgcatatatgtcttcttttgaaaaatggctgttcrtgtcctttgcctactttttaatggtattgtttacttttttcttgtaaatttgtttaagatctttatagatgctggatattagacctttgtaagatgcatagtttgcaaaaattttcttccattctatagattgtctgtgcactctgttgatagtttgttgtgcagaaactctttagtttaattagattccatatgccawtttttgcttttttgcaattgctttggtgtctttgccatgaaatctttgcccattcttatgtccagaatggtaatgcctaggctgtcttccaaagtttttatagttttgggttttatgtttaagtctttaatccatcttgagttaatttttgyatatggtctaaggaagggatccagttttaatcttctgcatatggctagccatttatcccagcaccatttatttaatttttgtatatggtgtaaggaagggattcagtttcaatcttctgcatatggctagccagttatcccagcrctatttattgaatagggaatactttccccattgcttgtttttgtcacatttgttgaagatcagagggttgtaggtgtgcaggcttatttctcggttctcttttctgtttcattggtctatctgtctgtttttgtaccattaccatgctgtttgggttactgtagccctgtagtatagtttgaagtcaagtaacatgatgcttctagctttgttctttttgcttaggattgccttggatattcggagtcttttttgattcaaaatgaattttaaaatagtgtttttctagttccatgaaaaatgttgatggtagtttagcacgaatagcattgaatctgtaaattgctttgggtggtatggccattttaatgatattgattcttcctatccatgagcatggactgtttttccacttgtgtcatctctgatttctttgagcagtgttttgtagttatccttgtagagatctttcaccttcctggttagttgtattcctaggtattttattttttktgtgtgtggcaattgtgaatrggagtttgctcctgatttggctctcagcttgactgttgttgttgtatagaaatgttagtgatttttgcacatgaattttgtrtcctgagactttgctgaagttgtttatcagctgtaggagcttttgggccaagactatgggggttttatagataaagatcatgtcgtctgcaaacagggatagtttggctttctctcttcttttttgggtgtaatttacttctttctcttgcctgattgccctggctaacacttctaacactatgttgaataggagtggtaaaagaaggcatgtttgccttgtgccagttttcaaggggaatgcttccagcttttgtccattcagtatgatgttggttgtgggtttgtcatagatggctcttattaytttgaggtatgttccttcaatacatagtttattgagagtttttaatatgaaggggtgttgaatttttttgaaagccttttctgcatgtattgaggtaatcatgtgttttttgtctttrgttgtgtttatgtgatgaatcacatttcttgatttgcctgtgtcgaacattgcaatcttgcatcccagggataaagcttagytgatcatggtggataaactttttgatgtgcyactgggtttggtttaccagtattttgttgaagatttttgcatcaatgttcatcaaggatattagcctgaagttttcttttttttgttgtrtctcttccaggttttggtatcaggataatgctggcccatagaatgatttagggatgaatcccttctgctcagttcttttagaatagtttctgcaggaatgkcaccagctcttctttgtacatctggtagaattcagttgtgaatccatctggtcctgggcttttcttggttggcagtctatttattaccaatcagtttcagaccttgttattgctctgttcagggattcagtttcttcctggttcagtcttgggagggtgtatgtgtccaggaacttatctatttcttctagattttttggcttatgtgcatagaggtgttcataatattctctgttatttgtatttctgtgaggtcagtggtaatatccctcttgtttttgattatgtttatttaaatcttctctcttttcttctttattaacctagctagtgatctatctactttattaatttaaaaaaaacagctcctggatttattgatcttttgagtggtttttcttgtcccaatttccttcagttcacctctgattttggttatttcttgtcttgaaggcagatgrtttcttatggaggtgaatatttgcttatgtaaggcccagccttctaaggaccccatttctacayatctgtcccagagaaatgaaaagcttatctttaactgaaaaacctggacatgmgtgttyatgtcaacattattcataattaytcaaaactggaagcaacagaaatgaggccaaatctggaggctttatctgacckttatgatccactaacctcccgtcgtgcagaagactgtgtgttactctcacgtctgcatccaagggatcgcaccatgcagtggagatcacaactgccccacggaggcagagattaagaagataggcagaacacgcattgtcattcccagaagggtggttgtttataaatctgaaaccaaactattaaataacarcagctgtagcgctcctcttaaccaacaacataacaaaaatatctccagttattctgaccaaggtctgcacagagtcagccctagaattctgacgcaatcccactagaaaatactggataagtttttctcctaaaatgttagggaatttgagaaacagagtcacatcacatacttcaacagagtacagttcaacaaactcagcctatcttcatcacacattttaaaaccgaattatgtatgcaactcctttctgtaaaacaaacactctttcttttttcttttttttttttttttttgagacagagtctccctctgccgcccaggctggagtgcagtggcgccatctcagctcactgcaaccgccgcctcccgggttcaagcaattctctgcctccgcctcccgaccagctgggattacagtgacgcgccaccatgcccggctaatttttgtatttttagcagagacggggtttcaccatcttgcccaggctgctctttaactcctgacctcgtgatccacccacctcgggctcccaaggtgctgggattacaggcgtgagccaccgcgcccggccaaaacaaacacttttacgacaattgaaaaatagaagtttccaattcaattttgcaactaaaaaataataataatgtggtgccttcatgttaaactttggaaaaagccagggaagtggcttgctctggtgaataaattctgtagacccttaaggctgttcgcagcgtacaccaagacttycgaggcaagtgggggctccccctggcggctgcgccgggtggctgctccgggattgtgcggacctccgagctacaccgtctccaaccaacagaagccagcaggaacctgccttagatgtggtaagtgatctagctaagcaccgtggacagagagagttgcaagaaaaatggtggcataaagtaactgatcctaacatttcacctacgaattgaccccttgcagggaatgagacaacacaacttctcccataggcctggtggtcagagaggctggatcaagaatctccayagcccagcgagaagccacgcgaacacacccctgtgtgggtatccgtgacctggcggcctgcagaactcctgggccagagacgtcctcatcctgttggaatatccaggtatctccactcygaatatcctcatcttcctggaacccctctttttctcctaacattctcttaaatgaaattccatatctgctacaacacagaaagagaggcggaacaagaaaaactggtgatccactaataagaaggccctggagcctctcgatgtttaatcttctcaagggatgagaatgtgtctcgtacttctcagcatctgaaacgcagccttcgctaatgggtcagtttcactggacgtactcccaggatcatagatggcagccggggaargcagtgagggtggaaatgtctcactaggctgaattgaagtgaggcctacccgttgcctcctttgcatgtgtttaagtattagaagaatctagtaatttgcccataagagataatcaaacaagaaaacaaaggtgtatgtgcaaagatttgaatcttagctttatttgaaataacagaaaattggaagtcaattcatgtccatcagcgtggggctggccacctgccaattcatgtccatttccctggagggaaatgacccaaccatggagagaacgatgttcactgattgcattggcgtggcaagaactccatggcatgttgcatcatgaagaaagctgccccgcaaaatgagatgcgattgacgttgatgtgtctgtacttgtgcmaagagagatttgggaaasgaagtttactgaagtgttaacaatgggttacaagttttgaagtgattttaatttcttttwttttaagtttctgttaggctgggattttccccatagatatgcatcatctatgtcagcaatccccaaccttttgggcaccaggacaggtttcgtgaaagacaatttttccacggaccaggagtgggagggacggtttcaggatgattcaagcacattacgtttatcattagattctcacaaggagcatgcaagctagatcccttgcatgcccagttcacaatagggttcgtgctcctatgagaatctgatgttgccactggtctgacaggaggtggagctcagcttcgctcacttgccccaccactcacctcctgctgtgcagcccagttcctaacaggccacagaccagtataccagtctgtcamctgggggttggggatccctgatttttgtaattggaagtaaagttgttcgcattactttaaaataaagacagtaccatcgttataaagtattctctaagtgcaatcatagggaaaagttctgctgaaaactctagggatggttagtcgttttagggaaatacggggaactagatggattctggtttttatttatcttccttcaaaacagctactagtaatctgcagaaaagatgcatgggaaataaaccaggaaaactgagcccaaagtgaggtgcaaaggttctaaaaggatcagtggtcaatgatgtcgtggcatgtatcagctgaatccaaagttgatgtgagttccaaaattatactgagactttgggggaaaacaaaggctcagctatgctcatccatcagatttcagttccttcatcagttccttgagtggccaccacttctactgtgataagtcaccactgacctgggccactgctctgttctcrtcacagttacaaggtgagatttctttaagagattatttgactaacaattggcctcacccatttgattgtgagcttcgtgaacacatgcaacatttcctttttttttttttttttttttttttttgagacagagtctcactctatcagccaggctgcagtgcagtggcacaatcttggctcactgcaacctccacctcccgggttcaggtgatccatccacctcagcctcctgaggagctgggactacaggtgagggtcaccatgcctggctgatttttgtattttctgtagagacagtgtttcatcaaatgatccacctgtcttggcctcccatagtgctaagattacaggcatgagccaccatgcccagctatttttatttttatttagtttttgctaataatgtaatccttggkggctgacacatattaggggctcaaaacaagtttgagtaaatgaataaaagcactacagtgtgagcttaaaaaataattgtaacacttgcactgtggaaacacaaattaccttactgatctgaaaattgcattttgtactttttgctttaattgcatattttgaaaaaagaaatgcctcataattyttccttgactgttatttcattttctttattcctcaaacatactgtagacrttggaggaaacaccagagcctatacagggatggttgattgtgagaaaaggtaagacaagtaagtctctctatttgaaaccctgaaaccttgtttttcagcaggcacattgcatgcatgatcaaacagattagtgtggttctaattggtaaaccattaataagccatagaatataatcaagrtcrttcagaaagatacacaagcaaatccacaaaaggggattagaaacccagtgtgttcaggtattcttgcattgytgtaatgaaatacctgaggctgggtaatttataaagaacagaggtttaattggctcatggttctgcaggctgtacagaaagtgtggggccagcatctgatgtgcttctggtgagggactcaggaagctaacaatcatgacagaaggcaaaggggaagtagacatctcacatataatgagagcaggagcaagagagaaagtgsggtgggggcaggtgccacacacttttaaacaactacatctcacaataactcactcattctcatgaggacagcaccaaaccattcatgagaaatccacccctaagacccaaacaccttccaccaratccaagactgaggattacatctcaacataagatttagggrgaccatccaaactatatcattctgcccctggcctcccaaatctcaggtccttctcacattgcaaaataatmtcgtggccttctcacattgcaaaataatctcttttcaatagtcctccaaagtcttaactcattccagctttaactgaaaagtcccatgtccagatgagttccttccacctgtgagtctgtaaaatcacaagaagttatttacttctgagatacaatgggagtrctagaattgggtatatattcctgttccaaaaggtagaaattggctgaaagaaaagggctatagaccycacacaagcctaaaagccagcaggagagtcattaaatcttaaagcyccaaaataatctcattygactccatgtcccacatccagrgcacacaggtgcaagggatggtctcccaacgctttgagtagctccatccctgtatctttacagggcatagcccctacagcttctctcacaggctggagttgartgcctgcagcttttcctggtgcagggtgcaagctgctgatggatmtaccatactggggtctggagtacagagcctctttcccacagctccaccaggcagtgctccagtggggactctttgtggggtctccaaccacacatttccccttgacactaccctagtaaaagctctctgtgagggctccacccctgcagcagacttctgccaggaacccagacttttccatacctccattgaaatctaaggggaggctgccaagcattcttcagtcttacattctgtgtgccttcaggcttaacrccacacagaaacacaaaggcttatggctcctgccctttataacagcagccagagcagccaggatgtggggaccagtgtcccaaggctgtgtagggtactggggtcctgggcctagcccacagaaccattcttccctcctagacctctggacctgtgataggtggggctgtctagaacaactctgaaatgtctttgaggccttttctccattgtcttggctgtcagcaccttgctccctttcagtcatgcaaatctttctagcaagtggttgctccatagcccactttgattcctctcctgataatgctttttctttctctgtcatgtggccaggctacaaattttccaaacttttacacactgcttccactttcaatataackttcaactttaagtcatttctttgctcccatatctgagcataggctgttagaagcagccaggttagaggcagccaagtcacatgtttaacactttattgctttagaaatttcttcctccagataccctaagtcatcacttttaagttcaaacttccataaatccctggggcatgaacacgatacagccaagttattatcactatcagcattttggtcacaaccatttaaccagtctctaagaagttccaaactttacctcatcttcctttcttcttctgagccctccaaacttttccatcctctgcctattaaccaattccaaagttgcttccacattttcaggtatctttatagcaacacctcactccttggtaccaattttstgtgttcgcccattctcacattgctataaagaagtacctgaagctgggtaatttatagagaaaagtttaattggctcatggttctgtagtctatacaggaggcatggtgattgcatctgcttggcttctggagaagcctcaagaagcttctaatcatgtggaaggtaaagtgtgagcacaagtctcacatggcaagagtaggagcaaaagagagggtgagggggaggtaccatatgcttctaaacaatcagatctcacaggaactcactcacacttgggaggatagtaccaagccattcatgaggaatccactcccatgacccaaacatctgccaccaggacctacctccaatactgaggattacatctcaacatgagatttrgaggggacatccaaactmtatcacccagaaatggtccaacttcaaggtcttgcagtatttgagataatgtgtgcactgctcaggatcacaaaggcttctaaaaacatgggtcamtgagagagatatattgatcccagctttgagtaccaagaggaagaaaaggaggcrgagtttaaatgttgtcagttctcaaacacagagatgaaggctcagggaataaccttagaagaaagatattgcattgtcagaagactgaaagaaaacaaaacaaattttttaaaaaatggtggaggctgaggtaagatttcaggttagcagtagtaaaattctcttttccactaagggcactttattcagagtctgcttaaaatrtgagagggcatcacacacattaataatgaataattccatttcmttttttttaagtgatttacaagaaacttgttgcatagattttttaaaatcaaccaaatgcccttgaagtgtaacagttgtttactagaaagcataattactgaaaatgttgggctacattaatagaggcatatttgtcagattatggaaggcyatgatcccactataagaatgacaactttgaatatttgttatttcttaatttttgcaacaactgtgaaaggcaaataactaaggaggccctgaatcctagytgttagaggaacaggcatccatcagctttgtgaccttgggaaatcctttcaccagctccatagagttgttaatagaagaattcttgagctgatacataaaaagcacttmcttcgtgtagggctgagacttaataaacaataaatagcagcaatcatttgattatctgacaarcaagaaacatarattcctttccttatgtgacttgtccaagatcccacaattggaagaagttgagccagggctgaaatgcaggctcagctctgttttacattccaagtcccttcttcactcgyttctcagctgccttttccctcgatcttgccatggtaacrtcccagacagacctttgctttgccaagatctgatgttgacataataccccatgctatccccaggcttcttcttgagagattgaatgtttccacgttgcttgcatctccagtggtcacttacatctccctgacgatctactctgctaagtacattgcttgcaaaatacttaaacaacaaacaaatatgcagataaacacatctccctgacaatctactctgctaagtacattgcttgcaaaatacttaaacaacaaacaaacaaatatgcagataaacacacctttgcamcttcctgccagctcatcatccaggtctatcttgttcctttgccgcatgcacaagttaacgaagagcaggcccctgtctacccsctgcaccatmctctctctcttyagccctcgcagtctggctctaaccctcctttgtgtggaaacccagaggtccggtgaccattgctatagctgaggcattgctctgtcttctgtttgtcaaccttgacatcaccaagaacctctaagcaccccacaagcctgctgccctgggcttcgtgactccattttgtactttcttgcctcactccaactttgccaacttgtttggtgtcttttcttgactcttcttcctactctctccagactggctcaatttcttttaagaaatcagagaatttcagaatcataagaaatctaaaaagttatctggttcaatagcgatccactgtctcctccactgccgccagtgtctctggctggtgccaccctaggccctgcagtgctggcggtgggctctccctgccccatgtgcccttcagcgcacctttatgtggcccgatgtcggggagcgcctattcattccatccacactgccttcccatggctccttttgctctgccctgtgagatcctccctggcccctgcaccatcaccccagactctgaaggctctcacctctccctgatctccccctacaaccctgaggtttcctctctccagataacagcccagtttcttcacctgcaattcattaaatatgctttctttttctccattctcctgtcactgcacccattccaatttacccatcsgtaaactctgaattttgcttgcctcgaagaatctgcacacaatagagcagagtgctcaccactccagttctggagcagacacaggtggaggtaggtcctcagctagaatgaggtcccaggagctaagttattgggtagctaatgcggaaaagtagtgttctacctgacatagaatagatcgatgatgacaaactgatggccgctggctggctgactgactgcttaggtggctgactggaaggctggctggctggatggatagatatggatggatggatggatggatggatagatgcatagatggatggatatggatacatggatgggtggatggatatggatggatggatggatggatggatgggtcgatggggggatggatatatagataggtagatagatatatagatagattggattcatacataagaaacaatgtcagaatcacagataggcaaaataagttgtttactgaagtgtgcagaaagctgaccagaaacagtaaatgtgagtttgaacctaggtgctccacgtgggcgtggagtttgtcacactgcagttatgagtaagatgtgaggggcagtcacttcttgtcgtcctgaccacgtggttgtgccataycttggtccagktctctgcttctccatctgtttttctcaaaccctttaccrcactctgaaattatcccttttgacttcctttttttttckataccccaaccccactcctgggaaggcaattgtcttgttcakagtagtagcmcagtacctggcatgtagtagcagctcagtgagtattggttggacgtgtaagcggtttaataaattgatacattctgtgcacacacagaggagggtgcactcacacggcgaaattaaaaatgcaaaggcataagcagctttgctggtgttgtcgcgccatcgtgtggcctttttgactattgcagctacaggctcatggctgtatttataccatgaggataataacctgtttgcctcgattgctggtgggatgaagtcagaggctgataggacttactgcactcacktgcttctcctgtacctatcttgctatccttgtgctctcgttagagctgatgtttctcgaggtgcacgtttggcttctgctttttctcattgtgaagtatttgttgatccattacacctggctgcaaatgactactaattccaaatctcaatccccaagttcacattccttatatcagcatttaaagtgacaaagctctctaaacattgcttcagctgcatcccacagattttaatatgttggatttktgttgtcatgcatatcaaaatatttgctagtttccccttgatttcatttttggcctatgaactatttagaagtgtgttctttaattgtcagatatttaaagkgtttttctagatatcttgttactaatttctaaataaattccattgtgttcagaaaatatactttgcaggacttcagtgcttttaatgaggcttgttttatgtccaccagcttgtctgtgttagcaaatgtattacgtgcattggaaaaaaaatgtgtattctgcagttgctgaatgtagtgttctataaatagcaatgagataaaagtggttggttgtgttsttcagrtcgtccctgtctttactgattttttgtcaatttgttctatcaattgcagaaagagatatattaaaaaattcttagttataattgtgaagttgtcagtatttcctggttcttttcattttgctttatgtatctaaggctgtgtattaagcacatgcacatagttaattgctaaatcttcttgacgaattgtcactttatgattatgataatgaaatgtctctagtaacrctctgatactacatttgccactccagccttttatccatgtcatttgccaatggtatgtcttttctggtccatttctttcaacctacctttgtcttcatatttaaagcatgtcttttactttcttttcttttccttttttttttttttttttttttgagacagagtcttacctgttgcccagcgctcactgcaacctctgcctccggggttcaagtgattctcattctcctgtttcagcctcccaagtagctggaattacaggcacctgccaccacgccgagctaatttttgtatttttagtagagatggggttttaccattttggtcaggctggtcttgaactcctgacctcmgttgatccaccagcctcggcctcccgaagtgctgggattacaggtgtgagccactgtgcccggcctaaagcatgtctcttgtagtcagcatatagtatgctattattttttatccatgccaacaatcgctggcttttgattagcatgtttagactattaacatttactgtaagtacgaatatggttggtttaggacttccattttattacttattttccatttgttccctccactttggtttactggatccccgtttcctccttccttttggataatttaatttttttagtatttcattttaattcatctayggacttttcagctacatcctatacatggtttagggtttgctctataggttaaaatatgcataactaatttttcacatttgacttagagttaacttgtctcactttaagtaaaacaaagaaaacttgcagacatattggaccctctaccactaccacccgcattgacctgtatgctatagatgtcatagattatgtctacacacattgaaaaccccaccaggcagtattataatttttgmttttaatagtcataagtatttgagagaagttcagaggaaaaaaatattatcctagctatttatcrttgacttccctttattactgaaaagccaagtttctctcaagtgtcatttttctgcagcatgaagaacttcattttgcatttctcgtagagtgggtctgcaggtgatgttttcttattttctttcatctgagaatatcttgacattgctttattcctgaattccttaaagagagagagagaatgagaaagagtctcactctgttgcccaggctggagtgcagtggcacaatctcggctcactgcaacctctgcctcccaggttcaagtgattctcatgcctcagcctcccaagtagctgggattasaagtgtgcaccaacacacctggctcatttttgtatttttagtagagacggggttttgccatggtggccaggctggtctcgaactcctagcctcaagtgatccacctgcctcagcctcccaaagtgctgttaaaatcctttggccacttaaaaaaatgggctrccttttattgttgagttgttagagttcttcatatattctagwtgcaaatctcttatgcagtaaatgatttgcaaatgtwtctcccrttttataggttatctttccgtgtttttgatgatgtctttggatgmctaatgttttaaattttaatgaagtacaatttatttatttattttgctgttgttacttgtgcttttggtgccatatctaagaaaacattgcccaargcataagccaccatgcttgtccctgaaggatatttttgctcaatatagaattctggattgacagttcttttttttcagtaaatatgttgttttaacatcttctggtcttcacagttcctaatgtgacatctaatcattcaaattattatctccctggacgtgycatttttctctagctgctttaaagaatttttctttatatttggatttcaacaatttgattataattggtttctttgagtatatctttcaccaaattgggaacayttttagccattatttcttcaaatgttttttctgcaccaatctctttttctgatcctcgggaacttcagtgacacatattttagaccttttgatatctgcttattgtttcctgcattttgtcatttttttcaataatgtttctctttgtccttcagattggattatttttattgatttacctttagattatctgacactttattctgttttctccattctgctattgaactcatccagtgtatttttaactttggtttatttgtttttcaggtctaagtttttattttggctctttttaataatttctgttttttcctgtggtcaccactatcattctgattattccaatttatttaccattactttataaagcatagtaacaatagttgctataaagtcctggtctaataatgttaacatctgtacatcttggggttgacatctgtttattgtttttttacttgaaaattagtcacatttttttctaattctttgtataaaattttggattgtttaatagatatttgaatgatacattgattctgagtcccgttacaatcctctgaagaatattgatgcttttgttttaataggcaattagcccagttagattctgaccacaaacttagtctttagtcttgtttacttatgggcagagtttctaatctcagtttcattctcaaatattttgttatgcttctttggatctgtkctgcccattcacagctaagacctaacaacamgattgtctaagttcaaaagcaaagttagaaatccccttctttggcttttttgtccaaactggtattgccatctcgtacaactatgatattaaacaackgtatttattgctttgacaaatgctctgaggatagggctatcaccactgagcaagctstgcatcagagcaattaaagataatgggtcttttccrcggagctgcctgatgggccagrcgttgacaactctcttggttgcttccaaactttggcaattattttaaaaatggggctctaagcatttgggggcaggttgttgtgtggatgttttgtggagcagagaggggcaaggttcctacatatgactgtgtaactattttcctgtcaagtttaaaaattaagcctctggacaaaacacaaaaggtaactacttaaggactctgaaaagtctcaaaatcaggtgaattgtgaaggggagtaaaaagttgaggaaactacatgaaattgagtacattttctgattaattttaacaagaatgccaaggcaataaaatggggaaaaatgtgtcttttccacaaatgatgctgagaaaataagatatcagcatctaaaagaatgaagttggaaacttcctcacaccacacacaaaaatcaactcaaaatgtatctaaaatcaacatgtaagaggcaaacatataaaactcttagaagaaactatagcaataactcttcatgaccttgagttgggaaatattttcttagatatggcaccaaaagcacaagtaacaacagcaaaaaataaataaataaattgtacttcattaaaatttaaaacattaggcatccaaagacatcaccaaaaacacggaaagataactataaaatgggagaaacatttgcaaatcatgtactgcataagagatttgtatctagaatatatgaagaactctaacaactcaacaataaaaggtagcccatttttttaagtggccaaaagattttaacaggcatttctccaaataaaatatagaaacagccaatgagcatatgcaaaattaatcagtaaggatatrcaaacaaaaccataatgatatactgcttcacatctgctaggatggctaaaaaaatttttaagacaataacaattgttggtgaggatatggataaattaaaaccctcatacattgctgaagggattgtaaaatgatgcagcaactttggaagcattttggcagttcttcaaaacattaaatatgcagtcactatacgacccagtaattcttctcttaagaatatattcaagagaaatgaaaataaatatccacataaaaagttgtgtgcaaatgtttatagcagcattattccaaaaagccaaaaggtagaaacaaccaaaatgtccattggaggatgaatgggaaaagaaaacgtggaatccatacagtgaaatggaaaataaaaaggaatgaaatactgatacgcactgcaacttggatgaattttgaaaacattacgttaagtgagaaaagccaatgacaaagtaccacatactgtaagattccacttatttaaaatgtccagaatagacaactctataaacatagaagacagattcgtggtttccaggggataagggaagatggaatggggagtgattgctagtgtgtatgaagtgatgaaaatatcgtagcattagatagcagtgctggttgcacaaccttgaatatactaaaaaccattgaattgaacatgtaaagagggttaatgtattgtatgcgaatattatctcaataaagcagttatttttcacctatcggaatggtaatgtctagtggtagtgctgacgagagtgtaggtaagaargtattctgcatgctgaaatgggttgtgcaaattggtacaacctctttcagggtcagttttgtagtttktattaaatgtaatatgcatataccytttggcccagaatttccaattctaggaaaatattctactagtaaaattcatatatrtacacagtaaagatttggtagatctttgtgtgttaatataaaatgatctttaagatattttgttgggctataaaaatttgaataaagtctatacaataryatcttattctaatttttgaataaggtctataatatttttccaatgttaatttccagattttgattgctatcgcatgattgtatgagttgttaacatgaaggtaagctggtgaaggatatatgggaactctgtgctatttttgtaaatgtaagattatgcaatataaaactaaaataccataataactttggtaaaaatatgtatgttgtgaaaatatagctatttgaatggaaatgaacatccaattcaagagaatggtttcctgcgcatcatgagtggggcgaatagaatgagagaggtgtacagtagtgatttcaactatacttgcaatatttcacttttyaaacttcatcatatatagtcaggtgtttattacataattctttgaaattttcatataaaaggaaaatacacacacacaaaaggcaataaaaattgttgcaaccaatgtcgtgagtctgtgaatagtgaatacctgaatccatctaaggtcccatgattgaagctgctgctttgaaaacctcgacagtgttagtactttcatttgctgcacaaaggcacattttacttcactgctggatggatccaaaggggaaaatattcctgcgaggatgctgttctgtcactggacggaaggcaagggagtccgagagtgtggagaaagaaagaaaatccttcaacaactgtgccttccgtgactagagccgttctcatttttacagggagacgccatctgcccattcaggaatgtgcggtgagactctctccttgggctctgcacaccaccgtgaacattttgtcagcacgggtgactcatagcttacacggaaaacagtagcctgtccctagcaaccacacatcgtcttttccccagacatttccaatttctctgcactcctatggagactgttttcttcttgcttcactctttctgtgacataagacagaaattttcacagctcttccacaccatgggtgtatatggactgaaccagcataacagcaaataaacgrtggtggacccaggtactggaaatagccagaccrcttaccttaagggaaaatgtaccaggaagaaccttagtgtccagccagcttctaggaactgctttttggtctccaaaggatggggacyggtggtgggccaagcagcctcgggtgagtgtggcctcctggttctcgatgctgatactgaacatgcagtaaaaccctgtgagrgagcacgatggctaggaacagccgattagcagatgaatgagaataaatgggagaaagtggagccttttccagccagtgttctttaacaatgatcctcactgattcgctgccacacacacgtcagtcctcgcctcaagatgagcatattgctcgccgtggattcctctctcctgttgacgtcctctctcttctcctgtctcggtttatcaactactttttcccttccaatggcctttccctttctctcctgtgctggcggctcctttcctctctctgatctgcaaacgtgagccctcttttctgcacagcctcagattccgcctaagagattcacccattctttgactwtatggcccatttatgcctcagtgattcccgaatgtgtatatccaactcaggcctctttaagtgattacttgacaaatccatctgaaaatcacacagctacatccaacttcacacatctaaaattgtctcgttctagccccaaatatgttctcctctcgtgttctctctcktggcgactggtgcctccatgtcccttcttgctcccaacagacatggtgtcattcttcacgccccacatcgtccctctcctcatccccctcatatcttgttccttttttgcagcgacacccctctgctggagtgtctggccccagggcaggcagaaggagcttcgcttcctgagcatcctgaacaaagagttcagttggagatgggaccgccaatgtcaccttaccaaggagaacagagagctgcagctgcctccatggcagcgatacctccaggtcactgtggcagcaggagtgactggggctggagagaaatgactgcccctgggctgcgggacatttgcacatttgcagtaggaagtgcagagggcttcatgcccgagagctgctgagggagccaggggcamttcctggggcaagtggggattccaggagccrtggacctgtgttgtccctgagctcakcacatmcagtgctttgctcaargcagcaggcctccgagcccatgctgcagttgcttctctaattacttccatccactttccacctcctccccttaggtaggaagtcctgccagagtcacagctgtgagaaaagtggcaccttcctgaaacagctgagtcaagtcagtcttctcatgacttcatgtctaatccctcatgtttctaataggaatgaaggagggtaaaccatttagaaataaaacataaagatttatttgcatgatgtctccatgaaacagctccttggactgtctgtgggaggaagaatgttgcaggaagaggacatggcatgaaccggcamggttttccccaaaattccaagggacaccagggggcacagaactggaagtcaggcagctgagtcctggctaggaaksagtgggacgtgacacctgccaagtctgaagggagagaaaggaggccacagggcagggcagccaaggagcaggccggactctcagcctcaggagcccttcaggagggggccttcgtgggtctccagggtctgccagcatgaggggctgtgccaggctgcactcctaggggctcaggaaccaagcccttgtgtyrccagaacgctcagacacgctgctacatcaatatcttctgaaggggagctctagacttatagaagtgggagatcaggatggcagatattaatgatctgccaattaatattaattatgcctctctagtgagcaaattctgagaaaggtgttttcctcattggcaaaatggtttaggaagcccttgacaaggttgtaataggagttaaaaatatgtgtgaacatatgtacktgaatatgtatagtatgtatgtgaatcgtgggtatatatatataaatatgtcaatgtatattgtgcatgtatacatatataaatgagtttatgtatatatgtatataataaatactttttaataaatttttaataaaactttttaagaaatttttaataaaagctttattgtggtgtaagtaacagmacaaagtgaatatatttaaattgcacaattttagtttgatgtatgcgtactcctgtgaagttgtcatcacaaatccagaaaatgaacacacccatcacacctagcatttcctcttacccctcaatgcatctctccctcccaacctctcatcctgcaagtgactgcagacgtgggttcttaactgaatattagtttgtattttacatacttttatataattataataatacactgtacttyttattgtctggcttcttatacttagcataattattgtgagattattcaatatggtgacatgtatcaatagtttgtttctttttattactgagcagtattccattgtgtggatataccaaaagatacttacccatttacctgctgagaaacatttgggctattttcagttgtggctatgacaaagcctttttgaacatttgtgtgccaatatttctgtgtaataaaattttcatttctcttgagtaaatatctaggcatggaaagcctgggccatatgatagatatctctaatttttttcaaaaaatgccaaaccttttccaaagtagatggacaattttacattgctactgccagtatgtgagactggtgctccacactttgccaacacttagtatgattagtcttttaaattttagctattatggtaggtgtttagtggtttctcattgtagtttcagtttgcattttcatattaattaattatgttgcacatattttcattttcttgttatctagyatatcttatcttgtgaagtgtgttaaaatcttttaccatattttgattttcttaaaatttagtagtgagaattctctacatattgtgtgtaggtacaagccctttgttgtatatatattttataaatattttctcctagtctgttgcttgcctttttatgttcataactgtgtgttttaaaaagcaaaagttttaattttaaggaaggcaaatttattgagttttttgtattctatagttgtggcttggaggtcctttaaaaactacatttgccaaatccaatctcactcagattttctcctctgttttcttctggaagttttatagyttttctattacattttggcctattacctatttccagttgatgttttaaatggtragaggtaagggtctatgttttgggtcagtctgtttgtttttcatttggctacccaattgtcccaaaaccatttgttgatgagattattcttgagttgctttgaccactttgtcaaaaatcagtagagcataggcatgtggatctatttctgcagtttctagttagttgatctcttcttctatctttttaccatacagctttgattaatgtagttctaaaatatagctgggcatggtggtacatgcctgtagtttcagctacaggaaggaaaatcacttgagcccaggagttcaagactgtagtgggctatgacagcacctatgaatggatgctgcactccagcctgggcaacatagggagaatccatctctaaacaaaataataatgacaataataaaacrtgtcttgaaatcatacaggacaggttttccaactttattctttttcaaagtcattttggctatattaggttgtttgcatttccacttaggttttagaattagcttcttaacatttgtcaaaaaaagactgctgggatttgattggagtagacttgaatctatagatcaatttgaagggaaatgacatgttaataatattgtcttctaattaataaacataatacatctcttcatgtgtctaaatcttttacttttcttaggaatgctttgcagcaagatattacaaataagataaatgcccacaagtaagtaatataaattataatgcatgatgttatatcaggtgagagacatatattactaggtaaaatggaaaacccaaattacagcagattaaacagattgaattttgattttctctgatgtagaagtcttgaaggagamwgtccaaggcttgtatgaaagatccatgatggtgtcaggggcccaggtctttctgtatttcttgtctgtcaacctgactacatggcttccattcatgatcaaagacactgctcaaactattatcaattcatccacaatacagacagaaattcagaagagggtggtgggtgggaggaaaactgcttaaaacacagtgggagaagtttagaactcaattaagcaagcaaagtgggaaagaataatcatttaaagaaataaagaaaaaaaggatgcattcaactgacatgccaagaagatccaacagatgcagaacagatattcccaaagggagaaygaagatcacagaacagagcgtcaagctataaactgtaaagaaataagctacaagttataaataaactaaagaaataaaagcttgttctttagatagaaaagtccactgtaaccattaaaaaattgacagagaacaatccacaagttactgagaagttactgagaagcaatagcaaagaaaaaaaaccttttgacatccagacaaaacaggctaagtcacctgtaagagaagaatacctgtggccccagaatgattcctagaagcattccttcccacacgtcagctgagcaatgtctacagattctcaaagacagaagaaaattcagcatacggccagtgagtttttctgttcggctaaattgttgtttaagtgtaaacggataaaatataaggtataaatagatagtaataaaagtaactgtctaaataaaatacaaatgtccagtttactaagcctatacacataaaacaataaaaacagagattagtctagtgaaaaacaagttgtaaataagcaatgaaaatagtaaatgtaagtaaaagtcatgataaaatgaatactatctttcacaacaataaatgcaattgaactaatctcatatttcaaagaaagtctctcaaactggatcaaaaggcaaaaccatatatatgcaattttttaagaaatgcttaagatagaacatacctgagaaactggtaacaggagtttcagctgaagaataggatcacagtttgaagtgagacaagaattttttgccccacaaattatactatatattaaaagatcttaatttttatgttttcatgaccaggaaggtactcccaggcattagtggggcctatctgggaaaggggtttaaattcaaattatttttaaaacactgtgtgatgaaaccaaatatttttgcaggtcagaaacacaggtcaagagtttctaatcctgatgttgctacttaaaagaaaaaagttttcacataggaggcaaaggaagtcaagtgcagttgtagtagtgggggctgtgaattcccaaggccatgcgaaggtttttggaggaactaggacaagaaagggctgtgaagaatgggtagaggtgggcagccaaggatagtgggaggcagaaagagcagcagggccttgcatcctggtcattgaagttcaatgtgtgtccatcctattacactgagagcttcctaccattaactctgcagctgccgctgcattttatacttagaaaaacatgtcacaggaagtcatcatgtcatggaaaatcatcaactttggattcaggtgagtgcaaattcgaccccaaccaatgactgcaaccattgcagccaaattcaacccgtaccaatggctgcaaacagaacacagcttaattgttaactcctaacaattaagctgtwtggcttctcccaaatatatcaagatatgggaactattgagggcaatacatctgtatcgtkgtgtgtatttttaggacttcatatttaccattcatagttgccatagaattcaggctggaggaaaggcttcagcccaggtgctggtcaggcatcctctctccatgcgctgtgccccacctcatccgccctcgctatgtctttactttcactttccatcgattcaattttttggaagatttttctttaatctgatatagcatccaaataaggtggcagaacaggagaaccaccatttgcttgtggatagttacctttgcaagccatggaaccatctgtttgcctkaggtgccctcaggacagacccatgaacttcatgaatagccaagcctgcaagaacacacacactgcctgtttgcctcatcaggagggaatgtgctcagagtcaggactgcaataaggaagattcatatatcaccctcgccttgacattcttgatctaaggccaccccactgccccagcacaatgattaaaactgccagttgcatctaattaaaagtagtgggacctaagagctgctctggaaacatggaaaacccatcttaatgaccactaactagctgcattttctttctgaaagttccatccaaactctttatgaaatgtcaccatgacatggggcaaaatattcacaccaatgccacagatttgttctgatgggagaatcttatatccacccaactttcaactagccagacagaaagcactgtgtaagcattgggggactttggcctcacatctcataaacagaacacagcccagcctccagcgctggaaggcagaactacccctatggtgctggcacctgggctgaacactcacagagaaaccagtggtcaaaatcctgtggctacacttacacgaagttggaaagttctccaggaaatatgattctatcacatcttcagaatacttaaaatcttttcagtgaagttcaatgtcatccactggaaattgttttcaaatgtgttatccatgacattaatttatgatgatgaagaaatgatgtcttttcagaatagcattttaaacctagatgtgtgttaagttttgagcagttgagtcaggtgtcatgctgtctgaaacatatattgtcacattgtaaggagtagtattgtttaagaatagtgtagaaatgatgctaaaataatccagatgaacccaaccatgtaactttgatttagtcacactagtggtgagagaccacggtaggcagtaactagctgtgagyatcctgggcacgacgtacaggaacaaccatagacktttgaaacagatttgcctgggttttaatttccatattcctctggttatgtaagcgtgacaagcgtctgaaaccttcaagctccaggctgactatgaacgtagagcttccaacacctatcccatcaaggttgttgtggtggaaaatagctatgggaagacatttcatggcataaaatcgtcccgttgattttcctctttcctccctagttttctgaagttcacatctggaattttggaatatgctgtctcctagaggccccactgtttctgctctataaaaatacacatagtaacagcacctgtctcaatgagttactgaagagacaaagtaagaatgcattattagagacagtctctggcatagactgagcctttagatgctagctatggtcatcatgcttggttaaggtcctggcagattttttraagagtccatatgtataatagaaatagaatatgaagttgtggcagaaaaatttggaaagacacaggagataagttagtaagggagaaacaaaggggaaaatattcatttgatgaaaagaaactaaagtaaatagaagcagggcatagataggaggggaggaacttggccaggggcggtggctcacacyttcagcactttgggaggccagggagggaggatcacttgagctcaggagtttgagamtagcttgggcaacatggtgaaaacttgttgctacaaaatgaaaatttaaaaatkatctgggcatggtaatgcatgcctgtagccccagctactcaggaacrtgaggtgagaggatcgcctgaacccaggaatcaaagctgcagtgagccgtgatctcaccacggcactccagcctggtagacagagggagaacctgtctcaaaaaaaaaaaaaaaaaaaaaaaaaagcagaacttatatgagcacayttaatgtacttatccattatasagctaatgcaaaaatgaaacrtggtatatgaaacaactcactgagactcaggccatcatgctaataaatttcttgcaaaacttacatacacacagtggccatgttttcaaaccaaaarctgaagcatacaattaagcatacaatttgacttctgatcatacagtaaaytaaaaattataataaatacttagttttcatgagtgcttacaatgttcttaatgcaagactttttaatgcaacttcttgcttttaaatactttcaatatagttgtgctcttttgaaaaagacaaagccaggttatttctaactaaaataatctgtgtgttctttctttaatttaatctcaacatattgaataacaatatgcaatcatatcctatgcattttagttcacaaaatattgttctttggatatgattttgaggatatgcaaagttctcaaaccgttttccccaatgtgaaagtaaagttaggcctagtcgcatgaacagcagttgtagtttctataggagacattctacaaataaatcacacacaagttggctcaaactgtagttaattatccatgtcaaaaataaatcctcaagagactattaagatgtgccactttctttaaaaacatgtaccttttaattagaatacacacgacctcctgtttctcattccatcttccatccatcactcagacccaaggaattttcctcagtgccgtctgaacgctgtgttgtcctggtgagcacattctcccacataggtgaggaatggcgtgtatttccagcacttggcctctaagaacagagcacacagcaaccagcatggaaggggactccgcctgcagtcagggagcaaagcaaaagcacccctcaaagaagtcagagccaaatgaggcccagtgtgtgctygctctagggcaactcctttgattcgtaccagagggtggtcttccctctgtgtttggggcagtgctttcttgtctctrtcatacaaacccgcaaaaacaatgttagcaaaatcctgatctttaacaggaaagcagcatgaccaaatatttccagagaaatcttatgckcttgctgtaagggaaattgcctgatcraatgtcatatagtcaggaatactctagaacagtggtcctcaacctttttttggcatcagggactagtttcatggctgacaacttttccacagactggggaggaggggatggtttcaggatgattcaagtgcattacatttattgtgcactttatttatttatttatttttatttttttaagacagcatttccttctgttgcccaggctggagcacagtgatgcaatctccgctcactgcaacctccgcctcccgggttcacatgattctcctgccttagcctcctgagtagctgagattacaggtgcacaccaccaagcctggctaatttttgtattttcaatagagacaggatttcatcttattggccaggctggtctcaaactcctgacctcaaagtgatctgcccgccttgggctcccaaagtgctgggagtacaggtgtgtgtgcttcatttctattattattacattataatatataataaaataattatacaatggtgatgtgtatcagtgatgtagaatcaatgggagccctgagcttgttttcctgcaactagacagtcccgtgtggggtgatgggagacagtgacacctgaagtgtgtcacttatgtccaggctactctgtaatctcattttagtcgctgtcactgcagaaaaccctgcttcacaaagacaggttgttggacatggaagcaggcttttcagtgcttttgtggcaacctcaggatattctacctggactttcatccagaacatatggagatttgaagttgtctcaaacatatttttaaagccattgtcatttgccatctcaagcagttgatcctcttctagcacagacagtcagtttaccgggcttattcacaaaygggtcgcggatccattccttcccagttcggggttcttttgtggttggtagtattgggtaggtgatcacgtgtcagccgcgggaaagaaggccctggctccgtctctttcacaatctctgctaatgtttgaaacatgtcagaaatcccagtgttcactcatcaccctcataattccactttggctttgaatgcagctgctttatctgccgacttgaacacagctgtcattctcccctgaagtgacagattgatttcattgaacaggttaaatagttcacacaagtaagcaagttttgcaacccattctgtgtcactgaaatgtgctgccagtggtgactgtttttctaaaagaaatctctggatcctaaaagaatctcctaattaaaaaactgtggccagcaatctacctttagaaagcatctcacttctgtgtatgagaaggtgtatgtgctctgcatygatctactcrcagagctgcatgaacagacatcagttaagagcgtgtactttaatgtggttgataattgtaatcacatcatgcaaaatgttgttaggttccggggacgttttttggctagctagcatttctctgtggatgacacagtatgtagactcacattcagaagcaacctctttgacccgagtggtgaaaccagaaagccgtccagtgatggcagccactccatccatgaatatactgacacaaaacgaccagtttagttttcccgatatgtaatcattcaaagacttcagtagttctgcagctggggtgttgattagcarcaaaagaacacataacatatcctcctgaacatcctcttgaagagtatatcacacataaacaaggattgttgccttgctgtcaacatccgaactcatcaacctggattgtgtcccacggtgactcattaatcctctctaacaattgtgcctcgatatcttctgctatttcatcaattcctctggttacagtgctagacgaaagaggaacacctgccaccttttgaactacagcctttcctaaaagttcacaacaaatgtccttagcagcaggcaggatcagctcttcactagcagtaaagggcttcttagcttcagcaatgcrgttagccactaagagtgatgctctcagtgcagacacatttgatgaagtggtggccttcaataattgcttctgttctttgtgttcacattttcttcttttgaaaactccaaagacttgtcttttaatgcaggatgcttggtctccatgtggtgaagcagttttgaaggtttcatggctttgttggatagccagtcgccatatattataaaaagtagacttggagaatgtgaatcacctgttacaatgaacctgtaatttaagtaggactcttggtattttctttcaaatgcagctttctttttgttggcagtcttagagtcttctgctctctcatcattgggtctttcttccttttcgaagaagccctctagtgacatttattttttactcattttggctggggttarcttgtgggcttaccaaaactgtgactgagacaagkgtgcagtgtgggaaagaggcaggaacagaaatgctcaacaaagtaataggcaagccatgcacagaataaaataagtgtcggattctgacttaaagctgccaccagatgcagctgtgcaattgaagtgcatcagctcacttgccactgtaaagcctgcgaccagaggcagcttaattgtcacttgccactcacagatagggatatgagtcttgcaattgatgtattatggtctctgtgcagggaaacctctctgctaatgttaatctgtatttgcagccactccagcactagcattactgcctcagctccacctcaggtcatcaggcattagttagattctcataaggagcrcacaacccagatccctcgcaygtgcagttcacaatagggtttgcgctcatatgagaatctaatgccaccgttgatctgacaggaggcggagctcaggcagtaatgtgagtaatgaagagtggctgtaaacacggatgaaacttcattcactcgcccgccactcaccttctgctgtgcagcctggttcctaacaggccatggaccagtaccggtctgtggcccaggggttgcrgaccccttctctaaaagccctataggaggtgcaggaaattattttgagagcagggtcattaaataaatctatttctacacttcaagtaattatctttcaaaccatttttgtctatttttcctttcagttctttccatccttgcttcatgttcattgaagctgtttttttttttttttttttttggtacatgcacatttaggattgctctatcttttggtggattgagcctttcattgttagtggtggtaagtctgtatgggtctgcagcaacctagatttttgcctccttggaagaargaatttgaccrmggggcacagggcagagrgrgagaccactgaggcaagttttagaacagaaatgaacatttattacaacattttagagcaggaacaaaagtaaagtacacttggaagaggaccaggtgggcaacttgagagatcaagtgcccagtttgacctttgacrtggggattttataggccggcatgyttccggggtcttgcatcccttctccccgattcttcccttggggtgggctgtctgcygtgcagtggctgccagctcttgggaaggggccacatgcacagtgtgtttcctggagttgtacacgtgctcgcttgaggcatttttctcttaccagtcaagtgttcctagaggaagatcatatgcctgttaaacttcttcattttgcctcttagtgcacatgcttgagcccactggcccaagtcctgagatcttttcgggaagctgctgatcactggcttcaggtattttctrctgggagacrgccttaattggttatgaccaattattattttagagagacagttcwcaatgacctgaccatcccctgatgctctcctaacattcctggtgttggcaggggggctcttctgccctgctcctgcctgactagctacctactaaaacatarctgatgatcccatacaagctgacttctccaagggttgaagggccaggtagggtggacttgaccagggacaaggtgctaattgtcagaggaaagggtaattttttatatgctgtagcagatgcctctctccatacccrcatcatccaatgtctgcacctgaaggacagaacagttataacagttttttaatgtagaaaaagccatatcactaaaaatgctattaatccaatggggccaacagaaatgctttggagctcctcttacagagtatgagacacagtgacagaggcagctttccccgaatgtgccggccactttctctttagcactgtsgtggycccaggctggggcagctccagtgagcagctccartgcagccggaagacactatggatgtcacactcggcagaaatggcagctccctcaggtttttgtgactgaaaaatcccaggggtcttcaggtgttcatgttctgtgtatcaccacaggctgtgccygcctacgtgtgcccagagggaacgggtgaggcctggagtccagcgcgcgcctcaccgcccatcctgcctgatgcgtccttccagagcacatcctccttctacgacgacaagggttccctccagggtaaaggcaggcccagagacgtctgtccatggtgaaaggacactgtccagagaacttgcaaaaataygatagggaaactgtgaggctggaatccgacataaaccctgagaatgagcatcggtggcctctgggtgatggctctgaggaaccccagaaagtcaggctgygcagtcagcgaagcacaagaaagccaggctggcatgsgggccactgtgtgcaggtcacatactaaattatacatttcaggaagaagtgctaccgagtttcaggaaaaacagtgrttatcagaactttaaaaatccagatgtgctattagaaatgaggacatacacaagagaaccatcttggaaagaacaagtgtgcacagagacaggcgtggggatgacacwgcaccacgagccactgtccatctctccatctgcagaggagaygcacaggcgcagatgcacgtgcacagacagctggagagcaaggggacgtcctgccggtgtgaagcatggccttggctccttacaatcactggtcaggaaaaaaaaaacaaaaaaaaaatgagyagtgaaaaagtaaccagctcaggatataatttgatagaggagtaacgcaatggattttttcttctggttttaataaaaaatcaagttgctcaaaactactgattttaaactaccaagaaaaagaaagagataagctataagatgacaatgtttttagcagcccatcagatttctgaggataaaagatacgtaaacaaaccaaactctagaaagtgacaagccactcacaggagtgaagaccacaggcacgctcttacccacagcagaatgacaaaaacgaaatggctggaggccaggagaaactggccacgtgtttgcatctgcaggtaagtgggtgaccagctggcatccctgtggctggagtcaccggcaatgctgcacccggccttcaagcgttccccaaaggcctctgtggagcccttcactgagcgctgagggataaagctgggagcagggcctgagagacaggatgcattcccgggggccctgctgagtctcacccacktgcagagaaccagtctcagaaaacaggagacagagtggaagcctgagtggagcccctcccaggcctccagacaatgccaggcaacggttcggaaacacagacagggcctggaaccatgcttgtgttaacacccttggctctgctgatcgtccctcaaaatatttcagcacatggtgacctgagccaagctacaactgcagcaaacccagaccygactcacctgtggatcagggcaatggasctgcccttctgcagcctggcagaatccatctcaccmctctctgcagcaaacccagatcctattcacctgcaaatcagggcgatggacctgcccttctgcagcctggcagaatccagctcacccctctctgcagcaaacccagatcctattcacctgcaaatcagggcratggacctgccyttctgcagcctggcagaatccagctcacccctctctgcagcaaacccagaccccattcacctgcaaattagggygatggacctgcccttctgcagcctggcagaatccagctcactcctctttgcaggaaagtatcatctacttcactcttaactattcctttctacaagaatacccaacaaaaatcaaatgtgataaaacatgaaaaagcaaggcaatgtgacccatgtaaaataggaaacaggcagccaataaataataccataccaaagaggtatgagtaaaaagtacatgtaacagataaaaaatkacgtactagaaagtatttgacttgttcaattgtttaaaaaagacagaaaaggaaagaaactgggagaaagaacaagagggataaataaaattatatcccagcacagaagacataaaatgtrccatgtcaataacaacctgaattataaatggactagacactccaggtaaatgacagtgattctcaggcaggtaaagtagcaagactcaacttcaaactctataaaaaatgtattttaattattaagacactggttgaaagtaaaaggtcttaaaaaaagatatatcatgcaaattatgcataagaaagttgtgtggttattttactatcagaaaaaaagtaaacttcaggacaaggaatactactagagattcagcaacacagtttataatgttaaaaggatcgatgtatcaaaaagacaaaaatatgcaaagtacatatacacctaaaaacagagcttcaaaagtcataggacaaaatataaacagaactaaaaggagaaataaacaaattaattattacagttataaattttaatgcttcttttcctgtaattaatgtaacaaatatacataaaatcagtattgctttggaagatttcaacactatggaccaacttgaagtaattggcacatatagagccctcctcccaatagctgtagaagacaagtccttttcaagtgtacataaaactttcatgaagatcaatcatatgatgggtcataaaaagtctcagtaagtatcaaatatttgaaataattctgagcatattctctgtttttgtatgtgtgccgtaaggaaggggtccagcaccataattttgcatgtggatactgagcaccatttgttgaaaaaatgatttttctcccatgatatgctttggcaccattttcatacatcaattggccacaaaagtatgtgtttcacttctggactttcaattgtgttccacagatctatagttatatccttacttcaataagatactgtcttgattattgtagctttgttctaagttttggaatcaggaagtgtgagtccttcaactttgtactttttcaagaatactttggttattctggtttccttgcatattcatatgaattttacaatcagcttatgcattttttgaaagaacccgctgggatttttacrggaattgaattgatctttagatcaccttaggaagtactgccatcttaacaatattgtcttctaatccatgaacattaaatgtctttccatttatttaggtcttttttaatttccttcaaggatgttttatagcctcagaggacaagttttacacttgtttttaaaactgtattccttgatgtttattgtttttaaggctattgtaaatagaattgtttccttgatttcattttcaaattgttcattgctggtgtatagaaaaaaaagatttctatattttgatctcataacccacaacttgctgaatatattagttctaatagttttttatgtgtgtgaattccttatgattttctatatacaagatcatgttatctgtgaatacagagagttttactccttccctttcattctggatgcattttatttcttctccttgcttgactgctctagctagaatttccagtgtaatgatgaataaaagtggtgagaagagacatccttgtctttttactgaccataggggcaaagcatttagtgtttcaaagttaaatataatgttagatgtgggtttttaaataaatgtccattatcagatttttaagaatcaacaaaataaatatgtagaatattcacaaatatttagaaactagtgacagtcttctaaatmgtgcatgtgtaaaaggagaaatcacasaaaaattgtgaaatattgtggaccaaatgataaaacacataccaaaatttgttgtatgcagctaaaactgactttagaggaaaaatgtataatattaaatgcttctgttaggaaaaaagagagttttaaagtcaatgacgtggatttccttcttaataacctagagaaagaatactacattaaacccaaagtagagaaaagaaacamtaccastaaaagtggaatcattgaaatagaaaatataaaagggagaaaattaataaaagcaaattatggttccttgaaaaatcaattaaaactgataaacctctaactggatggataaaacaatgagagggaacactcaaatttgtaagaataggaatcaagaagcaacatcaccagagtccctatagacattaaaaagaataagagatttttatggaaaatctaatgtttctaaattcaataacttagattaatggacaaattatttaaaagatattagttaccaaaagtgactgcagaagaaacagaaaatccagatagcttcatatctatttagaaaattaaaatattaattaaaaacttttccacataaaaaacctccagggccaaatkgctttactggtaaattttataaagcattttgtgagagcagcacaccttaataacaaaaattgacaaagatgttaccaaagaaaaaaaaaagccatatctacatcccttaggaatttrgtaaccaaaatccccatgaaaatgttagcaaacaaaatccagtagtagataagaagtctactacacaatgaccaagtggggtttatccaaggaatgcaaggttggattaacatttggaaccaattcatataatgcaccacattaacagaataaaagagaaaagaygatatgatcatcttagtggttgtggaaacagcatttgataaaattcaacatgcctttgtaataataattctcagaaaaaataggaatacaaaggartgccctcaatctagaagatctaaccacagacatcatatgaaatggtgatatattacattctattttcctaagattgagaaaaggcactgactgatgtctactgtcaccatttctactcaagactttagcagaggtcttaacacctgacataggaccagaatattatgtaaaaggcaaacagattggcaaagaagcaaaactctcagaattcacaagtgatctatatgtttatacagaaaaccccaaaactactagaataagtggtcttcagagtcacagcacacaaggtcaatatacaaaaataactgtatttctacatactaacaacaattgaaaagtgaaattacaacagtwaattttttataataaccccaaaagaaaatcaagtttctagaaatatatctcaaaaggacaygcaaggcctctgtgctggaaaccatraaaccccactgagggaaactaaataagatttaaataaactgaaaaaatggtacatgtttatgggctggaagacacaagattgtcatcatggcatgaacctaaaatggtttataaatttaatgcaaaccccagcaaaactgcagtaggatagcaggggtttttggtgtttttttttcytttttagaatcagacaaattgattctaaaatgtatgtggaaacgcaaaaacaaatctaaaacagccatataatttttgacaaagaaaaacaagtttagaggacttgtgctccttggatttaagaatgattataaacttacaataattcagacagtaaaatattggcataaggataggaaaatagatcaatggaacagaataaagagtcaagagtagagcacacatgtatgggcaattaactttcaaccagtgtgaaaaagaacctcttttttaaactatagttggtgttgtttaacctcatgaactttaaaaaaagaataaaactatagttggaaaagctagatatccccaggraaaaagagataacaccagaccccatctccctccatagccagaaaataacacgtggcaggttgcaggcctgagcaaaaaactgagggcagcagaacttctgcaggaatatatacaagaagcctgggcaacatggcgagaccctgtctctacaaaaatacaaaaattggccaggtgtggtggtgcaagtctgtagtcccagctactcgggaggttgaggtgagaggatcagttgaggccaggaggttgaggctgcagtgagccaagatcgcactactgcacaccagctgaggcaacagagtgagatccttgcagaaagaaagaaaagaagaaagggaggaaggaaaggagagaaggaaggaaggagggagggagggagggagagaaggggggagggagagagggaaagagggaaggagagagggagggaaggaagggaagggaacagaagggaagtgaagggaagggcaggaagggaggaaggaaaggaggagggagggagggaggaagggaggggagaaagagagagagaacaaaataaagaaaagaaaaaagaaaagaaaagcaaaggagaatagcttcgcaatttttcaattcagaaaagatctcttaggacatcagaaacactatctataaaaggaaacaaaattgataaactagactttaaaatttctactcagaatgtctactactaagaaaataaataggtaaatcactgattagggaaaatcttcacagcacacgtatcttgcaatggactcattcatcatgtatagagacttctgacaaattggcaatgatgaaacaattagacaatgaaaagacaaataacctaatttaaaaatatgcaaaaaacttggacaccacagataaaatrtatgaatgggcaaaaagaatatttaaaaggtgctcaacatcaggcaaatgcaagttaaaaccaccatgagatatcatttcacatgcactaaaattactagaatcaaaaatgacgacaacaccatgtattggcaaggaagtgggacaattagaatgctaacacattgctggcgggcatttaaaatggtacaattacttggggaacctgttcaacagtttcttctcaagttgaatattcactaaccctatgattgagtaattttatctctaggtatatactcaggaaaaatgaaaatatgttcataaaaggatgtgaygagaatatgcatcacagctttatttttaatggataaaaactgaaaacaattctgtggcccaaaaagagatcagatagacaatagaatgtatttagtaattaaaaaaaaaaagaagaaacaaactaattagaaaaggacatttgtggaacggttggcaaaatttgaacaaagtttgtagataatttactagatactagtagtatactgtttctggttttggtaagtttactatggttaagtgcaatgttaacttacagctcttttatctattatttttgcaactttttataagtctgaaattatttcaaaataagaataaataaagagatatataacagttaaacaaattaaaaactcaagagtacatatttatgattccagttgtgttaaattggtctataatgataaaagttagaaagtggttgcttggtggagggagttggagagttgattggaggggatgtgaggaaattttgtgatgatggaaatattttctatcttgttttgagtgattgttacagaggtggatacaatgttgaaatgcattaagaacactaaaggccagtgcattttattagatgttaattatatctcaataataataataataataagacaacagaaataatgtaccaaggaaaatatcaaaattggggccaattattttgaatgaagaaaaagtgataattaaaagataaactctaaaaaacaagagcataaagcagaaataggagaactatgagaaaagatgggttgagaacagaagacaaaggaacactatttgtgagttaggaaaggaagcataagaaataaacacagaatagctcctcagaggcgctgagccccaagctaaggaacatgttctcctcttccaatcccacttcaaaactgctttttttcagttttgcaagagaaaggctaacagttcacccgtcaagacattgacctaaggtttaaaaaccttgggcattgtatgaaaaggacaatttaaaaattatcttaagtaaaaagtaaaaacctcaatattcccactgatcaccaccactagtaaatcttagcagggataagatgtcaaataaaattttacttgtaaattgttaaaattgtttactgaattttgtattatatttatgctatattgaaaaattgtgtactaattatatcatgatacctcagtccagaagaaaatgtctaacattaagagtcttatatttaaaggaaagtaaacagaaaaaaaatggaatatattgtacagatgaatgggtaaatagatacatacagtgtgatgtgtgtgtgtgtgtgtgtgtgtatgtgtgtctagaaatacgatagaaagatcaataaaaaagttttaggctgggcacagtggctcacacctgtaatcccagcactttgggcggctgaggtgggcgaatcatctgaggttgggagttcgagaccagcctgacaaacatgaagaaaccccatctctactaaaaatacaaaattagccaggcgtggtggcacatgcctgtaatcctagctactcgggcggctgagacaggagaatcacttgaactcgggagggggaggttgcggtgaggcaagatcrcaccattgcactccagcctgggcaataagaatgaaactccatctcgaaaaaaaaaacgttttaatattcgttgcatattacattaggatatacttttgtaggccaagtgaaatgaacatacaaattcaaagagaaaaacttaaaatccctgctgagaggactcacagaccccctgaaggaagtagattgctcctgtagaacccaggcgacaccccaaataytgtgctggtatccacagctgagaaacccacaggtggttcacatcacaggactctgtgcagacaacccccagtaccaacccagagcctggtagacttgctgggtggctaaatccagaagagagaaaacaatcactatagctcggttctcaggaagccacatccacaggaaaagtgggagagaactacatcaagggaacaccccatgggacaaaagaatctgaacaacagccttcagacctagacctcccctctgacagagtctacccgaataagaaggaaacagaaaaacaactctggtagtatgacaaaacaaggttctttaacacctccaaaaaaatcacactagctcaccagcaatggacccaaaccaagaagaaatgcctgatttacctgaaaaagaattcaggaggttagttattaagctaatcagggagccaccagagaaaggcgaagcccagtgtaagaaaacccaaaaaaatgttataagaagtgaagggagaaatagtcaaggaaatagcataaataaaaaacaatcgaaacttcaggaaacaatggacacccttatagaaatgcaaaatgctctggaaaatctcagcaaaagaattgaacaagtagaagaaagaaatcagagctcaaagacaagctctttgaattaacccaatacaatcaagacaaagaaaaaagaataagaaaatatgaacaaagctccaagaagtctgggattatgttaaacgaccaaacctaagaataatcagtgttcttgaggaaggaaagatttataaaagtttggaaaacgtatttgggggagtaatcgaggaaaaattccccagscttgctagagacctagacatccaaacacaagaagcacaaaaaacacctggaatattcatcgcaaaaaaagatcatcacctaggcacattgtcatcagtttctctaaagttaagacaaaggaaagaatttgaagagctgtaagacaaaagcatcaggtaatctgtaaaggaaaacctatcacattaacagcatatttctcagcagaaaccctacaagctggaagagactgaggccctatcttcagcctcctcaaacaaaacaattgtcagccaagaattttgtatccagtgaaactaagctttgtatatgaaggaaagatagagtctttttcagacaaacaaatgctgagagaattcaccactaccgagccaccactacaagaactgctaaaaggaacactaaatcttgaaataaatattggaaacatcatcaaaacagaatctacttaaaacataaatctcacaggacctataaaataaaaatacaatttaaaaagcaaaaacaaaaaactgaggtatacaggcaacaaatagcaggatgaatggaatggtacctcacatctcaatactaacattgaatgtaaatggcctaaatgmtccacttaaaagatacagaatttcagaatggatgagaattcaccaaccatctgctgccttcaagagactcacctaacacgtaaggactctcgcaaatttaagataagggggtggaaaaagacattttaagcaaatggacaccaaaagcaagcaggagtagctattcttatatcagacataacaaactttaatttaaagcaacagcagtttaaaaagacaaagagggacattatmtaatgataaaaggccttgtccagcaggaaaatttcaaaatcctaaacatatatgcaccaaacactggagctccmaaatttataaaacaattactaatagacctaagaaatgagatagacagcaacgcaataatagtgggggacttcaatactccaccgacagcactaaacaagtcatcaagacagaaagtcaacaaagaaacaatggacttaaactataccctggaacaaatggacttaacagatatatacagaacatttcatccatcaactacagaatatacattctatacaacagcacatggaactttctccaagatagaccatataataaggccacaaaatgaacctcaataaatttaagaaaatcgaaattttatcaagcactctctcagaccacagtggaataaaaccggaaatcaactccaaaaggaaccttcaaaaccctgcaaatacatggaaattaaataacctgctcctgaatcatcattgggtcaaaaatgaaattaagatggaaattaaaaaattatttgaactgaatgataatagtgacacaacctatcaaaacttctgggacacagcaaaggcagtgctaagaggaaagttcatagccctaaatgcctacatcaaaaagtctgaaagagcacaaacagacactctaaggtcacacctcaaggaacttgagaaagaagaacaaaccaaaccaaacccagcagaagaaaggaaataaccaagatcagagcagaactagatgaaattgaaacaaaaaaaatacaaaagattaatgaaataaaaagctggttctttgaaaagataaataaaattgrtagaccattagcaagattaaccaagaaaagaagagagaaaatccaaataaactcaataagaaatgaaatgggagatgttataactgacaccacagaaatacaaaagatcattcaaggctactatgaacacctttacatgcataaactagaaaacctggatgagatgggtaaattcctggaagatacaacactcctagtttaaatcaggaagaattagatgtcctcaacagaccaaaaacaaggagcgagattgaaatggtaatttaaaacttaccaaccaagaaatgtccaggggtcaggtgcagtggctcatgcctgtaatctcagcactttgggaggcagaggtgggtggatcacgtgaggttaggagttcgagaccacccttgccaacatagcgacaccacttctctactaaaaatacaaaattagctgggcgtggtggcacatgcctctaatctcagctactcaggaggctgaggcacaagaatcacttgaacctggaaggcaaaggttgcagtgagctgtgattccaccactgcactccagcctgggtgacagaacttgtctcaaagaaaaaaaaagaaaaaaaaaaaagtccaggaccagatggattcacagaagaattctaccagatattcaaataattggtaccaatcctgttgatactattccacaagataaagaggaaaccctccctaaatcattcaatgaagccagtatcaccctaatactaaaaccaggaaagaacataaccaaaaaaaactacaaatcaatatccctgactaacaaaatactagctagatgaattcaacaacatatcaaaaagataatccaccatgatcaagtgggttttataccagggatgcagggatggtttaacatatgcaaatcaataaatgtgatacatcacataaacagaattaaaaacaaaaatcacatgatcatctcaatagatgcagaaaaagcatttgacaaaattcagcatccctttatgattaaaactctcagcaaaatcggcatacaagggacayacctcaatataataraggctatctatgacaaacccacagccaacataatactgaatggggaaaagttgaaagcattccctctgagaactgaaacaagacaaggatgcccactcctcttcaacatagaactggragtcctagccagagcaatcagacaagagaaagaaataaagggcatccaaatcggtaaagaggaagtcaaactgtggctgtttgctgatgatatgatcgtttacctagaaaaccctaaagactcctccagaaagtgcctagaactgataaaagaattcccactactgggtatctacccagaggaaaagaagtcattatacaaaaaagatacttgcacaggcatatttatagcagcacaattcacagttgcaaaaacgtggaaccaacccaaatgcccatcaagcaacragtgcataaagaaactgtggtttatatatatatgattcaatactattcagccataaagaggaatgagttaatggcattcacagctggatggaattggagactatcattctaagtgaagtaactcaggaatggaaaaccaaacaccgtatgttctcacttataagtgggaacaaagctatgaggatgcaaaggcataagaatgacacaatggactctggggatgccagggaagctgtaggaggggagtgagggataaaagactacaaatagggtgcagtgtacactgcttgggtgacaggtacaccaaaatctaacagatcaatgctaaagaacttgtgtaaccaaacaccacctgttccccaataayctatcgaaataaaaaataataataataataaaataaaatccctaattattttagctgtatgtatgctaacgaatgaatattaagtatgaatttttttgatatcaagattccactgggtacatttgaaggccttttttttttttttttgagacagagtctcactctgtcacccaggctgcagtgcagtggcatgatctcagctcactgcaacttccacctcacggtttcaagcaattctcctgtctcagcctcccgagtagctgsgactacaggcccatgccgccacacccggctaatttcttctgtattttagtagagacagggtttctctgtgttgctcaggctggtgtcaaactcctgagctcaggcaatccacctgcctcggcctcccaaagtgctggaattacaggtgtgarccaccacgcccggcctgaaggcattttataacctctttattctaaaatgttagtacttaggtctgtgcggaaattgcaacctttacaactataaaaacttattatcaaaatcttaccagccaatttaacaaatgtccaagaaagcataaagtttaaaaaattatttgaaggggaaggcaagcagaaatgtacgtcagccctaggtctagagcatcatcgtacctcacataaaagatcgcagtagcctcctggctctgtcccctgctactgctcccctacaagaccttcttaaaaaaacagtctgttttgcaggggaggggaaggcaaatccaatttcgtctcctctggaacatggtgtcagtgcatgcagtgcgaaatgcaaacgctcgacgggcctggagggtgtgcagggccacttttctcacccctcacttctcctccatctccccctttttactctccatgctctgtccatgttggccttctgactccttgagtacgacaagtgattcctcctttcgaagtccttccgtgtgmagttcatgccctggagatgcttgcacaggtcttcaggtttctggctctttctgaccttcaggttttggcttcaaggtccactccccaggaaarcatttcctgacaacattcattcaagtgctcctcatccaagttgttctttttcccaagacactgcttattttgggggtaacatttatcataatctgaatgtatctccttttaaaaacttttttctgttgagtgtgggttacctccactagagagcaagtgccaagacgacgcaatggggtttcacccatccctgttcctcaccaccacacacctaatgccaatccaagcacataatgagtgttcagtacacgctcgtgaaagggagggagggagggacagtgacagcagctgcatgtgaaggtttgggaggtgaacgcatttgcagctggtgctctgcagggcctacatgctgctcttgtgcctccattctccattcagacctacagcattttgcatctgccacatgacatcaccaccggtcaccctcacccccaccacctgcctcttcctccagccaccacttcccacctggcatccagtcctgggttttgtaaggctaggctaagccattcttcctctgttacctggtgtgctggctgccccttgagagtttaccagctcacagaggtcttcctcctcttagaattgcagagccacgtctgtacctgctcggactctccatggtgaggtcaggaagtgcacctgagtgtgggctctgcactcagcctgctccactgacaagtgtacacaggaccttgcacaggacagctcacctctccacacctccagtttcttttccatagatataggataggtttctgaagaggttgaattcacatatgtaaggcacttagaacagtgacacacaaataatargtacccaaaatgataactgcttttgtgtcccaggaatttaacctggcattcagatcaaccagtttgtttctgcaggtgactagaaccagtgatacacgtttgaactctgagaagtgagcaccttctaccatggagattcttcatgggatttattggagggaagtgttgggacctttacgatgccttggaattgtccaattgtccttttgttgggcatctggaggttttagcacctgggccaatgcaagtcccagtgagccagcaggaaccctttctaagtggaagaaggcaaccatgacagggttgggatgggagaacttccaccccaagaaccttctcgggcagatcaattttaggaaagaatacacgtggaaattgaggatttggaaaaatattttctcattaaaactttcagctgggcatggtggctcatgtctataatcccagcactttgagaggctggcagacaacctgaagtcaggagttcaaggccagcctggccaacaggacaaaaccccgtctccactaaaactacaaaaattagccaggcgtggtggcacacacccataatcccagttacttggaaggcagaagcaggagaatcacttgaacccaggaggcagagattgcagtgagccgagatcctgccactgcattccagcctgggcaggagggcgaggctccatctcaaaagaaaaaaaaaaamaaaamaaaaaaaacaaaaaaagccattcaccagagaaagccaccctgcagagaaaaatgggtgtgtgtcccccattctagttcttctgtcagggataaaacataatgccaggacccccttctcattcaaatgcgcaagagacatcctggctcctcacctaacagcatcaagctttaagttttgttttgttttgtttgtgttgtttgttttctaagggatttttctatccacattaataaatatctttgtaattcaaagtttttccttctttttagaaggaagttttattttaagaataatgtttattaacacaagtcttctataatcagtagtgtacaataattgcaggttgaaatgaaagaaagaataaatgaaggataggttttccttttataagtgctttttaaatgtttcattgaggtgtaattgatatacaaataatggcacatgtttaatgtctacatttcaatgagtttggacatatacctacatccatgatacygtcaccaaatcaaggtatcaaacatctccatctactcaaaattgttmttgtattgctttgtactttttaaattttatatagtatattttaattacatttgaaatcttttatcaaatacatgacttgcactaattagaacttaaacacaatatttttaaattatacacaccaacagctatatgaagataacacttcacctaagggtattcatttgtgatgggtaaaaattactattgtacttggaaatgaatcatttgactcaaagttacacagtttaaggtaaatggtattatcatttctaaacaatgaactccaaatattctcactgaattccataagaggagtgtaattcctgtcccattgatgtagggctgggccatgtgactttctttggctaacagaacaagagtgaaaacaaaagtggaagcctgccaggtctaagaagytcggtgagttcctgccagctccacagtccccaccttccaccctgagagctgtgcccagattagtgtggtcgggagcctggggctccagtgaaaagacccatagcctgaacttagactgatatggtttggctgtgtccccacccaaatcttagcttgaattgtaataatccccacatgtcaagggakgagccaggtggaggtaactgaatcgtaagggcagtttccyccatagtgttctcatggtagtggatcagtctcacaagatctgatagttttataaaggggagttcccttgcacaagctctcttgcctgcggccacgtaagacatgattttgctcctcctttgccttctgccatgattgtgagtcttccccagccatgtgaaactgtgagccaactaaacttctttcctttataaattacccagtctcaggtatgtctttattagcaacgtgagaatagatgaatacgtagacccaccctgcttggagcagagccacagaccccaacctgtagccactgccgtgccatgtgagggagacagaaatatttgtttcataagctctagagcaagcttgtccaacctgcaacctgcaggttgcatgyggcccaggacaactttgaatgcagcccaacacaagtttgtaaactttcttaaaacattatgagatttatgcatggacttttttttttttttagctcgtcagctatcattagtgttagtgtatttcatgtgtggcccaagacaattctgcttcttacaatgtggcccagggaagccagaagattggacacccctgctctagagatttagaggttgtttgttacccagcattatcctaatgaaaaccagtcaacacagcttaagggtagaatttggttttacaaagctaggaaactgtaagcaatataaaactcactagaaattcagaggcacatgaattctttatctaaatgagatactctccctgtagagtcattgtcagtggtagggggtacatagagtctcaacaagagacaagtgtttgtacaagatgtcaaatatgacatactaggatcaggggccaccatccccctactcaagtgcaagttcaggctctgttcttagaagcagagtgaaagagagtatccacctaagtgatttcctcattccttagtggtggattatttgctccttctgagaaggaaacaagaaatatcagagtaaagtccttcctgagataaggctctgaacagattggtatggtcttctaggtccaaaagttatctgttgttgagacatggaggctccccataaccccaaacctaagtaaatgaagaccaaaaaagaaaatctcaaaattactttacattgaaagagacacagaagacttgatgactcacaggtaacagaactggcccagggctggatcaagtatcttaactgtctcyacaggggccacttattggtgcatcttttggatttaaagaaagagacaatgtattcgtgtatgtcagtggaagatggagtgccctcatcactcacaccaggtggatcaaaagaagcattttagttactattattcaatgaggcagaactgggaccttgaacagaggcagatgactgtctagctaacagccacctcgaaccaggcagaggccagttaatagattcactccagcattggcttttgactgaaggtgagaagacttgggatggttgtgtctgtccacagtgacgagctgtgtgtccctacacttaagaacatgatgtgcgtcttgccttagaagacctctcaaaggaacaatttgatgatcagatctttctgaaattggttttcagtctctggtctctgaaatattgctgtctcttgattggattaatttctggcttaaataatttctcagttggttgcggcttcctctgcccagcactawctctttcttgcagcatgagccacagactagtaatcataagctcttattaaaataagtaactgattttttaaagtcccttttatgaaatgtgttggagacacattttttatttctgtctgtctctyacaagcttctgctcttcctcttccactcayaacctggatactcagctgcgttttcagaggcagcaccatstgctcatagaattcattggcaaactcaattttcaggtacaggtgttgccatgcactctccaggtgagcttttatcaattgacccatgtaatggttaatattaagygtcaacttgattggattgaaggatgcaaagtattgttcctgggtgcgtctgtgagggtgttgccaaaggagattaacaatttgagtcagtgaactgggagaggcagacccaycctcagtctgggtgggcaccatctaatcagctgccagcataaaaacaggaatggaaagagcagactggctgagtctcctggccttcatctttctcccatactggatgcttcctgccctcaaacatcagaccccaagctcttcagcttttagactcttggacctgcaccagtggtttgccaggggctcttggacctttggctacagaatgaaggctgcaccgtcggcttccctacttttgaggttttgggacttggactggcttccttgctcctcagcttgcagacggtctattgtaggacttcaccttgtgatggtatgagtcaattctccttaataaactccctttcacgtatacatctttcctattcgtcctgtccttccaaggaaacctgactcatacaaccccaactaatacaaccctgaacaagattcacattgcttttgcctaactgaatcctttcctcacttggctttgtttacacattttcttagcatgtgttgttaatacaggttgagctagaaaatatttgttactttttcttcctcaacttttattttctcattctagtgatcagctggctctccactgctaatacattccattgcttgcttgttttttaatagttatgttcctgccctgagaatcaaaattggtcacaatccgttttcactcccagtgtaagtgaaatcttctgcatctttctaagtcacccaaaagcatctgctctgtgttttagctctgtatggagctcacccagccttctgcttttggtagcaactgccctttgcaatctgacattgcctttatgcccagaggagttgataatttgaatgtcctttctttgaattcattaagatatgtttacttctttagttctttcttttttctttctttcttttttttttttttttttttgagatggagtctcgctctgtcccccaggctggagtgcagtggcacgatcttggttcactgcaacctctgcctcccagtttcaagtgattcttttgcctcagcctcccaagcagctgggactacaggtgcacaccaccacaycyggctaatttttgtatttttagtagagacagcatttcaccacgttggccaggatgatctcgatctcctgacctcgtgatccacccgccttggcctcccaaagtgctgggattacaggcgtgagccaccgcaygcagcctacttctttagttttarataattctttgtagactcataacatgtctgtatatttctggctttccagcatggtggcatctttattagctattgaatcttacattcaaaggccagcacattttcaagagtttcagagtgttttcctcaagtcctgtgccttgcatcaaagacaagctcaaacttgagagtcatcagaatcacgtttaatttctagatctctcatagctttgttgtttattctatgttttgttaatattctaacctttaacatcaggtggkttcaggctcaatggctcttctctattttgaggtcatcttctggagtctctaatataacatggagttgaaggtagggccatttccaacattttgaaatcctcttcaaacactttcattctcacaatacctacttctgtgttctctggtggccctttcttcctctggtatgatacaatcttttcttttttttattttctttttttttttttttttgagacggagtctcactctgtcgcccaggctggagtgcagtggcgcratctcggctcactgcaagctccgccttctgggttcacgccattctcctgcctcagcctcccgagtagctgggaccasaggctcccacaaccacgcccggstaattttttgtatttttagtagagacggggtttcaccgagttagccatgatggtctcaatctcctgaccttgtgatccgcccgcctcggcctcccaaagtgctgggattacaggcctgagccacggcgcctggcccaatcttctgtttctttgtccactgttgattaaaatttctggtgaattattgwaaagatgcgccttctttttttttaacaataaagtagctattttttattcactttgatttggatcattggaaatattcaacaataaataaaatagagaagggactgaggaaagtgggatcttgctaacgtctttcaaatgcatcctgatcaatgcccagctgcggaacaacacggacagtggcaaacgggaatagaaagcgaattctaaaacaccaacagcccaacacacaagacctcatggaaaagaaagtgctcaagaaaccttggctttaaaggggattccatgaagggaagtaattgtgcaggaggaagggaatgaacccgtgatcaccctaatagcagtggcaggaaggtcctgatgcaggctagtgttaaagctgacatcccacagttcaggatgtacrgatgcaccttcttacgaaatagattttacagcatttttcatttggcctagcagtagccaatgagacagatcgctccactgaaaagtgcttcttctgagcaaaacagatacattttctaacagtgcccagctcctgaccagaacctggcatcatctctactaaatctgagtgaccaaggagtaaaaagccagtctgagacttggccagtaatacccacctggygctccctcttgcataacttgaactttgatctatgataggtaatggttctctctttgggggaaatgttgagattcaaagtaatttttgcattggggtgaggagccacagctccagctcctgcctctctcctcccttcatgcccacttttgtcacaagctcagctgaggcaatgtcgagaattgagaaaactcctgtttccatttgagggtagatgcttgctgtgcacctcctaacatgggtagctcagaaaacacccaacggctgatggggctctcaggccgcatggttgcctgggtgggcagtggggggatcatgtcctcacgatttttaggagacttttgtccagctggaagggttttcaataaaccaccataatacatcacargtcttggcaaaggttgtttccctctcaatctttattttgtctttatcctgaaaccgtatcattctggcggtactctagatttgatctttgtcccctgtctatacagactgaagacaagaaattattttgttttcctagcaggttctggaatctctaaattccctctcaatatttccacttccttcctgagctcatgtctatcttgtaggtctttgccttatgcagctgagcggagcctggttgcgctcrcaatgctctgcgtgggagcacctcagccaagtcggcaagtttatggtgtacatttcccctctcctcccagttactgcaggtaaacagctttcccagcgctttgcactggttcacatgggtggccattctctcggatttaaaccagttcccttgcctcgcatcagatatcccaaagccaatgccacttgttttcagttttggctacgttcttgctccacttataggtaccaatttctataacagtttgcttgtgctgcataacaaaccaccataaaatcttagtggcataaaacagtgttcacggggctgcaggtgcctggaaagcggtgttgcactgtggttctgcttcgctgcctccactccacgtgtgtaccctctgggtccagaacgaaaggacgttcactcctggggagggtctcatgaaggccatagaagcaaggggcagggaggacagggaaggccttttaaacctagtctcagaactagcacattgtcaacttttgctaaygttctaatggccaaagcaggtcacatggcaaaccaggagaagtgaaggagtggaaaagcaggctctgttttttgagggagaaactgaaaagttacatggtgaagggcatggatacaggaaagagcaaagaatgagggccaataatgccagccrtcacagtagtcactctcggaaacgattaattacagcattgggcttaaaatccaggatctcwtgatctatatatcaggcctgggtgaagctccttttgatccagaggcctgttctgcccctgacacccaacataaaaagtcaatgaatgctcccatctgaaaagcgagagaaccggagatgcctcacagttaccaaccccactgggcagatgttgccaggccccctgctctggaggtaggaacttaactcacctaagcctaggttcagcatcctggcattggctcccaaacccgttgttcctgcttgatctgctttccttctggctgcattctgtaccctgaaatctagtttttctgttattaacatggatactctggctttcttttgactgctgttagtatggcacatctttttccatcatcttattttttaatctatttgtggttctctctctctctctcactctctctctmtctatatatatagatgtatctgtatctctatctatatctctatctatatctatatctatgtctatatctatataattttttgagacagagtctcactctctttcccaggctgcagtgcagtgacatggtttcagctcactgcaaccttcacctcccgggttcaggcaattctcctgcctcagcctcccaagtagctgggattactggcatgcrccaccacatccagctaatttttgtatttttagtggagacagggtttcgccatattggccaggctggtctcaaacccctgaccttaggtgatcagcccacctcagcctcccaaagtgctgggattacaggcatgagccattgcgccccacctgtggttatttatttatttcattttattttaagacagggtctcacttagctgcccaggctagagtgtagtgaggcaatcactgcctgctgcacccttgacctccttggttcaagcaatcctgccacctcagcctcctgagtagctgagaccacaggaatgctaatttttttttaattttttttattttttcacagagacggggtctccttatgttgcccaggctggttttgaactccagagctcaagtgatcctcctgtctcagcctcccaaaatgctgggattactggagtgagctaccatgctcagccctgtgcttttgtatttaaattgcatttgttgtatggagcatataattggatctttttttaaaaaaaattatatctgaccatctatgtcttttatttggaatgtttagaccatttacacttagtgtgatgattgatatgactaaatttttgtttgtttgttttgtttgttttttgttattttgtttgtttgtttttgagatggagtctygctctgtcgcccatgctggagtgcagtggcgcgatcttggctcactgcaagctccgcctcctgggttcatgccattctcctgcctcagcctcccaagtacctgggactacaggcgcccgccaccacatagggctaattttttgtatttttagtagagacggggtttcaccatgtcagccaggatggtctcgatctcctgacctcgtgatctgcccacctcggactcccaaagggctgggattacaggcatgagccaccatgcccagcctgtttgtttgtttttcattcttttagtattttttagagacagccttgctttgttgcccaggctrgtctcaaactcttggcttcaagtgattctcctgcctcagcctcccaaagtgctgggatttcaggcacgacccacgatgcccagccatggctaagtttaaaatkaccatcttgctatttgttttccaattgtcccatctttttatttgcttttctctcttattctgccttctttgaactgaatatttttataattgtattttatctcctttgttgtctttgttattttaattgttgctttagagattatagcagacatctttaacttatcacagtctaccttcaagtcacattataccacttgatgtadaatacatatagtataatgtagaatgtaataccttacaatattatagtttcatttctccccaaccctacagctatttctactatatatttgctttagcacatatcataaacccataatgcattgtcattatttttgctgaacagtcaattatcttttagagagatttaaagaataaaaaaagtattttccaattcctttctctggtgcttatgtcaaaggttaattagtttcttcatgtccacccaatccctcttcctgtttaacttgatgcatggatgttatgtattgcttgccgaaaagtttgccttcatgaacttctttatatttatttgatgtcagaattgaagggatgtttcatcaccattgatggtacataagaggaaataataatatctatgccatttgtctttttattcctttcaatgaactgtcatgggagcaaaagtctcaacctttgttctgatataatttgatgacttagccttttagtttgcatggaaaatttttagataaactgcaatattacccatgagggtacatactctctatttctgtctaggataaagtcaaaacccatgcaattgtgcaaaatcatcattatacacccattattttgtaggaattcaccctcaagtgttaatcaagttattcttaattgtagtgagcataaactattttaccaaaacacttggatgttattactgtaagagctcttatagttatttgttttgtctactgacatatgtataagtccaaagtaacaagtgttgttgtttataacaattaaactactaatgaatgccaagagttaacattgcagttgtcttttgtgtgaccatctgtagcaattagcttttgctgtataatggaaactaaaaccaacagaattttctgtccctgttttaagcagtatgagactaggattgattttccctgtttatgttaaatactgaaatcatgcattaaaaaaaaaatagctgcttgctccaggacatactttgcacctggaagacgaaactgggccagctgaaatagcttcccatcaagactcactccaggaccccacccactgtagcctccactccagagctgatgtcctaaactccaccaaataccaactgattctccgccttgcagtatctgattaaattgtatgacctaggtcaaaccctgtaaaaagctttttctgttttcccttgttttagacataactataactatagaggcaatgttatcccttcctgtctaataaaattagctttgtttgatgaacaggctttcctggaagatggcaattgaccaaagagccacaataactgagtggcatataatagtcagcttttattttgctgatgtgtgtgcaaataatgggttggctttaccctccaggtatttagataatggctaacctcaacggtagactcacctttatattaaatatgcatagcctcaagtactgttttagataatgatacctttagggggtaatgatacgtttagatggtttccgaaaagaaagtataggaaatttaaatcttacagacaaaacttgacattttgtttattgtacaagtctctaaatggatcagaagatgtcatctctgtattttcacttctatatcctacagtgcgtcattgttacaaagatgaaacacaatcacttttaaaggatttgagtttagaaagttgatttaccaataattggcttacatgaatacatatcaaggaagaaaattcccaaactgagaattattaaatttttgcagtctcattatatgtataattatttatgtctttggaattactttttttttttaagacgcgtgtcacccaggctggagttcagtggcacaatcgtggcamtgctgcctgggcctcctaggctcaagtggtcctctcacctcagtctcctgagtaactgggaccacagatgtcctatcacacctggctaattaaaaaatatatatatagtagagctaaggtcttgctatgttgttcaatctggtctcaaactcctgggctcaagcaatcctcccacctyggcttcccaaagtgctgggattacaggtgtgtgcctccatgcccagcctagcctcttctttttaatgataagaaagatattagaattataagcataaatataagaaaaataagcttttattctcaaaactagtgccttagaaattgcggaggagctttaatatcaaagcactcgtatttctcrgtaggttgtcgtaataagttgagtatctatattatacagcaccataattttcctgtttagtaatacacaagactttctaaaatataatagtatgctagaaaacagattggggttttacartggttacgtttatgtgtcaagttgactggcctaaaaaatgcccagagaattggtaagagagtatttctaggtgtctgtgagggcatttctggaagaggttagtattgaattggtagacagagtgaagatcaccttcaccaaygtgggtgagcagcttccaatctattgagggccatttagcacaaaaggacagaggatggctgagttcgctctctctgcctgagcggagccgtcatctttgcctgcactcagacactgcacacctggttctcaggcctttcagcttggactcattatgctgacagctttcctggctacccagcttgcagacagcagatggtgggacttactggcctccataattgcatgagccaattctcatcataaacctctccatatgtagaaatataaacataagtacaaatatataatatctrtctcctatttgttctgtttttccgaagaaccctgactaacacagtcgtggatctctttaactttctattarcttctagttttaatgattaggctgttttaaacctgattataagtaaactgtcttaatctttgtacagatgccatatactgatttgcccatattcctaastaggaatatagtcttcaaaattcaccttttaaatgcacgattcaaatttttttttcttggctgggtgaggtggctcacacctgtaactccagcacttttgsaggctgaggcaggtgcatcgcttgaactcaggagttcaagacaagcctgggcaatatagtgaaaccccgtctctacaaaaaaatacaagtcagctgggcrtggtggtgtgtgcctgtagtccaagctacwccggagtctgaggtgggaggatcgcttgagcctgggaagtggaggctgcagtgagccaagaycacgccactgccctccagcctaggtgactggagtaagaccctgtctcaaaaaaaaaaaaaaaaaaaaaaaaagtctttctagaaagcataattcctatatatcactactatctcttctcagaggaaaatacatataataagaggatcagaggctaggatcagtggctcacacctataatcccaagcactttggaagtccaaggtggtaggataacttgagcgtaggagttcgagaccagcctgagcaacatgrtgaggccccatgtctacaaaaaaataaaaaaaaaaaattaaccggatatggtggtgtgcacccatagtcccagctacttggaaagctgaggtgggargattgcttgaacccaggagctctcggatgcagtgagctatgatcaggccactgcactccagccttgggaacagagcgagacccggtcacaaaaacaatacaaaaataaaaaataggatcaggtcacagatattaaaacagttgcaggtttaaagatcactcccaccttacatattggtcaattccactgaaaccccaaagacagggtgctcagattgtagaattccatgttcaagagtgaactaaatattttttggtcagcactcacctgaatgttaggataattcagaggaatttcccaacagacatgagaaatgtgccttccaaattgcggcaggtggcctgagagcttgacatgagtttctcatgtgcagcagcrtcttgttatttgttataagggcttcataaacagagctgggtttacaaggagtcttatgggctcagaatcttaactgcgatgtctaactctctaagattatatcttttttttttttcttttttttgagacggagtttttgctcttgttgcccaggctggagtgcaatggcgcgttcttggctcaccacaacctccgcctcccaggttcaagcgattctcctgcctcagcctcccaagtagctggggttacaggcatgcrccaccacacccagctaagtttgcatttttagtacagacagttttctccatgttggtcagactggtctcaaactcccaacctcaggtgatctgcctgccttggcctcccaaagtgctaggattacaggcatgagccaccgcgctgggcaattatttcttttatttcttataaccaccctgatggttaagcattttcttcctccatttttacagttcagaaaattgaagtttgggagtagataactttcctagggtctcacagcaagtcagccaaatgaacaccaaaatccaggccttttataccaaattccaggctctttccagtatacagctgccactgcccacattgcataaccagaaagaccatgtttgaattattaaaatgttaattcctagaatttgaactctgggacacctttagaaactcaaactctcaagtcgtcatctatcttccacatgtgaaaatggtcttccccccaacctcagagcttaaggtcccaggggaggggcatgtgactcagtctccccacagcccccacagtggggccacgttccccagttgtackcttcagctgcccaagctcagtcgacaacgttttcctcttattccsacactattagtgttactgatgcccgcaaaggggccagcactggaacagaccctgaaaatacaaaacccaggcagtcagggttgtggagatggacaagggttcagtgaggtggtggactgtgcagaggggatcaccggacactgggatcacagggtggcactgcctgcccttaaccccttcccaaatgtcccccagacctcctccagcagaaccagcacctatgcaattagaagccacagtccagatgtctggaactagttctacttcccaacactacctggacagtgggtttaatcaatgtattctcccaaaatacwtcaatcaatctcctgatttgggggtattgccaaatgagtagtcgtaaaaccaagaaaaacttttaaatgataatttacgataagcatgtcctgcttggaaagcaggcacaaatgatgctaaaaagctagctatttacacgtcatctctggatttatactcaataaagcaaaaacaaacaaactaaacaccactttgtcctagaactggtaagtggagtccaaagaagtcagagttggacaagtggtaaagttagcaacgctgacttggaaaaaacaacttttgctacgcctgtgggcgatatcatacccctgagccttaatgtccatgttgctagtatattcataatgccgctttgacactcctgcattactaacccagctctaacctactggccacctgtaacttcgaatactaaggaatactaaggtgtacttggaatactaaggaatacaaggtttggaatactaagctggaagtagggtcaacattaaggattctgccactagatggagaaattgtcccaatccagcgccattgcagttgtgttttgcttttgagaaaaagcagcgggaaagatatttataaatgccattttgttcaaagtgctatggtaaccacacttttcattgacaaatgataactttttatccatttattttatgtacagtactttagcttgaatagggtggacagcccatattcatcttgatgacatcagtatgttctaggttctgtctttatccacatcatccatgattcaatgttgagtaaatctcttaaaaattacttaacatcttttaagttgctgtggcaattagcactaagtctatgcaaatttcacttccagttttgcaactaattagatacaatattaaagttcttaatagattaaaatgctttttggggataaggtctttaccaccagctacaataaacagtaaatactcacaaaaggaggggcttcactaataactggacgaatcacattttgcatattgcgtttattttgcagaaaatgctttctgctgattgtctttggctactttgtcaaaagaaaaatatgaaacagttatagtttaacaacacaagagattagctacatatgcttaaaatacacacattctagggggcagagcagtcaaattttcaattcaactaaaacctgctgtcctcaactatgattttattctgtccttaacagctcaactctaactacttgaaagcaacaaggaagaagattaagagtgtgctttttatctcactaaagtaggactggtggagtttataaattctggtgtgccaaagttgccaatacactgtatgagaaataaaccaaaaaaagtttctggaccctggcaaacatttttccaccgtcagtgaggttgggccaactgcatcatctccacagttgggttcatctggaagccacctgggacagcaccgctactgcaggtgtgagcaagggatgctggggctctggggaaaggtgccgtgtgctcctccactgctttgaaaaggaagttactgaggctgcatttccttcttaacctgagactgccactgggtacctagtaggtcaatccagtcaccactggctgccacgacaaaaagtcactgcatctttcgggacctgggccttgctgcttcacatggaaggtggcgacacaggtgtccatgaggctatgaggcggccttgggctgcggcgtcgtactggctgtccacgatgtctgtggccgcggccgccccttcgtacagtggggatcccgaggaagagggcgccgagaccggatgggtgaggggtgtgtagtgcgcgggggagccccggaagaactgggcccccagcccgttggacacggctgctgcctgggagcccggggtgacggcgccgttgctcacagaccacaggctggggtactgactgcaacagaaagacaccagtgagcagggcctgggcaggggctgcaggccagctaaggatggaaaaacacaccagaaatcccattcggagtgactgtgtaatatgacagttttcttctttcaaacaggtcattttctccaaattattaaaggactcacaagcacaatctgtgatgtatagaagttattgtcgtatctattaataagaaacaaaatcatcaggaagatgactgaaaagattattcacatattcagagctcatgaaagagcgctgttaagtttcactacgaaagactcataccaggccagccgcagtgggtgatgcctgtaatcccagtactttgggaggccaaggcaggtggatcagctgatgtcaggagttcaagtccagcctgactaacatggtgaaaccccgtctctactaaatacaaaaaattggctgggcatggtggcacatgcctgtaatcccagctacttgggaggctgaggcaggagaatcgcttgaacccgggaggcagatgttgcagtgagctgggattgcaccattgcactccagtctgggcaacaagagtgaaactccgtcaaacaaacacacaaaacagaaaagaaagactcagaccagtagttttgcactctcattcagaataaaacttttcagatagtctcaatcaaaagttactgaggatgggcttaagtacacatgtttttatctaggacaccccacccccaccaccgcagtgattctcacgacgaagaccagcctctcctcaaacactaagcagcagacattccttagagtaactccagtacagacacaattccctgcactttgtcctgttcagtacataggtgtgctagcatggtgcccagcagcaagaaaagcacctggcagtcagactaggaagccattcccagttccgcctttacctagctgtgtcacattacactttgcctgagactacttataggctgtgtttctcaaggcataaaatgaggaaggtggaaatgactattgaattctccagtctaagcacatggaagtggatagcattcaattatggtaagattttattttgggaaataaccttgtctttctacaagtgaataatgagaccttatgttgtatcaccatactgttttaaacaagtctgagttaatcaaggcagatttttatgccattttacaaatgaaagcttcaggttctaagatgcccaattagagccacactgagaccctcgggtggggcctctgtcaacagcttgcagtgtgcgggtcatctgatcgggtgcaggcttctggggcgatgctcttggagcccctgaaagcttcgcttgtttacgcattgttgctctgtttctaaccacgggcaattgaattcttattatgaaggaactgttttctagacaagaattaagatcgcaggcatattttggtattctagaaaatgaagtgcattgcctttgaggtcaagatcacttaattccaggctcactctgctgtgagctggtccaatcatttaatatctctggccctccttcctccctagaaagtgagggttgacttctagctttggtattttaggtttttatattcatcctatgaagaaatgtaagacatttaccagcctgcttaatttgtaagcctttttccctctgcataacttgcaagttggtaacaaaatagtcatcattgtttaccagttacctagcacatatattaaagacttcgagcctgtatccatagaaaagccaataaactcatttccttcatttactagcttttgttggaaaaggttccgaaacgatctctttaagctctacctactgaccccaacaaccctgtaggagacaggccgaggctgggttatttttttaccaccttccttttatatgtgaggaaactgaggcccagagaggctaaaagacttgtccatcacgtgaaccagtaagtggcagaaccaggatggggaccctggtttcattcagggatgggatagcgcagctcccattccacacctgggttgtaaaggagcccagtccttccagcgaacagactgcaaacaggaactcggcagtcatgtcacctgcaatccctgggcatagctggctaataaagaattctaaataaagacccaaccacccacagggaccaaggagaataaggactaaggacctatgggaatggaaacagcgtgaagtcacaggcagagctcccaggatgctttgcaccaggtcctggacatacattacctggagctggtaggtgggctggcattgtggctcacggggagcatgctgggatgggcaggcattccaaggctggaccaattgtcatgggattgcagcatggataaacatgcaggtgagttgtcagaataggctaaggggggaaggtaacaaagtgcaattatagatggtgtcttccaagaacaacaaagtacagtgaaataccaccaataactgaagctacgtaacactgaaaacaaaatgtacatgggatattaactgtagaaaacaatccattagtctatttacatggttatcaggggcaagatttattgccaaatatatgtatttgaaaacataccctggtaaacccaagctttttcccttatcatcattatcagtagatgccctgtagacattgaatcttacttacaatcactgacttggaattacttatctttaaaaataaatataactttaccctgcctttttaccagtgattacttcataagaatgggcgatagaaaccattactccaggcaaaattagaaataagatcttcctgcctcagagtctagcctctggttgaacaagtcccagtgacttcctaacccaataaggtcctttcatttcaaatcagctttaattgcttaattgttttatggtattctttagctattttccttcttttggagccagacaaaattaagtctagacatatacagtgttatagagagaattaggccaggggatctttatggtctatcccagtgttcctaatattggagcatgcatcggaatggcctggaaggcttttaaaagcacactggccaggcgtggtggctcacgcctgtaatcccagcactttgggaggccgaggcgggtggatcacgaggtcagaagatcgagaccatcctggctaacacggtgaaaccccgtctctactaaaaatacaaaaaaattagccaggcctggtggcaggcacctgtagtcccagctccttgggaggctgaggcaggagaatggcgtgaacccgagaggcggagcttgcagtgagccgagatcgtgcgactgcactccagcctgggcgacagagcgagactccgtctcaaaaaaaagcacacattgccgggccccaccaagagctgctgcctgtcagtctggggtggggcctgagactgtgcccactctcgggtggtgctgaggctctggcctgggcaccgtatttggagaatcactggtgtagtcaggaattcttgagcctggctgcccatcattgtcactttagagaggttcatagaagactcaaacctgggctctcctcctaaggatcgaccatggttctgtggagaggcccaggaatctgtcattttcaaaacctggagcagcagctctgaggcctgtgcaaggatgcaagcctctgatctgggtgtccgtggttgttccgccagcagcggcagtggcggagacataaattgaagatcttctcttgagctactaaaaaactgggcttgggtatgtgttccagaaaaccgtctccatttttttagattctagactcctgcagaatgcctttcccaaagtggtcttgcagccacccaccaacccctggcagaatgaggctgaggactcacttggagaattgttccgatgagcataggggctggggtagggtgaggaccggtggctcctcagggttgggtacctgtcacagctgtgcgtggaggggagggagagggcacctccaaactgaggatgaggatttgcaggtggacacagggtgctggttccaggaagaagccacccccctgctgtgagaaaagacagtgctgagtaacctgcattagtgctccctccatctctccagagagcagagcccaggccagggactgt

SEQ ID NO: 8881 - DNA, 29057 bp, Homo sapiens
ttgagacagggtctcatgctgtcacccaggcaggagtgctgtggcacaatcacagctcactgcaaccttgacctactgggcttgggtgatcctcccaccttagcctcccgggtagctgggaccataagtgccaccactaaacccagcaatttttgtgtgttttttctgtagagaaaaggtttcaccatgttgcccaggctggtctcaaatccctgggctcaagtgatctccccgccttgaactcccaaagtgttgggattacaggcatgggccaaggtacccagtccctgttttaattatttgtatgaagacaaaatgcgtgaactgatctccttgactaggaagtagatggtgatcatgtttgtgactgagaatgtcttgtgggagctgcctaatatttgtacaggagaaccagtgtggtgttgtggaaagaggacaaggctggaggaaggcaggcactgtcagcctgatagggtgatgttggggcatttttaaagcctctgtgagtctcagtttactcatcaatgaaatgggaatacttacttccacagtgcctgtatcacagggtttttgtatgataatgcatgtgaaaatgcttttgtgagctacaaaatcctacatgaacacaacagacaaatcaggtgtgtggcatgcagcaggtgatgtgagaaaaaggcaaatactggcagatcaaacttcttacataagctagagtaatttcagaaaatgtgatttttatcattcttcccccgctcactggtttgagagaaaaaaaaatactttttttcttaacccaagccaaattgaaaattgaagcaatgaataacattacaaagtgggctcctgcatacaaagaattttccatatattatctctatttgatcctcaaaatcatgctaagaggaagatatttcaaagatgaggaaaatgaggtcgaagagatcaaataggctttatttgataacttggtgattaattggccagatggggactcaataccaggtctgttatgtcttttcctctttactaagtttcctctgagttgaactcccattctcccacacccctctatcccctgccccaaaaatgtttagcagaagacaaagtaacatcattgaccaatcactggttttcttagtcaatcaggacttggttgaggacatatttattttatagcactacatagagggttcaaaaggcaggttagacttgatttcttccctcaaggagcatgtaacgtttctggagagacaagatataaaatgttgaaataacatttcatatgttatttcatatgagaggccatgtgttaaatcatataccatggaatctaagtgtaacacattcagtgcaggaaaatccaccgtaggctggggtggtcagggataacttcctggagaaggcggaacttgagtttcctctcaaagtcatggcagaatggaagccagggccagatcccgagtcccagccaagtgttgtctcactacacggattggtgccaaagggaagagtagattatacatttaaaacgcccttttcctttcaatatacccagctcttcaagctgctggatgtaattcccagcaagcagaggcaatctgtgaatgtttgttatctaatagattccttcttatgttagttgaaataaccatcacaatatcagtaaaatcatcaaggacaaggcttcagaacaacatattcctttcgtaaaagagctatactttttgaggtaatactcatttaaaaaggggtattcttttatgtggctttcccaagaatgcagcctggcaatttaaaagtccaagtagtaaagcttcccctttggaaacctcctttatatctaacatgtgcacattcgccaggcataatgttaaaaatattgtgacacaaaatcaccgccccatcctttcaagtttgatgcagccagtttaatgttcaatatcactgttcgcagaaatgctttttgatctgaggagatatgagacacagccatcccacagctggaatgtaaggattctatagaagagcatggattaacttgaaagtgcggtggaacgggatggtctcatctcattagtgaccaagagttcacgagaaacttccatttgtttcaacacattgtaaatctgggtccccagtgccaaactctgtatctggcataaagcaagtactcaagagataaatactgaatcaatgaagagctacgatctttcatgatccggcactttataatgcttttagaatccttattctaaccataatcatgttgaccatttattggcaggtgtgtattaagcactttataaatatgatcttatttgttccatacaagaatcatgtagaggcaggtattactcctcccatttaatagatgaggaaactgaggtttagagaatgaagcaatttccccaagttcacatccagttccacacaatgcctaagctcatgctgccaccctctgtttacaatgccgctcaaccttcaggtgcatcaggcaggaatagagatagagcaaaagcagatgataatagcagtattaataaaataaatatatattgagtgcttattctttttaagtgatatatatatatacacatatatatactttatcttatttatttatcgttacaaccataagaggtaagttctatttaccctcttatacagatgagtaaactgaggcatatataagaatttaagaaatgcactttgggaggctagggtgggagaattgcttaaagccagcagttcaagaccagcctgggcaataagacaagacctgtctctacaaaataaataaataaataaataaaaattaaaaattagccaggcatggtggcatgtgcctgtagccccagctcttcgggaggctgaggcaagaggatcccttgagctcaggagttcaaggctgcagtgagctatgattgcaccactgcactccatcctgggcaacagagcaagttataaaaataaaaataaagaaatgtgtccagggtcacctagttagtaaatggtggagcaaggtaccagatgtgaaactgtacatattacttaaaatcacttcaatgaaaaaatcccaacctaactgggcacgtgcctgtagtcccagctactcgggaggctgaggtagggggattgcttgagtccaagaggtagacgctgcagtgagccatgatcgcaccactgcaatccagcctggtgacagagtgagacctcgtctcaaaaacaagcaaacaaacaaccatcttatttttacctattttacctctacttaaccaaaattggactataacaatataaaaggcaaacaagtcttgttaactgactattccagttaatggaggatttatcacatatctgatgatgtcctgagccttggcttacctccctgtgtaaagaggaggtgggacaagataaggctgattcatggtccctgctaggaatgcacttggatggccctatgattccctcatcgttcaccacttctcagtggtactgaaaggcagttgatacccgtttgaattgtgtcaatcagaaaaggcaatgtgccgggtttgttaatgccaacctaaacaacttctcagttgttctgtcagcactgtcaataccctgggccctgttgtggagcagaaaaaaaaatgcttaagcatgtctccctcaccctttctttaaaggtgctgcagggctgtggagccggggttctttcagtactacctgtatcaggaagccagctttgttgttcacacctgccctgggcacctttgcatagtcaactactgagtctctctcccatcagtcactcctttagaaactgctctctctcttctaaaattaagcctttgagcttttgcttctcaacatttcatactgatagtatcaaaagggcattaactttctaagaagcgacatattaagctgaagaattccgatggtgtgatttcaatgacctaactgcatgtcagtcatgttgcacgttgagatggcctcaagcagctctaagagggcagcaattgtgcaagaagctgacacttccagcttcagtcatcagcttgggctttctactctctacccctggtaggtgaggctcatcttggccccaagttcaccggtcatggtcccacatatagaaggagttaaaggcagaggcacaattcaggggcagagggagaaaatggactgagttcccatgccaggagtcatgccaagcactttaaaatttatccttttaatccacatatatcaccacgagtaagagtgtttttatcttcattttataaatgggggcagggaggcgattgttaaatgttaaagttgggcctccaacccagatctgtcagattccaaaagaaaaatccttggatctgtttaaactttatgctttcttttttctttctttcttttttttttttttaggacgaaacactggaactctccagaataaattggtacctgggtctcttctgaagtgagctgctcttaggagcttcaaatgagggtctttgaagccacatgaaaattgatgagtggttgtaacatccaagctaccaaatcagacacacttgtaattgttcccaatgtgagttttcaccccaaagttctcttgtctctctccctcatttttcccgagtacatgggggagaaagtcatgatgaggggatgatctgccttccagtttaaaatcataagaatggcttggaaacttaagagcagtgagattctggaccattaacaaccacactaacttgcagcttcctcatctgtacaatggggctaatgactcaacggctatctcttcggcctactgcagaatatagggatggtacctgtgaagccctttgtaaactgcagagtgctatgtctactttcactgattcactctttccatagatatggtgtgcctctttgtgaaatgcacggtgttaggctatttagtgaaaaccaatgaagaaaatacaatctcttcccttaatgtatgcatattcttgaatagaaaagacatttacagaaataactataaaagagtgtagaagagaagaaaacaggcaccagaacaaagagaaacaaaagatgcaggttgaggggcacctgagagcagggttaagtgaggggattcagaaaaacggaagaaagtagcttaggtaagagcagtctggaagattaaatctatggaaggtggcaactgtttcattaaattatgcattctttcatctattaccaatttatcacatgcttattatgtactggctactgtgcaaattagtgcggcaatgtggagaggtgaaatagggaatgctggcaggctgtccatagggaaatgtccaatgggaggctggaaatgcaggtcttgcattcgggaaaagagtcagggttggctgataaatttcagtcatccttatagaactgacagttgaacctataagaattgatgagcacactgggtatgcaggtgagattagatggtgagggaaggaggaagggcagggacagaaacttgtgggggaatccacaaatatgaggttgaaagaggaagagaagtcaacaaagcacactaaaaagagtctcaaagaggtgggaaaaaagggtgaaagatgctatgaaagggtaaccagctgcatcctattctacaaagttcactggtgactgagaagaaaccactgggcgtatcaattaagacactgttagggctctatgagtcagcatacagatctcccaagtccaggacaagttactacaatcatctgattcgtggccactagtaatcatgatagaatgcctgggttggaattctaggcctgccacttactagctatgtgacttggacaagttaactttttttttctgtgccccagttggagataatacctttactgcttcatgtggttatgatgaggatctgataaacatcacaatagcacttacccaatagtacacacacaatagcacatcacaatagcactcacccacaatggaacttagaacaattattgatatatgatcagctctcagtatgtgtaaactatgacatgcaggccaatycacctagaaaggcctattttcaaaagctcatgtcctctgaattgaggaaccacagatcagatcagcctcttcaaccccccgygaggctcccattcatgtaagacacccatggctttgtaatggcacccaacgctctgggctggcatgaaaattgtgtgactcacatcatgtgcctccccaagaaggtgaggctgttgctgcaaagctgactagtttgtggaatgtaaggacttttcattgattagctttggggaaaccactgtaagcaagtcttaaacatcatcacatttgattggtttataagttgtggcaagtgaacccaggtctaacacttaggaacaagggagaaaaaaaggaagattttgttacytgtaatcagctttttactccacagattttctgtgagttgggttcaaaacatttaattccactttttccctctatgtggcacctcatttgttaccaggattttacagacggagacacagaaatgtgaaatgaatagcccaaggctatcttctcccactactcccagccctaccctscagtgtgtaattgtggagccacggacaatgtaccaaggcagcaaacatcactggcttgaagatgactagtagctgtggtcagcttgctggggacccatgctcctgagggttcttaagaagtgtgggaggactcctaaagctgttgttgaaatcagtttagattatgggactaggaacccgaggaagctaaatttactttacaagtcaactggattagcactaaagtaattttccttgtgtaaacccaattttaggtaatggatgagctaaacttggagcagggggctgagacacagatttcctgtgctgtcgagctattgcagatctcagcagataacaaagctattatcctggcagaaatggaagcatcctcaaatcctgtcagatggcagcatggacaaaaattacaagcaaatgtatttttaagctgatgcactttcttaagtctggctcctaaaagcaaaacatgctcttctaggagaagttttagtaaaaacataagaatgctgctggtaaggaaatctctaggtgatgccagggactgacaacagaggatttctgatagaagaaagagacaaggatttggaccaagtttctgaatggaatcattgtactttctttttttttttcttccttctccctccccgcttcacccccgacctctagagtttcttagcaggcattttggaggaaaagatttggatcagaaattcagaaattacctgggctcacaaatatatggtatgaaagtattttttaaatggtttcaagttaaaggtctttactccactgctcctaacagagtcccttaatttcctacctactctcagcccctccagcaccatcctgcattctgcttccaagatacatgagctttctgaagagctggtgagaatgctgaaacttcctggccttggtttcccatctggtaaaatgaggaagaccaaagcttaactctcacaaggaatatgcaggtaatgaacactgtatgatttaagagacccttgtgatatattgagtactaactttgaaattacaaacagaaacaaccctcctttgttatcctgttttttaggcaggaagcaagcagaagaaagatgaggatgggaattagatggcttgcgttttaatctcagctgtgatacttaccagctgcctgtcctcagggttcaatgttcaaytgacctgaatgcaaaacccagctctatayctgataggctgtgtgaccttagaaaagttacttgctgcctcttaccttcagattcctcatcatcaaatggagaaggaagtacttgcctctagtggtcttccttcccactttacaatacacttatgcacataaaatctagttaaaacagacaatatgaataaaagaataatttgattttagaataggcataggagaaaagtgagctgccttcattgctttgaatattagaaggatttatccactgattctaactgcacttgttcatcaactccacgaatatttgattaagagttatgttcctattgtacatatggacaatacctggcctcatggaacagatagtgctatgtgatatggacaaagacagggagactgagtgtgcagaggaggtcatgtgacctttactggagggatatagcaaaggcttcctagaggaagtgatgtctaaattgacagggttagctctggtctgagttgtgtctgttggtagggctaattaataagacattyggacatcagaagcccccaaaagacaacaaattcctgcccatcccaccctaccatataataaaaggaaggcaggagggcctgaatgaggtaactcacacctataatcccagcactttggaaggcagagcggaggaytgcttgagcccacgagtttgagaccagtctaggcaacaaagtgagaycstgttctctacaaaaaaatacaaaaattagctgggcatgctggtgtgtgtctgtagtccaagctacttgggaggctgatgcacgaggattggttgaacctgggaggttgaggtcgcagtgagccgagattgtgatttttcagaaaggataagtaactttgcctacagggctcttctatagcacaaggaagattctatgtgtgaaagtgctatctaggcactgtgcaccacatcataagtgcaggaatggagctcagggcttgagtcaaaaagatgtgatttgagcccaaactctgccacctgctcagagtgctcagaaaataccctggagaagttacttatcctttctgaacctcattttcttcacttataattccagctacagcagcctcataagactgtgaagattaaaattaataggaaatgtgtaatttttaagtaaactttaatgtaagctgttttcatgccaatcttgtgcatcggagctgatctataaggtctagaagatttggctacctctgctctgataaaactcagaacaatagttgatgccatgtctctcaaactggggtgtctgtaagacacacctagaggatggactaaagatgcagattgccaggaaccacccccagagatctaagccgggggtttgtatcagaagtacctgtggagcttcttttgcattccgattcctggcccaagctctagagactgtgattcagtagctctggggtgtgtccaagatacctgtggccctttaaataaatcattttccctgggttttctggagatttggatttagtaggactaggacagggtcctaaacattatttttaacaatcccccaagggatgcttacgaccctgtaagggtgacccatataacagaagcttgttgaaacttgttgccaaatgactttcttctgtatctctctacacataatctccagaatacagaatgtccctttgagacttcatctctctgacttttccattttagactgtcattgctgaacactcttttgctaactttttgttgtagaatgttgtattggtgtgtgtgtgtgttatgtgatgggtggagtggaggctcactcaacctgacttgcctaggcactgggagccccatagtgattcccacggccagctctgcccttgtcacttaactctttatcccagaagtggagtgttgaatacacccagcaatttgaatgttctggttaattgagatttttaaagaccacagtgacttcacattttgtgtcctagcacttaaagctaaacagtgattttttttttttttttttttttttttttttttttttttagatggagtctcactctgtcgcccatgctggagtaaagtggtgtgatctcggctcactgcaacctctgcctcccaggttcaagtgattatcctggcttagcctccctagtagctgggattacaggcatgtaccaccatgcctggctaatttttgtatttttagtagagatggggtttcaccatgttggctaggctggtcttgaactcctgacctcaggccatccacccaccttggtctcccaaagtgctgagattacaggcatgagccaccatgcccagcctaaacagtgatttaaacacacacacacacacacacacacacacacacacacaacaagaaaacaaaaaaatccagatgttaaaaatatgctgcccagatcaagaccaaaatttatacatccatataaaataattaaacatgtcatttattcaccagtaaaatgattatgatttaatgcagagccaaactctgaccaccgatgctgaatatttatggctggctccctcagaacacagaggtagctgcagaaatatgctcttattctaccctaccttcacttgatgaatgattattttacttagagtgagtgagactgaatttgaaaatacgtcagaggtgaggcccagtaaaattctatttataaataggggttattgtaatcagctctaagtgggcttaaaatagaaatctaaaaagtgaattgttaaaaaaaaaaccaatacaatctttactaatcagaaaagcactcaatttctggcactttaatgtgcattctgaaaatctattaacaaagcttgacttaaaaaaaagacccctagttcccttatttaaacttgtgaaaagaaagaaaaaaacacaaaggtgaaacataataggtactgcataatgatcacaaggatggaacagcaaagacgatgaaaaaggaatttatgatgattaccctgtgaaaactctctgaagcacataaagctttttaatcacctaaactagctatcattgctcataataattctcacatttgtatagcacttgacagagagctttgtggttaagagagtctgaggcttagagccagacattctaagttcaaatgctggctctgctacttactgaccacctgcactcaagtaaattacacaacctctcagtgcctcacttttgtcgtctgcaaaatgggggcaacaactactgaaaaggttattctaaaaattaaatgagataatacgtgtagagcacttaatataacgcccagtacataacacacataataaattgtacctctgactattattattactctatgatcatttcaacaatcatgtgaggaaagtgttatcatccttgttttacagatgaggaaaccgaagctcttggggtaacacgacttgtgaaactgcatgctactcctcagtggcagggtggggactctggacagaggaactggcaaggtcttctagacctttgacgtgcataaactggcaggtttacagaataacgaggaaaacaaagtgaaacaaaagactgtacccgtgtgctaagaatttattacccgcacatcaaaaaacttatccatcacgatcaagctggcttcatccctgggatgcaaagctggctcagcatatgcaaatcaataaacataatccgtcacataaacagaaccaaagacaaaaaccacatggttatctcagtagatgcagaaaaggcctttgataaaattcaacatcccttcatgttaaaaactcaataaactagatattgatggaacatatctcaaaataaaagagctgtttatgacaaacccacagccaatatcatattgaatgggcaaaagctggaagcattccctttgaatactagtacaaggtaaggatgccctcttctcaccactctattcaacatagtattgaagttttggccagggcaatcgggcaagagaaagacaaaaagcatattctaataggaagagagagagtcaaattgtctctatttgcagacaacatgattgtatatttagaaaaccccatcgtctcaccccaaaaactccttaagctggtgagcaacttcagcaaagtctcaggatacaaaatcaatgtgctaaaatcacaagcattcctttacaccaacaatagacaagcagggagccaaatcatgaatgaagtcccattcacaattgctacaaagagaataaaatacctaggaatacagctaacaagggatgtgaaggaccttttcaaggagaactacaaactactgctcaaggaaataagagaggacacaaacaaatggaaaaacattccatcctcatggataggaagaatcaatatcatgaaaatggccatactgtccaacgtaatttatagattcaatgctatcctcatcaagctaccattgacgttcttcacagaattagaaaaaaaaactactttaaatttcatatggaatcaaagaagaccctgtatagctaagacaagcctaagcaaaaagaacaaagctggaggcatcaagctacctgacttcaaactatactacaggctacagtaaccaaaacagcatggtactggtaccaaaacaaacatatagaccaatggaacagaacagagacctcagaaataacaccacacatctaaaaccatctgatctttgacaaacctgacaaaaacaagcgatcgggaaatgatctcctattcattaaatgtttctgggaaaactgtctagccacgtgcagaaaactgaaactggatcacccttccttataccttatacaaaaattaacttaggatggattaaagacttaaatgtaaagccccaaaccataaaaamcctagaagaaaacctaggcaataccattcaggacataggcatgggcaaagacttcataatgaaaacgccaaaagcaattgcagcaaaagccataattgacaaatgggatgtaattaaactaaagagcttctgcacagcaaaagaagctatcatcagagtgaacaggcaacctacagaatgggagaaaaattttgcgatctatccatccaacaaaggtctaatatccagcatctataaggaacttaaacaaattgacaagaaaaaaataaccccatcaaaaagtgggtgaaaaatatgaacagacacttctcaaaagaagacatttacatggccaagaaacatgaaaaaagctcaatatcactgatcattagagaaatgcaaatcaaaatcacaatgagataccatctcacaccagtcagaatggcgattattaaaaagtcaagaaacaatagatgctagtgaggttgtggagaaataggaacacttttatactgttaatgggaacgtaaattagttcaaccattgtggaagacagtacagcaattcctcaaggacctagaaccagaaataacatttgacccagcagccccattactgggtatatgcccaaaggaatataaaatattctactataaagacacatgcacacatatgtttattgcagcactatttacaatagcaaagacatggaactaacccaaatgcccatcaatgatagactggataaagaaaatgtggtacatatacaccatggaayactatgcagccataaaaaggaatgagatcatgccctttgcagggtcatggatgaagctggaagccatcattctcagcaaactatcacaagaacagaaaaccaaacaccacatgttctcactcataagtggcagctgaaccatgataacacatggacacagggaggggaacagcacacaccagggcctattgaagggtgggggtgaggggagggaacttagaggacgggtcaataggtgcagcaaaccaccatggcacatgtatgcctgtgtaacaaatctgcgtgttctatacatgtatcccggaacttaaagtaaaataaaaaaaaaaaagaatttattacccatgaggggacaggatgtatatgacttcatgctatattgattagtagaggactgggcacacttgtgattttcctttggactcatcagcatcctccttgcaaagtcctgtcacacatggctttaagtaaaaataataatgataataaattaaaaaccacctacaagaggacagctgagtgtggtagagacagctgcccacagcacctagggtgtggataagaaccctgactcttctatgtactagttttaggatcttgaacaagttgcttcacccctctaagcctgagtttcttcatctataataggggataataatagtaaagatgttttaagaaatgtcctaagggtaatataagataacatagatatatagcctagtgcagagtttctcaatctcagcgctattgacgtttggggctggagagttgtttgttggagcgagctggcctgtgcactgtacgatatttagcagcatctctggccttaacctactagatgctcatataatacctttccagttgtgataaccaaaaatgtttgtagacattgcaaagtgttccctggaaggcaaaatccccctcactagagaactgctgaccttgcccaaagcctggcacaaatgggtggtcaatgaatgttaattctttccctccttttagatagaaaccttttttttttaaggtgaagtgagacacaactaacttggagtcatgttaattcagataatgggagaactgaaatctatattttcagtaatacagaaaaattaacagtgtccacagttatttagagaacactgtgtattcacttatgaaaacatactacttataaggactcatttgaaagtcattcacattcagttaatatactaagttctcaaagcctcagaaaacacctttaaatcaccaaccatttcaggcaaattttaattgataattgcagttaaatatattgaaatggcaattatatattttttaagaaacaaagcaactatttctgactttgtcctctactgcagattaactttccctttaaataagcagcttaatgaagttttgtttcactcacatatctagaggatattttataaatgttgcattgagattttctagttccttacttttttttttttgcatttgaacttttttttaaattttattattattatactttaagttttagggtacatgtgcacaacgtgccatccccatcaagctaccaatgactttcttcacagaattggaaaatactactttaaagttcatatggaaccaaaaaagagcccacatcgccaagtcagtccttactaacttcttaagcaggaaattcttttccatagcgaacctaacatcttcctgctgcttttttagcctgtttcctattgttcaaacttcagtggaaaatgagaccagatgttcataagaagagcctcattcttgtgtacctggagtttgtaagtaacaccaggcctggcctgggacttcctcatctggaccaatgattctcaacaggggggtgattgtcatcccaggggacagctggcgctgtctggagacacttttggttgtcgaaattggggagaaaggggttgctggcatccagtgcgtggaggccagggatgctgctaagcagcctgtaatacacagggcagcccctacaacaaggaattattatccaggttcaagtgtcaaggttaaaaaaatcctgccctagaccatggctcggagatgaattgagcagattaacaatgaaggaactgttttaaaaaagcgaaggcgatcaaaccctacttgtctggctttgagatagatacctgttgcattcttcaggaagatttttctaagcccacctttgtgcatattcccatcacagcacttgtatcaccagcacaatgctggcatacagtggacatttataaaagacaggtgaataaaagcacagctatgaggcccaacaatgaatctccagggttccttaacctccctctctggacacatcaatgtaagctctgagggactgagagggacttctctttgtgagaagaaaggaagtgggtgtgaaggagctgggtttgcttgtctcacccttccactgtctacaccaggagttgaagtttattttccctctttgcctcacactgacagggatagaggcaatagatttggtttcatttaccatttcacttaatcgcctgaaatgtaaaaaccgcacaaacagatctgattccatactttccacgctccttcttgtggtgctgctaagcggagctgttaaaacaaacaggagaaatgtggaggtcagggttctgctacctacttctagtctacttagctattggtgcctctgtctctcattctctccagacctctccccagcmctatttgcacctcttgagagcaggaccttctttttctcatcacctgaatacaggaagtgttatagttattaatggggaccagctcttaatgtttgaccaataactatatagcatacacctaaaagcaggagtctgtaacaagttgaaaggagatgacaattgatcttaaagcattacccaagcaatttctaagatgcctttttattccttrattctgccaaacatgattctgtcacaaagcttttaggttagctgtcccgtttgcctggaattatctgcctctctctcagataaacgtatggctcactctctcacttcattcaagcctttgcccaaatgycaccttatcggagaggcctcctctaatcaacccatgtaaagtagcaacctctaccacatcactctctttctwctcattgtgatgatttctgtctcttcttaagcatccttgggttccccctcaagaatgtaagctccacaagcaatagagcagaatttgtgcctgtttcactgtcatatccttcgttcttagaacaggagctggctcacagtaggtgctcagtaaatatctgtgggctgaaggaaaatctcagggcccttcttcgtcaggagcttgtaccattatgtctctacctcctccccaacccaccacgcatgatgggttatttagtgcattagttaatccctcctctcttaatcaattccacatgtccatatctggttattacttastgtttatcaaaacagcttaactatgggctcccaaagactccttaggaatgagacaggaccatggtgaacagagactcccctgttccctaccccgtggcactattagcctctccacggcctcaggcatggagtcccttgatgtcccagtttaaggtttttactctactgtgggcataaaactcttccctgtktactttctgcacagagcagctcaacggcttttttagaaccattgtagaaggtaaaagtaaaaatttctacccataaaaccatgtaaaataccctcatgatttcatctgtgaccctgaacctttctttttctccaaatcccttttatttttgtaaaagaatgcactacgygccagcatctggcttgtaaaaataaatacagtgactggctttcccaagtaacttggcctaatcatccagtgctcctgaaaagacccgtctcctgagatgcagcaatcttatgaacgatctattccatggtccaggcacagagggggcacttacatgggttgaattacacaccccagagtatctgcatttagaatgaggactaactcttgactcctatagaattagatgttttcctgtggtgggtagattgctaatgcttgatattcccttaaaacacatttgttacgactcagytatgtgtaggcttgatcatttgagggcaggcactagtaggggtttgatatattcccagatgagttttacatcttttacttaaaaacaaaatgaaggcttggagtatttatcaaaattaagtgatgctgatataaagtaaatagatatcactatctttaaatcaaggtatcaattattaacatttggggatattactgataggcttattttgtttgcttatttcttgagacaaggtctttctctgtcacctaggctggagtgcagtggtgtgatcacagctcactgcagcctcaacctcctgggttcaagcgatcctcccacctgtgcctcctgagtagctgggactatatgaacacactgctatgcctagcttattttttattttttatttttagtagagatgaggtcttgccatgttgcccaggctggtctcaaactcctggtctcaagctatccttccarctcagctttccaaagtgctgggattacagacacgagccaccacacatggtcaacttttttttwaaaaaaataccaaatcaawaaagtcaactgaattgaatttaactcaacatctattgtgtatgatttgtaatatttttaaatttttccaaaattttaaaatagccagttagctgaaaaataaactcaactttttgagacagagtctcactctgttgcccaggctggactgcagtggtgtgatcttggctcactgcaacctccacctcctgggtttaagcaattctcctgcctcagcctcctgagtagctgggactayaggcaygcgccaccacgtccagctaatttttgtattttttagtagagatgggttttcaccatattggccagctggtcttggactcttgaccttgtgatccacctgcctcggcctcccaaagtgctgggattacaggcgtgagccactgcacccggcctatttgatctttattttcaacaataaacccacaaacttagttaagcaaaatgagcatgtgttacttgaaattttaattattttacaaataactgttaactaaatttactgtcggaaaaagacattactcaatctgcaaactttaaagcattaggtcaggcaactaatttatttttatcattatttctttatttacagccaactagaaaatataaacattttatttttgcttttatagtttccatttggaacacaaatgctctggagcagaatgttcctctggcggcctctgatgagttcagatgctccgatgacttttgttatccttctcacaccaccgtgacaagtataatagcaggtggcattgactgagcacttagcagctattcatatttactgagggcttcctatggaccaggcactgtgctttgcaacaaaccagcatattggaaggatcgccagaactgaacacagatttaacatatcaatctgtggggctttggcaagattcttcaccactctgaggctcaattgcctgatccctgatgtggaggtagtattaacagtcttgcctgcctcggggagttgtttgtgatgacatgcactgtgagcaggatatggctccatggtgggagtatacgctaatgtgtaagattacaggttcactcctcagcagccccactttataatcccagaagaaggcctgcgagaacacaatctctgcttcacttcctggtgtatctccagcactggggcccgccagtaaacatttcctgatgacatgaataacatgtgtgaaagtgctttatgaactgtaaaacagggcaaaattccattatattattgataacattaaatttccttcagcaacttatttcacccatagccccgatatttatttttcatcattgttggggyaactatttatttagtactgagaaaattatttcaggctgatgaagtcctgaagtctaaaaggatctatttcagttctttatcaatatcacagagctgattctgccccacagtcagctgggatgaaagaagaggcctgtagtaccttggggaacagtaatcccctctggctggactatgcaggactgatcctgaagaatcccaaagccctggaaccactataaacagggaggtgtgactgacaactgtgacaacatgggacaaattacacagactcataccaaagccaggtctgcacctagcaaagtgctttaagttctgggctgcactggagccctagttkgtgcttaagcttagtttgcctgagaattctggcatgtggaggggcagcagaggtgagccagtgagagtcttaagagagaccgcggaacctccaagaccagacctcacactaggggccaagtcagaaacatgcttttctatttgctgcaagcacaaatgaagaccttgtggtacctgaactgcacagcccgggccccttcttccccatttcagagggggtttgggactgagttggcagggagcctacctctgggtggggactcagtgcatctaaaagcacaaatacttgtgataagggtctttcaccctcacttctcactcacagcacaagcctccagatccagtaaatcasgggctttcactttatttcatcactgccctggagtctcctcaaattacctggaacraatttgaaagggctgaagttcctgtcgagtggsagaaatattgatttgtgacaagcacatgatccaggctgagggttaaatataggrgagtgtgaggcagatgctaagtcttacagatgagtagcaattgtgtgtaaattgacggagaacgcagccttttgcataaatttgtccatggactagcacttactattcagcaactgccaatccttcatctctcaaatccttcaatctctgaaacaaaacccacctaaattctcaaattgtccaccacagctcaccctccagaggttctggagcttgaggaacatgacagctgggtttaggaaaaccacttttcactgaatgagaacactgggtttggaaatctggcttccagtcctggctctgccataaccagctccagaaatgtaggcaatttgcttcaccttattctttttttttcccttggtaaaatggaaataattatacctagracaaaataactttgttctaggtaaagaaagcattgtctcaaggccttatatatatatatatatactatatgaaatatgtatatatgtatgtatttcaaaaatgcataaatacaatcttgtctgtgataaacagaataaaggcccctaaaaatgtgaatgtcctaatccccagagcatttgaatatgttacatggcaagtgggaattaaggctgcagatggcattaagatcagtaatcagctgacctcaaaataaggagattctcctgaattttttgggtgggtccagtggaatataaacatcctttaaatatggaggaaagaggcagaaagtcagaatgttacaatgatgcagtgttcagaaggattccactgtctgttgctgactgaatttggaagagggctgctagccaagaaatgcaagtcacctctaaagcctggaaatgacaaaaaaaaaatggattctccccttgagcctccaaaaggaaccttaattttaggccagtgaggcccattttggacttctgactttcaaaactgtaagacagtcaacaagtttgtgctacttttttagagtagccattaaaaaattaatttagcaaatgaggaaactaacataccacccataagactgtaccattgtcatcattgtttacattgtcagaatccttgacatcatcatcattatcatcatcaagactttatttcatggctattrttaaaaaaaaaaaaacagatgctggtgaggttgtggagaaaaaaaggaatgcgtatacactgttggtgggagtgtaaattagttcaaccactgtggaagacagtatggtgattcctcaaagacctaaagacagaaataccattagactcagcaattccattactaggtatatacccaaaggaatataaatcattctattataaagacatgtgcatgagtatgttcattrcagcactattcacaatagcaaagtcatggaatcaacccaaatacccatcaatgatagactggacaaagaaaatgtggcatgtataatatactccatggaatacaatgcagccataaaaaagaatgagatcatattctttgcagggccatggacggagctggaggccattatccttagcaaaccaatgcaggaacagaaaagcagataccacatgttctcacttgtaagtaggagctaaatgatgagaacacatggacacatggaggrgaacaacacacagtggggcctattggagggtggagagtgggaggagggagaggatcaggaaaaataactaatgtatactaggcttaatatctggctgaygaaataatctgtacaacaaaccccatgacacacatttacctatgtaaaaaccctgcacatcctgcacaagtacccctgaaatttaaagtaaaaaattaaaaaaaaaagactttatttcaaatacakcctgggaatgagatttcaagcaatgtataattttgccaaaattttcagaaaccaaatcagatggtatctcatggagtgagtgacaaagggattttatctttaagaatgatatcatattgtttctatgcaaacactgatggtattgttcacattatttatttattttacaaaccctttgttcctagtacaaaagtatacttcagagcaaattattttagaatagtattaagaggtttatttagaatatctttgttaacatagctaaaagatctaaggactaatcttggctctaccaattataaacttcataatttatagcctatcactttacttctttggccacggtctctctttctgtaaaacatttcatgtttgaactagatactcttccttagatcacttccagttttaagaatgttgagtttaatttcttgttttatataatgggagaccatgacctagaggaagtaagttttatgtctaatttctaataattcagatatttttggggtaagcttttacaattgaagtataatatacatacataattctgcacaaatgataactayagaattcaattaatttttgcaaagtgaacacagctctgtwactaccacctaaataaagatatcaaatgttatggcacccaggaacctcccctatgactttcctggtcattcccttcaagaggtaactattattttgatttctatcacaaatgggaattaacatggcattcacccatgttgctgcctgtaactataattcattactttttgttgctgtatattattttgctgtatgaatacatagtaccataattatctatcttattgctagtagaaatttgggctattaccatttggagaccataataacttagatttctcttctcaagttaatgtttgtaaaatataaagcattttgttctatttaattgaacttagtatccctggcttatttattttgaacgttcctattttacattttctgtccagcagggagaagtctaagagacaaaatcaataaggctagagmagattggctttctctggatactgtaccttatccatgtgaacaggagattttatagtgacttgtttcagtataaacaaagaggactggaataactgattgctgaggactccaatcatggcagcactgtatgatatgaatgtaaaataagcatgactgactgcaacaagaaggcagcctgaatctacctgaagaatcctcaggccatccgatttgatgatatagtcagtaggattgtttggtttgctagtaacataaattcaaagcttcaggaaggagactgggcacagcggctcatgcctgtaatcccagcactttgggaggccaaggcgagtggatcatttgaggccagcagttctagaccagcctggccaatatggtgaaacgccgtctctactaaaaatacaaaaatcagctgggcatggtggcacatgcttataatcccatctactcaggaggctgaggcataagaatcgcttgaacccaagaggtggaggttgcagtgagccaagattgtgccactatactccagcctgggtgacagagcaagactctgtctcaaacaaaacaaaacaaaacaaaacaaaaacaacaaaacacacacacacaaacaccaaagcttcaggaaaaaaaaggcagactaaattatatggtaagtaggctgtttcattgaactgaaatgcaaaagtaaaccggagatgtaagttgtcacaagatctctcttcttggttctctttccactgctcaatccatacagtgagtaaaattttacgtcttaactctctcctgctcctcattcctagcttggcccactcaagaccagacttgaattaaacatcaaaatcatggtttctagagccccagtttctggatgagatagggtagaggaatgacagagaatgattcccagagaaaggggtgttgtttgttaaaggcaaaacatgcttgcaatagacatagaaaactttggagagggacagtctatggtagttatttaagaagagttacttagtatttcatgaattatgagtcagactttttgagtcaaacttatgttaagagagggtttcatttatgacaagcaatagttggcattgtttaatcctgtggtatagtagaaagaacagctttgaaatttgataggcctagctttcaatgtaagttctgccacttctggctgagtttcactggataagtgatttaacctttctgtaaaatgggcataataataatgcccaccttgtaaagttgctttgagaattaaagacagatgtacaagaattgagcacactggtacataattttttcttcctgcccttttccagggttcaaaggtgaagtggcataataaattagagaggggtggagaggaagattaaaccagatttagaagtgttgcagtctggcactgagatctctagctgtggggtcttaggcaagttaccgtatctcactgtttttcagtttcctgacaaacaaaaaaaaagaggttcaggactgggggtttctattgcttttgggaggccaagggttccctagaagtgcttaggtattgctgagtgtgtgtgtgtgtggtaggaggtagtatggggggaggataaatagcaaggaaagtaccatttggtagaatttctcctacctcccacccctcttttaaaaatctgttttataaattgaggttttgtgtcagatttgtattggggaaagaaaaggtttgctgtttaaaaaattaaaaagcatcttgaaaaataccagatgagatgctctctcaagtctttcttgctctaaaacatgaggctctgctaaatgccttccattgttaaggccgagctacccccagagccagaggcagcctggacattttcagcaacccattaagtcatctattctgggacagcaggaaaaacaaaccctacaaagggcagtggctaaaacagaaagagagagagactcatccagcttgtccagaaaacaaacccaacacatcctctcaagatgcatccttaatataatataggaaatgtcatcaggaccataaagttgtctctttcaaagtggatgaacaacccggtgttgctaagatgacagcttagggtttcccggcttcaacagaggacagctcaagagcccaaagctgtcctaagtggtcacccttactaaaacagttggccctgtgtggtaactgtgaaaacatctatgtctgtcataagccccaccgatgatggatgagtctaaacagaagatattcacaggggaataagggatctagcttgggcattttgtgctctgttgagctaggtaggaagcagaatgaaaagcagattattctcttgataagaaatgcattcttagagcaacaaccacacgaggaaaagaaaggctccattatttctgtaaaggaagatcacacacagataatttatatattgaagtcagttatgctggaaggcaccttaaagataatccagtctggtagttttcaaacttttttggagtaggttttctagcagaaagcttaaaaatgggatacattcaaaaagtttcaccagaacattaattcaggttgaagtaggaatgagggactcagccctgcctgatctatgcaaccacctccttctctaccataacatcccttgtaggacagactctcaagacacctccatgaatctttgagggctcccaggaacagtttaaaaatcactcattagtcctaccttccctatttacagatgacaaaactaagcacagagaggccaagtgatctgcccagaattccaggcatactgaaaagggagaccaaagctaaagccaggcctcctgatgtcaagctcagtgttctcattattatataacatgggatcattcccagaagatttttgaaaccacctgcggtcacctcttaggagtcacatagttggatataaactgcttaaagtctctgtgaagtttctttctttgcttgtctaaagaatttctggaaggaaggaaggaatggaagaagggaggaagggaggtagggaggcatgcagggaggaagggagggagggagggagggagggagggaagaattacatctcagctccaaaagcatgggcaactaccgccacccaccataaacccacacccaaaattgtaataagtaatttgaaaggggagaagaaatgatatcaaaatggctatttgttcactgaataaaatgacttcaacaagtcttgaaagaaacacatggtcaaaagccccatccatcccttgatctgtccatccaactagtagacactgctcatacccatcgcttcctgcagggatatggaggtgaatgatctttgagaaactcagttttgaggagaaaaggcatggcttcatgctaaatcttatgttgggaacagagtaggagaagagacacatggagaagaaaggaagcaagggcagggaaggggagaagagggaagaagagaatataatggtggctgtggttagttggggagtgtggtgtggagtgagaaggaagaataccaggtgggcattatgtgtgagagggtaggacatgagaagaagtattcccatggctcagaatgggacacatgcccaggaacaccaaagaccagactggctaccagcaggctaaggatgattttcgggatcccagggtacaatgggatcaaagattgtcatttctttttcctctacatcagcaacctcacttattacatgtgattacaaatatactgaatctttgataaattaaaaaggggttcttaggctcctcatggtatataatcctaggattacagtatttcatcagctgtttagatttgttaatgtgaaatgtgaaagaaacatgttattgttttaaggctgggcacaatctgtatttctactctagtcagacctttcccacacttatcccatgatgctaaactgtgactggccggggtatggaggaaacaccaccagctcatccttaatattttttttaaaaaaagcatttgtgggttagatgcacttgcacatgtgagaatggactgcatgttgcagtgggtttggggattaagagataggcttcagatccagacagatgggtatttgaatcctagctgcctctaaccatctacaggatctttaaaaaagtatttaacttttctgattctcaagagaggctgataacaataaagataccaaactattagggctgctttgaggattacttgaattatacattaaaaaatgtccatgatgacaataggcccatgctgagtgtgggaagtggaatgttagggcctctagacagaactgagttctctaagctctgaaatcaggaaaaggaaatccaccagggaaaaaagggcaactttagtaatgctggtaaactaaatagcttccctccccatctcccacctatctctaggcctgggaataagacatcacattgattttcactgaggaaaaccatcccagccatttgcttatcaccaggacaacttattttttgtttcttcctctgtgtaatcaagagcaaacaaaatccagattctagtctgtaacaatggccacgtggggtcggaactaatttcctcttggaaacattgagcttttgggtcatttccctgtactctgatgacagcatatcccaatatgtttatttgtttatctttaattgttgctgtatgtacacttgacagcaattgaaggtgcttacgtactaagcagagcatcaaagagtttttttacaattaaggcagcttagaatccatgggatatttgacataatccatgtttcaatgcatcaactaatgttcatccaaatctgacttttgagatcctctgcttttcttaataatatttatgaacacaattatgtttttttcccaaggcctgtcacatgactcactgtcagtgttccttgaatgaaccatgagacaccccagacttggaataaatgcaattgatctggacattgagaagacaataggctttttctcttcaatatgcagaagacttctgtattaatctgttctcatgctgctaataaagacacacccaagactgggtaatttataaagaaaaagaggtttaatggactcacagttccaagtggctagggaggtctcataatcatggtggaagatgaaaggcacatcttacatggaggcaggcaagagggaatgagaaccaagtgtcttacatggtggcaggcaaaagggaatgagaacctcataaaaccatcagatttcatgagacttattcattatgacgagaacagtatgggggaaactgccccgacgattcaattatctcccaccaggtctctgccacaacacgtgagaattacgggagctacaattcaggatgagatttgggtagggaaacaaccaaaccgtatcatcttcttacatttcccctgttccactgtgaataacaaaccttttcctgcattcaaaaactttaagttttggccaaattttcacatattctttcctcacttatgaaaagtatagatatagacacagagatgtgtctcagttattattaacattttcagagaagatgaaaaaggagttcaatgtgtcctttccagccactttattccccagttaatgtccctcaacagagcttatttacacgaacagttcttaatgtactgctttgaggcctggcgcggtggctcacccttataaagccagcaatttgggaggctgaggtgggtgtatcacttgagcccaggagttcaaggccagcttgggcaacatggcaaatccctgactctaccaaaaatacgaaaaattagctgggcattgtggcatgtgcctgtagtcccagctactggggaggctgaggtgggaggatcatctgagcctgggaagttgagtctgcagtgagccatgattatgccactacactccagcctgagacacagagtgagaccatgtctcaaaaaaaaaatactggttcgattattttactattattgtcaaatcttgctaaaataataatcattagctgagaaaataaaatagc

SEQ ID NO: 8882 - DNA, 27723 bp, Homo sapiens
ctggaaagacataaagaaagatttttttaacatcatttacgtgacctgaaggtagagttttgattcatgctctagaaggggtatttattagctctaatggactaagagactaatgggccttgtgtgcccggcgaaggtgctttgacctaccctgtgggtgatggggagcctctgaaggatttgaagcagggcagagacgtggacaaatctgccaaaagaaaacaaacaaacaaacaaaaacatcaacagcatgttatgttaatgtgcgattccatttaggcttttggaattttgaaaatagctcaaagaccccgttatgaccttgacagaggccaggttggaaatttctgaatccaatgattctttagctcccctctaagtctgacagtctaagattccataataaggaaggtacagctattgccaaaacgtataatgcatcacagtgtcagactttgggattatctgctgctgggggttttccacaccactgctccccttcattagtggggataattgagagttgactgcagtcgttactgctgttgtgatgggtatttgaagctaaattcgggcaagtaggagatgtgtgaatatttatctcagctgcagaaacttaatgcagtgtggcattaattaccctgtctgagcctgctgtcttcttctgtttttaggtgtcattttcagttggataaattagtttccaaaattagaatagagcaaattgtagggtgagatcaaggcagcctgacttcttggggcatccaaaaagaagaatgagctgagaacatctatccaggaaacattaatatgcgtgcttgaagcccagcacaggcaaaaggaaatatttttccccagtagttgtacttaactatttttgactccacctactgcacttgtagaacacaaacacacaataaagttacatgtttagccttacaacatgtatttgaaatagttcaagagactggaaaggaatagatttggtgtttaataaatcataatcttactatagattttgctacatttgattttgagagaataaagccaaattggagtgtatttaggacaaagggatcagaactgtgaggaaactagaaacagcattataatcattcagtaattcaacagactctcattgaggacctactgtgctaggttcatatttgtaaaatggcagaaggaggcctggcgcggtggctcacacctgtaatctcagcactttgggaggccgaggtgggcggatcacaaggtcaggaaattgagaccatcctggctgacacagtgaaaccctgtctgtactaaaaaatataaaaaattagccgggcgtggtggtgggcacctgtagtcccagctacacgggaggctgaggcaggagaatggtgtgaacctgggaggccaagcttgcagtgagccgacatcgcgccactgcactctagcctgggcgacagagtgagactccatctcaaaaaaaaaaaaaaaaaaaaaggcagaaggaactggcaagtggtaacctagaagtaggacatggaagaatgggcttccgtacttttctgtcatcagacatttggacgaaggattgtacttatttacatttccaagggcagtagaaagtctacgggcagaaggcatggagggacaagttggcactttgttacactgcataatagggtgcctccaaggaaagaagttccttcccactggaagaatacaaacataacaagttctagaggaaccagaaattggatctgatggcaggagtcttggggtctactcttggcatggatactaagtaaccctgtgactctgaagaaacaaaagctgtcttcacaggacttcagattcctcatctgtacaatgatgggccagtacaaccttatcttctaggccattccactttacagtagaaagcaagcaatatgatatgctacacacaagagacagcacaatgaccttgagatcacacaacctttcagaacttcagtttttatctgcaaagggaggactcaaaaaataaaagccaccctcaggactataaggcagataaataagacatgaggtgctttgtaaactctgaagcaccaatggatggaaagattggggtctctctctctctgtctctccctcctcatggtcactgttgtaaaagattagaaaaagcactggcccctggaccctgttttcagttctcatgtctctagacttactagctgtgtgaccatgggcaaattatctaacttctctgtgcttaatttcacccttgcaaaagagataaagcatctgccttacaaggctgttgtgatgagataaaaagacaatgtacttgaaaatacctagcatggtgccagacacatggtaggggctcccagaatgccaattcattttgaagtttcaagaaaaaagcaaataataagaacctatatgacaaggcaggggacaagctaatatatcaaatatggtaaaattaggatttcattgtgcccgtttaattctggcacagacctccaagagtgacagcataaaggtcaattttaacagaaggtcctgtgcatgcttaaaaccacagtatccatcaaatctgcttggccaaggcacaatgagccatctcaacatcagctgaagtctgacggggtttaaatagggccgaacgctgtttcctatctaggtgtggattgcaggtttgctgcattacatgctggttgaaaatccctgtatgtgtttcaggacagccccctgggtgcaggcaaatgactggccaaagtggagggctcagactgaatggaaacaagtccagaagtttgtgattaagagacaaagacacacttgctgtttctctggctcaacagtgcacccaggcatcactatttgtagaagagcaatttgaaatagaatttcagggttctcaagtggacatttatgaaactgtgttggaaaaatgtccacttgtctcatggtaattgttagcaatttctgaagatgtattgctagcaagcattgtgctagatactttatatgtgtaatctctaattccctcaagaaccccgtaggataaacagtactattcccattttgtggttggagaaaccaagactcaggataagtatcttgtccacatgacacagcttttctaactctccctactataccatgctacttccctaacagggcaatcagttccaacttgaaaacgaaagacagaactgagtgcatagctattttggataataaaaatgttgccaaaatgttatgcaccctgatcaaatactccaaaaataacctaaggtcatccatcataaactgtcacttttctgttttaatcctaaaccccttttcccaaagctgtctcagaaaatccatgcaagtgtaaagagcaggcctcactttgttcctttatccacaggagccagagcctctgtacgcgcagatcaacagacctaagaaatagcatcgatgcgagctcgtggtgggtgctcaagactggcatggacatcagcatcacgacaggctctcttgtattctttcacctcttcccacaagaaattcatgattgcccaatggaactcgctcagaagagggaactaagcatttttggcaaccaatggcagatatctatggcagcacacaaaaaaagtatagaaagatccacccaacattaaatcagaaatcaagcaaatgcttacccaacaaatatttgagccctcatagctgggtttaagatgactcagtgtgcaaaattattaattccctttttatttctctacctgttgaccactgttgagacaccaaatttggagtgacaggcatcagaggattacaacagggttggaactgacttctttaagcaaaagcaaagggtcttctgtgaccacaatatcgtcatccatatgccttttcacataggatgatgtgttttttgtcactccatggggcctggtctgccattttcccccctttcctttttttgtcatgtttgaaaattaataggtgtacaaatttttgtattgcttttgactttttttagatatgggtgaagaaatctaactggggagaaaaaaagcctcagtgaaatgaattaacttgaaattacaagacaaataagtggttgattattcattatgatcacgaatgttgccaaaacagtcctttagctattctgcatcctggtgaagaaagacagctttcagtacgaaccttcattctgtgagtaggaaaagacatcagatcccattgatgagaaagatgaaaaatgcatctgatttcttaagaagctctaaactctaagtacaataaaatgatattttttatttttccgatatcttgctgctgtgttgctatgcagacaagtgtcttctccacgtgccattttcaaagaaaagtcatttgccaaataattctggtacaattctggtaatgtggttttggatcttaaaaaccaactttctaatggaacaatggtggcataaatattcagaataacaaactgattctgtggtccaaatggttcatctctatctctttttgtacatcagaaaattcaaatgggatttttattttataacttgaaaaaaaaaccttaccattaaactctttaaatatttaagggaaatggctttaaggagttctaatgaaaaaaaattgtcttttttttgtaaatataaatgttaatgaaaatgatttttaataatgccattacactgtagagaaggtagcagattgagtgcaaggtgtgacaaacttgatggatggggctcactttccagacgttattctggagcatatggtaggaagctggagtgcagggacagctggcaggagcagttggccaatcagcagctagtgaacgggaagggagcacgtgactccatcatctagcctttccacgagagtccccaccctacgtgcaacacaagaaaaagacaattcacattctgaagaattcagattctgaaactctcccacctccccactcccacctacccccgatataaatcactggactgtttgtacgtgaaacagaagaggctaagcttcctttttttacacttatgagacaaaaagtgcagtgtttggttcgtatgtttagcacatgattttcataaagaatctatatatttttgccctacagagaattgttatacaggtcaagtgtgttttcctgatgttcctatgcagttacagtatgttgaaagtgttttaacactaagaagaaaactttaaagattcatgtgattaattggatttgaggataattattattatttggtttttagatttgaaaagtagaatttccattgagacaattgatttgaataggcctgcatttgattcttcatatcaatagaaactaaaatgatttgggagattcatttgaaaaatgattgtatacttgttcacaaagcgaaaagtgatacatgaaggtaatggttatcatttaaagcccacattttacactatcaggtcacaggagtctaatttttttttcagttagataaactgaccaaacgtctattcaagaatatatgtcaatatcatcctaatgtggaaggtccgaagaaccagaaaagtgagaagggccgtttacctccctctgtagctatcacctgttggtccacagagtttcttgagaaatgagcaaacattttatgattaggtaaccctttcacatgaacgggaagatgggaaaggtggaatgaccataagagttggcctgagaccagtttgttttctggggatttggtaagataggcagttcccatgggaaattgcttaaattgctttgttgcctatgatttgattctaaacaagtggtgctatcttctccctcaatatggctgtcttgagtttgtcttgcagtatcacaccattataccaattctttgggttgcttctgacacattcaaagtgaactctggctgatgttgctgtttcaggtataccatctggagttaatttcctagcagaaggtgaaagtccaggagaattgtcctctttcattgaacatgattgaaaatgtaactggctctgaacttcaagaagatagatgcccaagtgatgcattaaagtaagggaaataaagtcaagtttttcaactgccatccatattctcattggcagaattctgatttttttccaagcactgtttggtgagcctggaagcaccgtatcctgtcccaggagtacagtgaaatttccaagcaagagctgaggtgccaataccaaaagaccatggggagtctgcacggttctggttagatcaatagaaaatccatgtgtacaactgttaattcctcatcctccactagcactaaatttgtcactttaaattttgaaaccagggaaacaccacctgtcattctgtccccattctccatagctcttcaatctttacatgccgcaagacttttttgatagctcgtactcatcccagtgtctcctgaaaccccatcatgtaatgtactgggcaccttcttttaaacaaatgtttactctgtgggtttggttcatttcaatttctgcgttctgacacatatttttttaataaagatgagaaagagaaaatgactgttgcagtacctttctagacctactttaactttacctcagatgacagtttgttaacatatatggacacattatttttaactttatgtacaatgcattcaacagaacagcaaaatttttagaaattttccattaatttctgtaacacaccatgtaaaactgttacaaataaacatgtttgagaacaacactttagcctggctttattctacaagtttccactggatattcaggcttggatcggaagaggaaattgctttacctaagattccatctgaccaagtgacagcctgtgtttccctggccctgagctaaaaagagcaagctttattggggagtaaggtcaatttgtcagccctcrgttgaattcaagtgcttgctatgcttggaaaagcagccccagacaggaaggaggatgttgtcagaaaaaaagcaaaccctgggtagatgtggtatttggaccacatttagcatgagacgttcaaaactgggaaagactctgggactagccctgtggattgtgtcttcccctaaaacaaaacaaaaaaaacctattaaactattgattggaaaaccgagattaatctagactgtcaaagagttccccatcgttcattttaaggtcatctgctttaagggactcaagaaggaagcatttatctttctttacattcccctcaaaatccacaccaaaataaaaaggcctgaagctggattgtatgtattgaagaacagaaaaaaatgaatatatgtaggtgttgtgtacatatttatgtatgcktgtgtgtgtgtgtgtgtgtgatttttatttccttttgtaactaaatcaaataattagccagattacaattaggtcattgagatgcgaaaaaccaccactgtttaagaatggttttgttaatgactgcataaacacaagccctcaatctggccttgttacaaagaaggtattaaacagatgttattgctaactttgagaaaatgagaaaatgggcttagattctagcaaagtacatttggagcagatagaagaaacaatttccatacagttagaaatgctaaatcctggactgaattgttagaaaatgttgcagaagtttttgttttcatttttgttttgttttggttgaaacagggtttcactctgttgcccaggctggagtgcagtggtgtgatctttgttcattgcaacctctgcctcctaggcccaaacaatcctctcgcctcagccctccaaatagctgggactamagacacgcaccaccatgcctggctaatttttgtatttttttgtggagatagggtttcactgtgctgctcaagctggtctcagattccggagatcaagcgatccacaggcctcagccttccaaagtgctagaattacaggcaagagccaccgcagcaagccagaagtttttcttaataaaaacagtgacttgcacatgttgaacagctagtatgtgccaggcaggtgctagctgctctatgtccattgcctcagctaattttctaaacaacctggaaggggtagatattatcccaatttatagataaagaaactgagattcaggtaaattaagtaacttccccagccagcaaatggcagagttgagatttgaatattgggtctctttactcatacttgagtctaattttaaaataattggatattcactgtttgaaatagttctacctaggttttttgaaaaacattgaccttctgtgtctcttctcagactgctagtggatctttggtaataagttaaatttctaagttcctcccattcaaagtaaaaattaaaatccattagatgttactgtcttacactgctaaatacatagttccatctttaaccggcacctttcaaagcttgtgtgtctgagtgataaagaataaactgttttacccaactcgttgaagtttagctgaaaccaagcactggggatttactttgccaacctaaatgaatcttaaagaagtgacaaattaaaaggtgtcctatttaactgctaggtggatgccaaaataaatgaggcagacatatctgctttcattttgtgcttgagagtaagcccttgttgttttgacagtaaatgttttttgttttactcagaatgacagtcggaaaaacacctagaataaaaacaggtttcattgaaatcaaccttcaaagctttgaaagcttttaaaagaagtttaaattcaagggaaatgtgagcaatggtgcctggaagattaaaaagagagagaaagtaaacagatgtgaatggctttccagccatttcgtgaccggtctgggtatgtatgtgaaaacgggaataatcactgccaccgttgtgctcctgctttgtccgtgccactcattttctagctactgtttccaaatctttacacgaaccccaagaggaaaagaatatgctctccatgtcacaggttaggaaacggaaactcagatgtgttccacaacagctatcaattaacagagccaaagatctcacccagaggctgtcacagttcccggggctggattccgggcctctttcctctattccatggtgcttctttctgacaggttttctgcgacgtcaaattgctcgtataccctctataaaatactttgagcccttctgtattcatttccctgttgtgtctattatattagaaaaatcacaccatgcgttaccctgatcaattcagtacagaaatggattcttacataaaatgaccgtagttatttaaaacaaaggaaaaatccagttttattctcaagaacagtaatagctctaactcaatccaatgaatatttaatttcataacaaaaccctttcattcactttatcttccaaggtacagagatctgaagagggaggctttttgaacaggctttctttttactctttgctgaagaatattaatgactgccaagtggaaaaatgtctaaatattcttgcgagatggcagcctctggtgacttgggtctttaatcttccgaacaacctcttgccacttctatcactcactcggggggatcacagcttggagtggggagcaagcaggaatggttggagatggaagaagcaggtcttagagctggcatactgtcaacactaaaatgccacatgcccttcatactgtacctttagcaactctaccttatctcacctttggagtgaaatggtgggagaggtgaactctgaagtctatcttatttcagattacaggtcaaagtcattcacgtgtagctcagggccatgagatcaaaaatctagcaacttagttactaaagaaaagctgtttcctttttacctgtcttgtgccctttcagaccttcatagaaggaagaagaaaggtggtcaaccatcacacagcccatatttatccttttaggataaagcaacatggtgtagactaaaaataaggaaaccctaactcagtgattagtcccactttcatcagaagaaagacaaatgatgcaaaagtcaaggaggcagataatcgttttctttcttcctggtgggcgctaaacttaagcaaaacctgagaagcagggtatgtaaccaaatcttcaccctgggcttattgttcgttgcttttctcatttaagtggagcacactatcttcactggtgagtcgatatagaatagtttccacatagtggaccctgatttcagaaagtctttgacttgccagttgtttcacctcagacaagtcacttaaactgtctaaaatttcatttactcacctaaaattgcagctattataagaaataaatttgataatttcatgcctggaacatagtaaacgctcaatgcatgttacctgttgttaatatcaaagaaagtctaatcactattatggatttttgtatttaattctttcactttcaccttgcccatctattatcccagctcagtaactctatcaggtgtgaagaagggcagtaagtgatattatctctattttattgtcaaagaacggcaaagaagtatacacaaacagcatccaaattttcttccctggcaaagtttaaagcaaaaatgcattatggactttttcatataacaaagagttattaacaatgtgctatgtgccaggtcttctgatgagcactggagattgaagatttttttaagatgcatacatgactgtccctgcttcaagaagctcagattctagaggggaaaataggttaatagacaagtaamctgtagtagaattaatgctggaataaaggatgtgctaatactatgggagtggtgggagagtgctctatggaagtgttgatggttaaactgggctaacagtgaaaccccgtctctactaaaaatacaaaaaattagccaggcgtggttgcaggcgcctgtagtcccagctactcgggaggctgaggcaggagaatggcctgaacccgggaggcggagcttgcagtgatgcagtgagccgagatcgcgccactgcactctagcctgggtgacagagcgagactccgtctcaaaaaaaaaaaaaaaaaaaaaaaagaagtaagtaggagtttaccataaggtgatggtagtggrgggaagagcattagctagcagggccagtgcacatgatatgcctggagtggctgtaaaggaagacagaaaataatgctcatttaactgtcgaacaacagaaaaaaaaatttctcaattcatatatcaaatctagaataacaaaacatcaaaaaaatacaaattatagcctaatcttttcaatggataatcagaagttcctacattttaaacatagctgtaaaccatgactaaataaagttgactttcagaatgtaattaatagctcaagagagactgtctcatcttaatggatgccaaaaaggcatctgataaaattcattatcctcttcaagaaaaaaaactggaaactagaattatagtaatattcccttcacatagtaaagaacatcttcctcaaaccaatagccaatatgaaacttagcagtgaaaattgagggtagccctgctaaaatcagatggagatcaaggtggcagctactacctctatcatttaacattgctctgaaatttgaggcaatgcaatgcactaacgcaagaaaaagaaatcaagtgtttaaaatgagaacattatcagtgtttgcagataatattttctaacaggaaatatctattagaagggataagaacaaataagagaattacctaaggttgctactttaaaaataaatatataaaaatcaatattttttatattgccataagtaaccttatagaaaacctactggaaacttacacagattccattaatgatagtaacaaaaggagaatacccaagaataaatttaatactgaagatttaagagctagattaaaaaaaaaaccaacaaaacaaagctacaaaggcttgttgaagggcataaagtaatagaacaaattgaaagagaaggtccaactctctcwaattaatttataacttactgcaacaagtatctcaattttataatatatcttcaatcatgtattcatattcaatcatattctaagtcatatctgaaagagataagaatgtgagattatttgaggaaaaaaattcaatgtcatgatcataaacttatactatcagatcagatctcaaaaataaacccaaaataatttaaagtgtttgctttcacaaattattctgtgatttattctatttacctagtcatggtttacagaatataaagtacagaaataaactcaagaaattaatttatgattgaatatattctaattagcagggataaaatatactattcaataaatggatctaggataacaaagactactagaaaatgttagatttctaccttataccttatgggtaattaaattccatataagttaaacatatgtaaacacgaaagtgtatgggaaaatattaatgaatattcatatggggtagaaaaggtccttataagtataccaccaaatgcagaaaataaatatttataaaaatatgaataggtttaccaaaaattgatataaaaaaagaaattaaaagaccatgggaaattaggaaaatatttacagcatatattataaacaaagctttattgttctaaatgtacagaaagctcctaatagctttatagaaaaagtttatagcaaaattagtaaagagcatgagcaaacaattcctgaagaagaaacgtccataaataatagccagagacataaagcccctaaatgtttcatcaataggaaggatattaactaaattaccgtactatgcagcatttttcaaaaagtgaaaggagtctaaatatgtttatatggaacaatatcgagacatttaagaatagtgtgtgtggtgagttcccatttttgttaataatataaaaaggattaaaaagtatgcatgtaggtgtttatgtttacatagaaaattttcattactctattcaggaaagtgcttatttatttaataagcatccaatgagtacctgttgtgtgccagccatcattctacacgctgggaaaacaaagcccttgccctcatgcagtcatgttaagcacatgctaactagagagttcagctccagagatggggtgtaggagcctggggtgggagaaaacaaacttaccatctatacctcagtatgctatttgaaatgttatgttactacctactttctgtttccaatatttttaattagcccaaaagcattttaatgtaccaatttttataatcaaaaattcaagttaaaacaagataacttttgcctatcagatgaccaataattttaaaagtgattatctgtgttggtgaggctatgaggaaaaaggcactcaaacaacttcgagtgtttgattcaaagatttttaagtcaattacttttaaaaggacataatattcaacatgacaattccatgtataagactggaatttaaaacatgggaatttccgtcgtagtgaacgaatatgtattaagatgttcactttttatatatataacagagaaaaactagaagtctaaatttcaaataatataaaactagctaaatattatatttgtagaataggatgctatgactatataatcactgatatactccttgaagacagagaccatgtctcttatatttattttccacatcaatcaatcagtgtaattttatgaatgtttatgaatgcagccattacaatgttacagaacctattttaccccattgtttttcagactgtttttcagtaatcattcaatataacaaagtgtaaaatcaagccggatgcagtggctcactcccgtaatcctggcactttgggaggccaaggcaggcagatcacatgaggccaggagtttaagaccagcctggccaacatgatgaaaccctgtctctactaaaaatacaaaaattacctgggtgtggtggcgcatgcctgtagtcccggctactcaggaggctgaggtatgaggatctcttgaactcgggaagcagaagttgcagtgagccaagatagcacgcctgcactccagcctgggtgacagagcgagaccctgtcaaaaaaaaraagtatacaatcatgtatacattacatttctaatttggttgggtaaatgtacatactcacatataagcatagaaaaaaaactgtaaaaatccaggtagtaggattacatatgatttccattttattctgtgcactgaarttttttattttgttttcctgtttctctctttttaatttaatttagtttaattttaagttccgggatacatgtgcaatgttgtcctgtttctctatactgaatagctatcctttttttagtcagaaaaaaataaatgttgttttaagaaccaacaacacttttgttattaagaaaacataaaaagaactggtagtaaggagaaggtgggaaagaacagscttggtggaaaggggaaaatgtgaatgatagatagagataactgtgagctgcctaaggggtggactcctggactagtaatgcagaggtgaagagatacaaggggcttgtcacaggccaaatagctatggctacggggaggggacaactaggtctggccttgcccagcaaggagtcaggctgtgatttctaggggactaaggactgatttgaagcagaactgcagcacacagagaaggggtttggtcccaaaaagcttgttagaaccccaggcagacccattggcaccctggggaggacatcctgctgcattggagtggacatcacctactggaattgaaacatggttcctaagaatgggctctcatggccaggatccaaaaggaaggccatggttccacaaggagacctgttctgagtcgagatgataaagctatctccaaaccccacctgctgggacaatgctatctccaaaccccacctttagaccaaggtgatgaaatgctatgcagatgtcataataataggaagtatttgttgagcttttaatttgtattaaacaccatgtgagatgctttacttagattgtctcagttcatcctcacaacagccctgtaaggtttaaactattattgttcccactttacaagaatggcaccgaggcttagagagaaagctcacaggtcacagaagctgcacttggaagggctaaaattcacatccagagtctgactctagaactcaggttcttaatcattactccaagttgactccttaattaggaccagaagttactcattgaactagaagaggttgtttggtgacagtgggcaatgtgtgttggagaaaaaggaagaggatttgggatcaaaaacaaaactgacaagcacttaagcaatttctctctctaagcttcaaactacactgataaagcagtcagtggaattccatcaatcccctcctcaaagagagtttgatctttggacaaggtttgaatgacacactctcatccttaaacaggcacaaagagaccatcagaaaaaaaccaagcaccctgcactttatgcattcttcaaaagagatgtgaaaacgggttgggcaagaccagacccttgcgtaccttacacagccaatgactttactaactcaggagacacacaaaactcagctctgaaaaacagaggcattttagagatcatggccatcagtgagttkgaggaggaagaaggcccagagatttctactcccaatcactcacaatctgcctttcttctcaaaattatagcaccatcattgccaacctcacctcacccatgaaagccatgctgtgatcaaaggaagcatatctttgtcaatctacaaagcctattgtttataatttacaacttgcaaaggaacaacagcatgtttatttagtatacaccctttattttagtaaacataaaaattaaaaagtttagacaatataaaatataggcctggtgtggtggctcatgcctgtaaacccagcactttggaaggcttgaagtcaggagtttgtgaccagcctggcgaacatggtgaaaccccatctctactaaaaatacaaaaattagccaggcgtggtggcatgcacctatagccccagctactcgggaggctgaggcaggagaatcacttgaacctgggatgtggaggtttcagtgagccgagatcatgccactgcactccagcgtgggcaaaaagagcgaaactccatctaaaaaaaaaaaaaaaaaaaccaaagaaagaaagaaagaaaaagaawatataaaattcatagatataaaactttcatgtctgcttctatgcttctaaccttactgtgccaaccctatttttccattagttttaaaaaatgtatttttaattacaccatgaccataaacacattcttaatataacaatattacagagaaaaccaattgttgaccatgccattttatcctagtttctttcccagagacaaacaattatccattcagtgtgcccttccagattctcctaggtatttacattcacaaaagtttactacagacatacatagtttttgttttataggtgtttgctttttaaaaaatataaataatagtatgcaatgcatacaacttgttttctttcactgaaccattgatttgaaagatcatctttcatgcacacatagatcaacatagatcaacatgtgtgtacatgaaatttaggtacaatattcctacaggaaagtacagggattccagttctatcacttagtagctctgagacattgggtgagttaacttctcagagctgccgtagcctcatctgtaaaattgagatgaggttagcactgtaattaggcataaatgggctagcaattataaagtgcctagcacatggtaaattctaaatttgtgcttgttaaatatcaataaartgcctgaggtccagcgctggtgaggagcacagggagatctgctctcatgcccacccacctggctgctggcactccttacactcccttgtgaccctctctaagaagcagcagtgaccaccaatcccacctccatatgcagaagcagaggcccagtagaggagaagtggctggaaatttggttatgaaaygagtttctgtgaccctctccttttctcccttccaaggctctgtctgggccaatacacatggctgggttctcaaccttaccctttcttactaccccaaactctctaggtgtctccattgcaaggaagagtgggtgggtgaagaatcgcagccttcctcctgtggagacaggctatcctcatggggcaaaggacagagtattgcctgaagtctgttgggtccctgccatccatgcctcctccctamttttacaggtggattctgataatcccaccttagccatgcttatcccttagcctctcttcttcatccccgctagcactgcagaacaagcctcctaagaggtcrccttgtctttgccctttgaaatgcatcttaagcagtgtctgagaaacacagctttgctcatctactctgctcttctaagaccctccttggctccacrttacctgtagaactgagcctgggtgagtctgatatttccacccaggtattcaaatagacaaggaggaattaaactacagtaagtggtgaattttctggaatgtcatcataaagatgtactctgagcagttactggctctcctccttagatgtctcggaagccttgataggctttcttgtccaaacggggagttggagagggstttgggaacacttcgtaggtctcttcttcccccaccctatctttagctgccaatagcactaccctgtgcagctgagccagytctgaccacagagctggttgttagcaatcttatcctccctagcaggtggggtttggagatagctttgtcatctcgactcagaacaggtctcctcgtggaaccacagccttccttttggatcctggccatgagagcccattcttaggaaccrtgtttcaattccartaggtgatgtccactcygatgctacaggatgtcctccccagggtgccaatgggtctkcctgaggttctgacaagctttttggcagcaggcctcttctctgtgtggcactggatcatctccctgtcttatcaggctgcagttctgcttcaaatcagtccttagtcccccagaaatcacagcctgactccttgctgggcaaggccagacctagttgtcccctccccgtagccatagctatttggcctgtgacaagctccgtgtatctcttcatctctgcacagctagtccaggagtccayccyttaggcagctcacaattayctctatctatcattcgcattttcccctttccaccaagcctgttctttcccaccttctccttacagctatatgtctatatatatatatatatatgtcwatatatatatatatatatgtctatatatatatatatatgtctatatatatatgtctatatatatatgtctatatatatatatgtctatatatatatgtctatatatatatatgatggtatttagggtggggagttagcatatctacattcttcttcattttctcacaagacccctgtaatatgggcattctcatccccattttataaagcaagaaactgaagctcaaaagtggtaaaacaccctctccagataaatggtacagccagatccctgtactcacagataccaaagttctggttcttttgctattccatgcttyctggagaacrtaagggagaagtgactgtccyctcattttcacctgcaatccacttggctttaggaagctcctgggccatgttctggtatcataccttgcccagctcttttgagagttacctaaccagaggatgggaaatgcttggccaatatcagttatgttaayggctgagattcaacacaaataataatatgttatctcagtagaaacacctggcttatggatcatgaggaataagttttatcaaactccacatgagcttactcaaaaagtaacaatctacaaagccatccatgctttgtgctgatggcattttaggtagagcaagaattgctccttgcaaatggtgcatgctatacttttgctgctctggaaaccatcatttcaagaaagatgtgctttagtggattcattctcctctaaaagtaaacccacatgccagaggtgcacaggaggctggcccacagaagtatctctgtaattgttccagctttgagttaatttcatggtgggtgcgggactagccagagrgatggtggggagggcagcagtggggtttatggtgctggaaactgagcaggaagtctttatcaagacagtgagagacagcttgagaaaagcctcaaggtcatgaaagagagcctgggtctaaaatgtcaagagraagaattagataaacccaaaacagctgtcaaaatcagaatacaaagggatgtatccagrgccaggacacgaggcagctcrgagcaaaagaggcagagtagagtccctgaaaggacgtgggctggagtccactctcaagagacggtcagggggtcagtgaatcagttaggcataaatcttcataggtggtttagagtatgtggaaaaggtctctgctttcctactagactgtaaatcgcttggaggcaggaaccatatcatattaacatcctttctgtacacatagcacagtgcctgaaacatagtaggtgagctggataggtctcctgaacatgtaggactgagagaaagacactgggctgaaggagaggtcatggagttaactaccaactctacttctgctaaggtgggtagcaccaggtaagttaactttacctctctgagcctcaatttctgaacaaatgaagaggctggawgatacatgtaatgccctttacaatgttgtaaaatattctgagtctaggaataataaatgaatcagtgaataaatgaataaaagctatgttgacagggwtattaacattcccatcagcaagctaatatcataatagaaggacatccctacaagtgctagagatatcaaaatgaatgagaacatggtcctctccttgaaggaatgcacaggtggagggagaaggaaggacagatggccaaggaattacaacacagtgtcacaaataccagcaaatactatcctagagatagtgctamrgggccaaaataagacatggtttcttttcttgggatagtcaggcaaagtttctgataaagttcaactgtttgtcccctccaaatctatgttgaaatgtgattcccaatatcggaggtggggcctactggarggtgattggatcatgggggcggatccctcatgaatggttttgcactaacctccttgttgatgagtgagttcttgctcagttcacacaagatctggtttttgaaaagtctggggcttcccccgatcactctcttgctygcgctcttcccatgtgatattcctgcttcccttcgcyttccaccatgactgcaagcttcctgaggccctyacaagaagcagatgccagccccatgcttcctgtgcagcctgcagaactatgagcctattaaatctcttttctttataaattacccagcctcaggtatttctttatggcaacacagaaayggactgatagaakcttctcaaagtaggagtgacatttgcgatggatcttgaaaagatgaacatgattttaccagatggagaatgaggaccccagtaaaaagtccacgtgacagagggaacaacatgtaccaaagttgcacaagtcagraaatataaggatttatyrgtggagatccaggatttaatctagaagggtatgcatttactcatgggaaaggatggaagaggagaggaggagaggggaagggaaagaaaaaaatgccattttgtgctagggatctatttgcttccatcttacctgcattgatgagtaatactcaagtctaacaaagaaagctgtgaaacagctagtatggcaatgagcttcaattccagaaagctgaagccatggaatgtgagtcctcagaagaaatttagaagtcatctgagctcaaatttcctaatatgaacatttctttttccttttatayatccctgccctgctgcctttttctccttacccacccccgttcatcattctaggactggaaatgggatgtgagagggggcaggatttaagtagtttttggttttcagctawatttkggctgggaaacacaaattacactgaacactgtcattttaaggatgagaaagctgaggcgtgggtaaaggaaatgactttctcaaagcctcaagctgggaagaaagcccccgtccttctggttttctggctcaagtccacaatccctaataacttctccatatgtaacttctctaaactatggtgagaacatctgcatgcctccatcagcctttcttaactcaggacacaggtgtagccagcctgcctccagggctgggaactgtacttctgcaggccgatttccaggtcactggctggaatcttgctccagggaggaagactcaagggcattgctgcccagatggctcttgtacttcacccccagcatcaacagagacttccaagtgttcgtctcaagagcccttagtttattgtcattcactggggctttacaaattraggaaagaaatgagagagagcaagcatgcatgcatgtgagagagaagattctaattgctctccaacmaagtgaacagagaactgaggtttgacataaagtcctggctcaaaccctgcccttctcaaatatttcatattattattattttgattataatagcttttgttgatcctctcctaagtgttgggtactgtgcagatggtttgcccacatcatctttaatccctccaaaatcccagaaagatagcattatccccgttttgtagataaagaaatgagccacagagagcccaagtcttatgttcaaagtgatacagcaacaacctagcagtgtcaggatttgagtgcagatctctctaactctgaaccttatttttaaaagctgtgtgaccttgggcaatgcagttttctcatctgtgacacagcgaataataataaaaattcatgttgtggaaagactccgagaataaatagatcaaaggaaataaaataactcttacctgtcaggattgccatcggatcaaacgagttgataaggaaaagtgctttgtaaactgcaatacactatccaaattttatcattattattatttcaaaaaatatggctgcacccgtaaaataaaacagtgtgtggcatatatttatgacaatatgcctcagaaacaatttccattctgacagcttccctccgtatcatgttattaaaaggttaaggaaaatgaacaactgaggattaagattagatctttcacacatgaaaccacaaaatcaatagagcccccgtaatctatccagcgatatgaaaaaatataccgaggtgcccagaatgattactcagggaaatgtcaacaggtattgacaaggaacctggcaaggcagctgtggtggaggcttggccactgtctcctgcacactagcgccctcctggtgaacagagactcattctgagagctcaggaatggtgagggagcccaggagatgggcacttttcaccctctccaagttctgcagaatttctctttctgcaattgggtcagagctgcataggaaaaatgatagcctaagcagcaccatggagagtgtgtgattacacctatttgtggtcaatatacggtccttttaaaacctgctattgttatccttatgctatgatggtcattatcactgtggctgaaaattattaagtattttgaagatgccaactatctttgtggatacctgtggggctgcagggccaaggctgcagtcacaaagctgtggagttccgctcagagggtttagttttcccacttatctggaaagggtttcttggagatctcagaggatggaagaattctggtgaaggttctggtgagggttttaggtcaaaactctgagatatggctaaaagtgagattgaagtctgtccctctagtactctaagatagaatgaccttttgaataaccttcatggttgcatgattctctacctgtgttaccctcctctggcagtcctggacatggatgtggagtcacagatgataataatgatagttatgatagaagtagcagcttccacctattgaacacctaccatgtgtcaagcactgtgcaggaaatttacgtttattgttcctaatccttatgacccctatacaagaataattttctctatagtgaaggaaccgagaatcagaaaggcaaagtaacttgcccaaagtcaggtagctaacaaatgacagaattgagattcaaactcagcccattacccctccagtgcctatacagcatccacttggtggcactgcctctcaaaaatacaaacccccaaaccgtaggcaagtactgcaactgggtcatgactgttaggtggaacagcctcccaccaaaggatagccaactaacagaactcatggatggtaggagtaacaggagatggtgctaacgggaccagagggtcagagcagatgctggagcagactggagaggcctggcttattctagagggcttggaaagtagcctgcatggaaaggacaagccagccccagagacgtgtagttcttgcagaactcactcacaggctgtcctactcccagcctctgaggacacaagtcataagatttggagggtgtaagagtcctcagccacttattttgcaagcatctgaacataagccagcttggttgccaggttctttgggtccttgtgccccatttctagtagctggcctctgggcatcatctactttccagaccttaagggaatccaggtgactctggcttggatgtgtgggcacttaggcttgccctgcctcagcaagtctgcctggatctgaagtgcctgggggctccttcccacagggattgctaccttattgcacaggtgagaaccagagattcagaagggagactccacctgccccagaacacacacaggtggtatgcaagtgtcaagaatgggccaaaccgcattctgtagcgtgaatcgcataacgtttcctcccactccattctgcctcgtagaagaatcttaaatctggggctaggttttaggcatcaggcagatctctacattggaaaaagccatctctctgccctctttccacccttgtttaaggaagtccttgaggttcagagtcagggtccagacaggggtgacctgagaactgggataaacttccacataatggcattggcagcaacttggatgaagttggaggccattattctaagtgaagtaactcaggaatggaaaaccaaatatctttatgttctcacttataagtgggagctaagctatcaggatgcaagtgcatagaatgatataatggactcgcagagaagggtgagagtcgtgagggataaaagactacacattggatatagtgtacactgcttgggtgacaggtgcaccaaaatctcagatatcaccactaaagaaattatccgtgtaaccaaaaaccacctcttccccaaaaactaatgaaataaagtaaaaaacttccatttgatgtagaagctgaataattataaaagctaatgcttgtataatgtactcatcatgtgcccagaattgttctaaacattttatgtatggttacttgtttgatcttcacaggagccccataaggtgggcacaattagccatattttccagacaggaaaaatgaagttaagaagtacagctagtaagtgtggtagtccacttttgcaccatgcgtcagggctgcagagcctgtgcatgtagcctctctctgatgtcatcccttaagaagacagggaattcctctatacctggctcacatatagagattctggtatcggagagcccagaggaataacaattgcacactttgacaagtgcagctatccaaacctgtatcagagttaatagacaagtgcattcaggagaaacagaaacttgtaaagtataataatattttgaatcaaaatcaacaccacatgtatacttataagactcctaaaatgtgttgtttctatattaaacaacaacaaaaaaggtaattgggtcagtcagtcagtgtattagtctgttctcgtgctgctaataaagacatacccaagactaggtaatttataaagggaagaggtttaatggactcacagttcagcatggctggggaggcctcacaatcatggcagaaggcaaaggagaagcaaaggcacgtcttccatggcagcaggcaaaagagcttatgtgggggatctcccctttataaaaccatcaggtctcatgagacttattcactatcacaagaaaagcatgggaaagaccaacatccatgattcaattacctcccaccagatccctcccatgacatgcagaattatgggagctacaattcaagatgggacttgggtggacccacagtcaaaccatatcagtcagtatgatttaggtgtcctggattcatccttgactttgacctgctgtttgtgaaccatgtgtaggtagccaggtttatgaagccaggcttttcctctctagcaaattctgcaaagttggatgctgactgcatctagactgaaataaatcttcccttccgaaaaaagggctctggttgctaaacttttcacatcagtggatacatacaggagcccatcaagtcaattgtctagctggaaggctgtttaagttggaaattatgaaattaacagccagaacataaccaatgatgatattaatcgttaccatttcctgtcatgtgtggcactgtgctaagcactttcacagccctgaacggaaatgctaagtaacatagcccatgccacacattcagtaagttgtagagacaggctctaccaacagacgttctgcctgcagagctgccctcttaacgtgtgtacaatcctagcctaatttcatatgttagatttaccacacagttaagcagaaatatacaacaaactgtagaaatgctagattggagttctggtgtcagatttgatgtcttccttggcaaagggaatggcctctggtcaggcaggaccgggttctccttgctgtggtttgcttgtgagatctggtgatcatctttagagggcccctgctcttctctctcatgccccatctttggattacatcatttccattcatcaagggtcttaaaaccctttgaagaaagatcttgttcactgtacctgccaattctcaaagttcattctaagtcttttttatgtttttactgtgttttagagaaagggtctcactctgtctcccagggtagagagcagtggcgtaatcctagctcactgcagcctcaaactccggggctggagcaatccttttacctcagcctcccaagtagctaggactacaagtttgtgccaccacaccagatggggtcttgcaattttgtccaggctgctctcaaactcctggccttaagcaattcttctgctttagcctcccaaaatgctgggattataggtgtgccccactgtgcccagccctccattgtaagtcttaagtcctgatcaaagaattactgcacttgtgagtctggacaggatgtttccctgtggtttggcggtacagtggcatacctatctctaatcaaaaagttccacctacctctgtaagccatattctctatcagcattggataaaggaaggtactcgcatattctttgggagaaaggggctcttttgattaaaacttgtatttttaaaaaagtccttcattaagcaatgccacttcctgaatgtggtaactggttttcagagattgtccccaatgcaccaccccacctgtattgtgttgctgtctcccaaattgactctgggctgaccctgtgactcattttaaccagtagaatatgatggaagcaagtctatgctagttccaggctacagccttaagaagatgtggcaacttctgcatttctacccttgggagccctgagatgtcatgtgagaacttgagttgcactattggagagaccctgtggagaggcccgctggatggccacctgaagaggaggaggcctgaggagaaccacagccccagccaggctgtccaatctaaccttcagccatcaagcttctgagccaagtcaacagacctgtgagtggagaaacaactgggactgttccagccccaacagacatcacatggaagagagatgccccttccttccgggccagcctgaattcttgagctacagaattgtgagtaatggtaacataattaatgttttcagacactaagcattctggtagtttcttatggctgtatcagataacagaaaccctgacactgtgtaacatcagaaattgcatcatagttcaaaagcctgactagtcaatcacttcgctcttcggtttggggcttcacaagcacaggggaagtttcccagactccccttccacagccacccgactagtgtagtcaagaaagtacatggttttctacttaaagttacccaagtcataattatagatgtgttcaattacttgggtttatttcctctatgaaactggaaactccatgaaggtagggagccaagagtgatatttactgctgaatcctccacttagcacagagtccagcacatagtggacactgaacatatattttttgaatgaa

SEQ ID NO: 8883 - DNA, 44527 bp, Homo sapiens
agcagctgcatcccctttgcaaacagcatcctttttctttgctagaaggggcagcttctaggtggcaggttttcaatttctcttctctctgtcgtttgctgtggtagacatgaaatttaaagcaacatctcaaggcaacaaatgtgtggcccagagatggagaaacagcacagaggccaacaagtcagatacacaatgtgggggttggggggtggtggggggcggggaggggacaacgcattagtgagaagcagaaggatgcagagagagtgcaggggctctgagacctgaatgaaactggatttgaatccatagttagctgtttgttaagtggatagccttgggacacttatgttttctgtttccctctctgtgaaactgtaaacagtagcacttacctggaatagctgtgaggattatagctaatgtttccaagttgctggcacagagtggcaatacataataggtcttacgacacagtgattgtgatttcatcatctgacttgattacaagagtaagtaagaacaaaaaactcttttggccaatacgaaggtggtctcagcattttctgttccagaaccaaagactattcttctactcgcagatggaattcaaatacctgtcgtgttcaagacagccccatggggattataggtggatgtcagaactatacccagattcaggtaagggtttgaaaacctcaccacacatgcgtgaatcttttcttgtcactgaggatcagtttgttctcttacatagcgagaaggagagattacacccacctcatgatgttgtagtgacaattaaatacaatttctcagactgcactctaatcaacaatttgcccctccactccctacctcagagtgaacttcctaatatatatatttgatcgtgtcactcctttgcttcaactcttcaatggcttcccaatgcattgtggtgaggatatagttcaagttccttagctggtactccagcatcccccaactctgcccatgacatgatgcctgttcactcctactctatctcatccctctcaacttcctgccgggacctgtgttcaaggcccactgaggtgtctggaagcttcaggagcaagccagctctctcacactcacgcaccgttgcctgtgctgctccctctacctggcacacctttcaaccccttagccattcggcaaacacccacgcacctgtagagattcagccctcacactctctgttctagaagcctttccaggccctatgccctgtagagctgatcattccctccttgtttcctggctgccccgtagcatcttttgtaacggtacacatagcatatgctcacatgttggcattctttgtgagaacataggctcatctctgtatcctcagagcccaacagaaagctccacccaggggcacaatgctatagatagggttgctatggttcccttaagtcctccattccggagacattttcttgggtcctgaatgcttctctgtgtacacacagtacacacaaggaaggtcttggcagcttagttattctctgggctaaatggagtttcttgatcatcctaatagctgttacttattgagtggccaatagatagtgaacgaatgctcatcatcctgtggttcctaatggcagctcaacagaactgagaccagaggctgtgtcccatgggtaggaggtactcctcacataaagtgaaaggtttgttcagatctcatttttggactaagtaaaaggaatggaattacagtccctcttcccacaggagtgtttacatggaggccggggacacatgcacacttcaacatctcatggcaggggtttctcatgcacacggagcatccccacattgctacgtcactggctcttctatcactggagcccaagtttgagctcccactaggatattttctttagcttgttttgcaccttgttaatggagactaacaatgatgaaataaatcagccagcatttaactgctgggaaccttgtggggggtgagagagagagagagagagagtgtgtgtgtgtgtgtgtgtgtgtgtgtgtgtgtaagaagggggtgggaaagaacctgagaatctgaagatttggggttgatgagcaggtagagtaggtcaatctcatttattaaaatcatttcatgaatttgctcttttgtcctctgtatgtaacaaactttctttttcataaagaatcacacggaggctttgttcagaatacagaaaaaatatcctattcttctcagcatgacaaaatacatttaaacctgtcagtttcttacaggaacttttgttgaaatcagctacttggttccacaataatttgaaaagagttgttgatagtatgttatcagatgcatgcaaattgccttaagagacgttcctcattcaataggcatgcaacaaagagatggtcagcatcatgtggctgcaccttccctgtcatattattgatcagggaattattggtaactgtcacttacctggagccaggcaaactgagacagcccagggcagcacagagaagaaatagctccaccggcgccctccaagcccatgtcctggaattcttcattttcccaatgtgacaggagatgccacagaggctgctagacccataacaagcctgtgctgtgagtgccactgtcagcttctgtccccaagagcaaatagctctgcaaagtaaacagaaagccactagtgactggaaacagactttgcacagaccaaaaacttacctgtcactctggaaaccaaccagaataatgaaaaatctgtagcagcatggtgtttattcctctgtaactttagggtaagctgccaagtggacaggctattagtgaggtggcaaggactgtgggatctaggtctagacagcctgggttcaagtacattctctgccactgactaggttggtgcaaaagtaattgcagtttttgtcattgcttttaatggcaaaaaccacaattacttttgcaccaacctaacagctttggactatgggcaagttgctttacttctgtgccttactctccttacttgctaagtggtgagaattaaacacgttaatataaggaaatgtttagaacaggcctatgttcagcgctcagatatgtcagctattattacttagtagaattcagggtttggagtcagacaggccaaggtttgaattccatgtttgcctctttccagttacatgatgttgagcaagtcagtaagaggctgtagggctctagaacccatctacctgacttcaaattgcttctgtatgattcaccagctgtgtggccagagaaaattactaaccctctctgggcctaagttccttcatcaataaaacagggataataataataccaacctcaccgggttgttgtgaagattaaataaattagattattattaattattattgtaattataattaattataattattattattaaataaattagatttatttaatcttcacaacatgttcaaaacatgttgaacattgcctggcacattctatgtgcactctctataagtgagctggtatttttattgactgtctctgattctgtttcttcatatgtaaaattaggaggactatgacaacttaccactcacagttgggagagtcagaccaaatactaaatgtgtaattgttgaacaaataggcattatagaaataactacatgacactttgggaggccgcggcgggcggaccacgaggtcaggaaatcgagaccatcctggctaacatggtgaaaccccgtctctaccaaaaatacaaaaaaaattagccaggcatggtgttgggcgcctgtagtcccagctactcgggaggctgaggcaggagaatggcgtgaacctgggaggcagagcttgcagtgagccgagatcgcgccactgcactccagcctgggtgacagagcgagactccgtctcaaaataaaacaaaacaaaacaaaacaaaaaaaacccaggaaataactacatgaaaataattatctaaatatatatgtgctgttgttgttattgtttgcatcccaaaagatacaaatgactgaggttctcaaacctaccttcctgaaaaccatccctgactccccagaatcaacatattaaagtccaaactgcaccaacctggcatttacaaaaccaacctgcaacgcataaagggctgagtccacgtgttggatggcgtcctgttgcttttgctattgcagatgtgggtgaggaacctcacatgggagaggcagcttgcaaggtatgagggtgggctagtagaaagaacactggatttgctttccttaaacacagttacagagtttctctaagactctgttttctcatctgtgaaatagggataataattcattactacctacttgataagtttgttttgggtttgaacgtacaaaacgggaagcctccccctcctgccacccctgccgagtagctgggttggggttggagaatcaaataaggaagtatagtgaggggatggatgggaaagccacagaagatggtagtcctctcacattaattgtgtccaaaacacagaacacaagttctgctgccagaccacccaggatgcattccagttgtcataagcctaggtgcaagactccatgtcaccgttgtcccaaaggatgaattgacctgaactttgacgcaattgattgtggtggttaatcatttgtaaacaagcagaaacttgtgtttcaagaaagatccatgtcctgtctcctatctgcctgcctttaagagaagccaaacccttagaagacagggctccccttcgacctcctcaacctgatgtactcacggaggagcctgcaggtttagagaggacagttacacgagtgaatcctgtgctctctcacctccaggatttttgcatgccgttccttctgtccagagtatgtgccacttagctaaatacgactcattattcgagttttatattaatgtcacttgctcaagaaagccttcccaatagattcccctggggttcttaacgctccaggcgcccccaggtctcccggagttccaacctcatcgcgccccctggtggtttcccagtgcagctcacctgagatcccgcctggaggacggcagcctcaggctttagtgatagtaatacacatatttttcagggacagttcttaacaatttaacagttttcccatacatcatcttgtttgattttgacaataagccaagaaacataatatcatcttccaagcctctaagatggggcttcacagctgtttccacagctggttagtaggacatctttggcttgatacacttttttttctgactcctaaatgctcctttttctagctctgaagcttccccttgcccttaggatgtgccagcactgctttaagtcttcacagttatcacaccacactgctcttctggtctagctgctcttactcagggctatagatctcatctctgaccatgcgagagctttgaaactgatcatatgtctctaggcctttaaacgatatgaaggaatttgtaactctaggtctgcggatccactaacagtttgttgtttttccaacttttattgactgattttccaggctccacccagttccacagccaatgccacttttcatgtttctgctatggcagcactccactcctggtacctatttttgtattagttagcttttgctgcataacaaataatcccaaaattgtagactaaaacaatcatcatttatcagctcacaattccttgggtcatcaaataggcctaggctaaaatgggtgctggccttgccttggttcagccaactggtaggtcagcaggagcctggttggtccaggatggccttactcacctgcctgatgattcattctgtctgtcagttagcactggctgttggctgaagtgatgaagtaaatgggccacatgactccaaatagactaactcaggcttgatctcagggtgatctaatggtttcaaaaagcagcaagaaaagacaagccccagtgcacaagtgctttccaaayttctgcttgcctgatgtttcttaatgtctccttggctgaagcaatggccaagcccacattcaagagctagagacagagcttatacctgttgatgggaggaagagcagagtcacattgcaaaggggtatgcctacaattttggaaggaattcgtggacattcggcaatttcttacagacatgtgacactttcgggctgaagcacttaagagccagtgtgccctgtccatttctgtcttctgtcctgtggatttggaagcatgtgttgacagaacaatgtcttatggtgaaggaagcctaaacccctgagtcattggatggaggagagcccatgttgacccataaaggacttcatgtgagttagaattcaacttttgttgtgctatgttattgggatttggtggtttattgttgctgcaataatacctaccccattctgaccaatatacttttaatatattcttacattgcataaaaaatttggtgtgtatatacatttttctgggggaaaaatccataactttcctgagattctcaaaaggacttaagatttaaaagaagtaaaacaaaacaaaacatttcctcaagagatacaactttttcagccaacataattatctgtctccttttgaagatcatgtgatatagtgtgaagtatttgaggattcagaaagactgagacatctcatttctcctgtgacttagtttatatcctggaccaaccccttaagccctctaagctgtagtttactgagtttcaaatgcaggcttgttgataaaacacttcaacaatcatttattgagcacctactagatgccaagtgcaatgctacttgactgggtataaagatgagtgtgtaatggaccttccctatgaaagctcacagcttagtgagatgggcaggcacagtaaaacatcacagcagtacagtgtgacaatgagagaggtttacacagcatagctcaggcatcagcgaagtatgtgtgtggccattggaaaagtattctcaggaatgaggtgacacttaagggttaaagaggagttagcaaatgaaagggagggcatgtggcattacagataaaggggtcatcaaagttatgatccaaaggtgaggaaggtcactgggtctgtgggaaccataagccattcagtgttgctgtagcacagagttcagcatgagcaatggaaagaaatgaaacaggagaggcaggcaggagccatatcaggtagggcctgatgagcatgctaatgacatggattttatccaaactgcaagagaagctattgaagggtgttaggaggagaagaaaagggactgctttctttgagagattactcttgctacagtgtagagaatggattagagggaggcaaattggagccgagagaccccttaggaggctgtcctaagagtccactgagaaaagatgcaggcctgaattagggtggtggtagcagaagagagagtagagatggaaaggaaggcataaacataatacctgtcttatgtcactgagggaagaaaataacacaccctcagtgaacagtgaaaggctttgtacactacacagctctgtgcaaaggtggaattatgatgactgaggttatagttctctactaaggaaggtatataaagtccctggggctgagcctggcagctgttcagggtgacaccaccctacacagcacgcatttcgcccttcatcacacacagccccatggattacagcatggtcttgtccaccttcagatgagctccttgtcttccaggctcaccttccctggatcctggaggacagaatctatctccctcctgttgttctagagccttaatcagtgtctgggaaatgccgacgtctactgtttccactgtagatttttccttgcggcctggggaacctgattttcaaaagtccttagctgactgctgtgataactacatcaccgaaggtggttatgcatattggaatgccttatccattgcatgggtattatcaccactgtggttcaaaattttcccagaaggaagtgtaggtgggctgagtgggcaacaaggttattggagggctatctggggaaaataaaacccgaatgagaaaaagaagtggctctattcccaactggaaaaacaagaaggaaaaaaattaaaagaaagataatgatagccagcaaaattatcctcctgtggcaaagagaacagccgtgtagggagcccatatctctttgctcttaaactacactacatgtcctagcttcccttgcaattatacttaaccctgtgactgcagtctggtgaatgaaatatagggagaagkggtgtgtactgttttatgtctgacccatgataaacctccagtgtgaaatcctacactctcttttttcctcatatgccagctacatgtgggtacccatggtaatcgtgaaagctagtgctaaagagggcagaatctctggcagcctgagttcctgcatgactgcctggagcagaatcttctgcactctcttctgattagactatgcaagagtaaaaaagaaatttctattgtagtaggccackgagatgtcagtgtttttctgttatagtggctagcattacctaaacaaatacactctccttccccaaatcctcattctccacctcacaaaactggcaagcattsactagaaaggagtcacaggttgaaaaccgccttctaagtggtcaatgtctatgacatggatgtggtggtggcaggaaggcagtgtctatttagcagaggaggctatctattctagggttttgtttgttctctgtgttgacagatatggaaattctgtgtcctttattatgtatatttctgtatataaagaatggatatctatttatctgtggacatgcacaggtgccctstttcttctatggtgcatggtcttataaattataggtaattatttctctctggctgtaaaagaggcttagatgtagaataccgtgtaagccatatagttcaggaacagatagtggtatggtttgcatgtgtccccacccaaatgtcatcttgaattcccatgtgttatgggagagacccggtgggaagtaattggctcatggaggcaggtctttcccatgctgtactcgtgatagtaaataagtctcacaagatctgatggttttagctctcttctcttgtttgccagcatgtaagatatgcctttcacctttcgccatgagtgtgaggcctccccagccacayggaactgtaagttcattaaacttctttattttgtaaattgcccaatcttgggtatgtctttatcagcagcatgaaaatggactaatacagataggatgtgtactaatmacggttggtcagcactgatggtgacaatgagcactgtataaccaggtggatgcaaaaggtgctccaagtgtgctccaaggcgaggggttcaccagagtgctgagaggagagctgacctcgcagatgttgtttccatcatttgggatgtgctcgccaaatgcaagagggcggactgaagagatagctctttaggtacaattygatttggtactagttatttagggccaggtgtgggcacaatatgtttaatactggaggtacagtacatcatatgttctgttaagtcgtttttgtggttcctaaaaatctttgaatattttactgacctcatgagccatgaggcattgacatcattgggataggcaatgaaacatctccagttcaactcagagcaactcattttcacaaatgtttttaatataagtacagacaattgaaagattactcactttctactccagatagttccagaaatgctagaaatgtgtggggaggaaaaatgrgattctacttggcaatgggccttgaaactaattccctgggggacttgaaacaactgatggattatgtagttgcattgattttgtggattaagtgtggcaaatggtgaagtttaggccaccctgtgcatctgttcatttgctcactacacgatcaagttcaaacttttagcctagcaaattaacaatttctcaatctctatgctccagctactccaaacttcttctcttttttttgagatggagtcttactctgccacccaagctggagtgcagtggtgcaatctcggctcactgcaaccttcacctcccaggtgccagcaattctcctgtctcagcctcccaagtagctgggattacaggtgcctgccaccttgcccagctaatttatatatatattttagtagagacggggtctcaccatgttagtcagcctggtcttgaactcctgacctaaggtgatccatccttctcagccttccaaattgctaagattacaggtgtgagccactgtgcccgacccaaacttcataccaattcaaacactgcataagttcatttattcattcaaaaaatatatgttcagtgtccactatgtgctggactctgtgctaagtggaggattcagcagtaaatatcactcttggctccctaccttcatggagtttccagtttcatagaggaaataaacccaagtaattgaacacatctataattatgacttgggtaactttaagtagaaaaccatgtactttcttgactacactagtcgggtggctgtggaaggggagtctgggaaacttcccctgtgcttgtgaarccccaaaccgaagagcgaagtgattgactagtcaggcttttgaactatgatgcaatttctgatgttacacagtgtcagggtttctgttatctgatayagccataagaaactaccagaatgcttagtgtctgaaaacattaattatgttaccattactcacaattctgtagctcaagaattcagrctggcccrgaaggaagggkcatctctcttccatgtgatgtctgttggggctggaacagtcccagttgtttctccactcacaggtctgttgacttggctcagaagcttgatggctgaaggttagattggacagcctggctggggctgtggttctcctcaggcctcctcctcttcaggtggccatccagcgggcctctccacagggtctctccaatagtgcaactcaagttctcacatgacatctcagggctcccaagggtagaaatgcagaagttgccacatcttcttaaggctgtagcctggaactagcatagacttgcttmcatcatattctactgkttaaaatgagtcacagggtcagcccagagtcaatttgggagacagcaacacaatacaggtggggtggtgcattgggracaatctctgaaaaccagttaccacattcaggaagtggcattgcttaatgaaggacttttttaaaaatacaagttttaatcaaaagagcccctttctcccaaagaatatgcgagtaccttcctttatccaatgctgatagagaatatggcttacagaggtaggtggaactttttgattagagataggtatgccactgtaccgccaaaccacagggaaacatcctgtccagactcacaagtgcagtaattctttgatcaggacttaagacttacaatggagggctgggcacagtggggcacacctataatcccagcattttgggaggctaaagcagaagaattgcttaaggccaggagtttgagagcagcctggacaaaattgcaagaccccatctggtgtggtggcacaaacttgtagtcctagctacttgggargctgaggtaaaaggattgctccagccccggagtttgaggctgcagtgagctaggattacgccactgctctctaccctgggagacagagtgagaccctttctctaaaacacagtaaaaacataaaaaagacttagaatgaactttgagaattggcaggtacagtgaacaagatctttcttcaaagggttttaagacccttgatgaatggaaatgatgtaatccaaagatggggcatgagagagaagagcaggggccctctaaakatgatcaccagatctcacaagcaaaccacagcaaggagaacccggtcctgcctgaccagaggccattccctttgccaaggaagacatcaaatctgacaccagaactccaatctagcatttctacagtttgttgtatatttctgcttaactgtgtggtaaatctaacatatgaaattaggctaggattgtacacacgttaagagggcagctctgcaggcagaacgtctgttggtagagcctgtctctacaacttactgaatgtgtggcatgggctatgttacttagcatttccgttcagggctgtgaaagtgcttagcacagtgccacacrtgacaggaaatggtaacgattaatatcatcattggttatgttctggctgttaatttcataatttccaacttaaacagccttccagctagacaattgacttgatgggctcctgtatgtatccactgatgtgaaaagtttagcaaccagagcccttttttcggaagggaagatttatttcagtctagatgcagtcagcatccaactttgcagaatttgctagagaggaaaagcctggcttcataaacctggctacctacacatsgttcacaaacagcaggtcaaagtcaaggatgaatccaggacacctaaatcatactgactgatatggtttgactgtgggyccacccaagtcccatcttgaattgtagctcccataattcygcatgtcatgggagggatctggtgggaggtaattgaatcatggatgttggtctttcccatgcttttcttgtgatagtgaataagtctcaygagacctgatggttttataaaggggagatcccccacataagctcttttgcctgctgccatggaagacgtgcctttgcttctcctttgccttctgccatgattgtgaggcctccccagccatgctgaactgtgagtccattaaacctcttccctttataaattacctagtcttgggtatgtctttattagcagcacgagaacagactaatacactgactgactgacccaattaccttttttgttgttgtttaatatagaaacaacacattttaggagtcttataagtatacatgtggtgttgattttgattcaaaatattattatactttacaagtttctgtttctcctgaatgcacttgtctattaactctgatacaggtttggatagctgcacttgtcaaagtgtgcaattgttattcctctgggctctccgataccagaatctctatatgtgagccaggtatagaggaattccctgtcttcttaagggatgacatcagagagaggctacatgcacaggctctgcagccctgacgcatggtgcaaaagtggactaccacacttactagctgtacttcttaacttcatttttcctgtctggaaaatatggytaattgtgcccaccttatggggctcctgtgaagatcaaacaagtaaccatacataaaatgtttagaacaattctgggcacatgatgagtacattatacaagcattagcttttataattattcagcttctacatcaaatggaagttttttactttatttcattagtttttggggaagaggtggtttttggttacamggataatttctttagtggtgatatctgagattttggtgcacctgtcacccaagcagtgtacactatatccaatgtgtagtcttttatccctcacgactctcacccttctctgcgagtccattatatcattctatgcacttgcatcctgatagcttagctcccacttataagtgagaacataaagatatttggttttccattcctgagttacttcacttagaataatggcctccaacttyatccaagttgctgccaatgccattatgtggaagtttatcccagttctcaggtcacccctgtctggaccctgactctgaacctcaaggacttccttaaacaagggtggaaagagggcagagagatggctttttccaatgtagagatctgcctgatgcctaaaacctagccccagatttaagattcttctacgaggcagaatggagtgggaggaaacgttatgcgattcacgctacagaatgcggtttggcccattcttgacacttgcataccacctgtgtgtgttctggggcaggtggagtctcccttctgaatctctggttctcacctgtgcaataaggtagcartccctgtgggaaggagcccccaggcacttcagatccaggcagacttgctgaggcagggcaagcctaagtgcccacacatccaagccasagtcacctggattcccttaaggtctggaaagtagatgatgcccagaggccagctactagaaatggggcacaaggacccaaagaacctggmaaccaagctggcttatgttcagatgcttgcaaaataagtggctgaggactcttacaccctccaaatcttatgacttgtgtcctcagaggctgggagtaggacagcctgtgagtgagttctgcaagaactacacgtctctggggctggcttgtcctttccatgcaggctactttccaagccctctagaataagccaggcctctccagtctgctccagcatctgctctgaccctctggtcccgttagcaccatctcctgttactcctaccatccatgagttctgttagttggctatcctttggtgggaggcygttccacctaacagtcatgacccagttgcagtacttgcctacggtttgggggtttgtatttttgagaggcagtgccaccaagtggatgctgtataggcactggaggggtaatgggctgagtttgaatctcaattctgtcatttgttagctacctgactttgggcaagttactttgcctttctgattctcggttccttcactatagagaaaattattcttgtataggggtcataaggattaggaacaataaacgtaaatttcctgcacagtgcttgacacatggtaggtgttcaataggtggaagctgctacttctatcataactatcattattatcatctgtgactccacatccatgtccaggactgccagaggagggtaacacaggtagagaatcatgcaaccatgaaggttattcaaaaggtcattctatcttagagtactagagggacagacttcaatctcacttttagccatatctcagagttttgacctaaaaccctcaccagaaccttcaccagaattcttccatcctctgagatctccaagaaaccctttccagataagtgggaaaactaaaccctctgagcggaactccacagctttgtgactgcagccttggccctgcagccccacaggtmtccacaaagatagttggcatcttcaaaatacttaataattttcagccacagtgataatgaccatcatagcataaggataacaatagcaggttttaaaaggaccgtatattgaccacaaataggtgtaatcacacactctccrtggtgctgcttaggctatcatttttcctatgcagctctgacccaattgcagaaagagaaattctgcagaacttggagagggtgaaaagtgcccatctcctgggctccctcaccattcctgagctctcagaatgagtctytgttcaccaggagggcgctagtgtgcaggagacagtggccaagcctccaccacagctgccttgccaggttccttgtcaatacctgttgacatttccctgagtaatcattctgggcacctcggtatattttttcatatcgctggatagattacgggggctctattgattttgtggtttcatgtgtraaagatctaatcttaatcctcagttgttcattttccttaaccttttaataacatgatacggagggaagctgtcagaatggaaattgtttctgaggcatattgtcataaatatatgccacacactgttttattttacgggtgcagccatattttttgaaataataataatgataaaatttggatagtgtattgcagtttacaaagcacttttccttatcaactcgtttgatccgatggcaatcctgacaggtaagagttattttatttcctttgatctatttattctcggagtctttccacaacatgaatttttattattattcgctgtgtcacagatgagaaamctgcattgcccaaggtcacacagcttttaaaaataaggttcagagttagagagatctgcactcaaatcctgacactgctaggttgttgctgtatcactttgaacataagacttgggctctctgtggctcatttctttatctacaaaacggggataatgctatctttctgggattttggagggattaaagatgatgtgggcaaaccatctgcacagtacccaacrcttaggagaggatcaacaaaagctattataatcaaaataataataatatsaaatatttgagaagggcagggtttgrgccaggactttatgtcaaacctcagttctctgttcacttkgttggagagcaattagaatcttctctctcacatgcatgcatgcttgctctctctcatttctttcctyaatttgtaaagccccagtgaatgacaataaactaagggctcttgagacgaacacttggaagtctctgttgatgctgggggtgaagtacaagagccatctgggcagcaatgcccttgagtcttcctccctggagcaagattccagccagtgacctggaaatcggcctgcagaagtacagttcccagccctggaggcaggctggctacacctgtgtcctgagttaagaaaggctgatggaggcatgcagatgttctcaccatagtttagagaagttacatatggagaagttattagggattgtggacttgagccagaaaaccagaaggacgggggctttcttcccagcttgaggctttgagaaagtcatttcctttacccacgcctcagctttctcatccttaaaatgacagtgttcagtgtaatttgtgtttcccagccmaaatwtagctgaaaaccaaaaactacttaaatcctgccccctctcacatcccatttccagtcctagaatgatgaacgggggtgggtaaggagaaaaaggcagcagggcagggatrtataaaaggaaaaagaaatgttcatattaggaaatttgagctcagatgacttctaaatttcttctgaggactcacattccatggcttcagctttctggaattgaagctcattgccatactagctgtttcacagctttctttgttagacttgagtattactcatcaatgcaggtaagatggaagcaaatagatccctagcacaaaatggcatttttttctttcccttcccctctcctcctctcctcttccatcctttcccatgagtaaatgcatacccttctagattaaatcctggatctccacyrataaatccttatatttyctgacttgtgcaactttggtacatgttgttccctctgtcacgtggactttttactggggtcctcattctccatctggtaaaatcatgttcatcttttcaagatccatcgcaaatgtcactcctactttgagaagmttctatcagtccrtttctgtgttgccataaagaaatacctgaggctgggtaatttataaagaaaagagatttaataggctcatagttctgcaggctgcacaggaagcatggggctggcatctgcttcttgtragggcctcaggaagcttgcagtcatggtggaargcgaagggaagcaggaatatcacatgggaagagcgcragcaagagagtgatcgggggaagccccagacttttcaaaaaccagatcttgtgtgaactgagcaagaactcactcatcaacaaggaggttagtgcaaaaccattcatgagggatccgcccccatgatccaatcaccytccagtaggccccacctccgatattgggaatcacatttcaacatagatttggaggggacaaacagttgaactttatcagaaactttgcctgactatcccaagaaaagaaaccatgtcttattttggcccyktagcactatctctaggatagtatttgctggtatttgtgacactgtgttgtaattccttggccatctgtccttccttctccctccacctgtgcattccttcaaggagaggaccatgttctcattcattttgatatctctagcacttgtagggatgtccttctattatgatattagcttgctgatgggaatgttaatawccctgtcaacatagcttttattcatttattcactgattcatttattattcctagactcagaatattttacaacattgtaaagggcattacatgtatcwtccagcctcttcatttgttcagaaattgaggctcagagaggtaaagttaacttacctggtgctacccaccttagcagaagtagagttggtagttaactccatgacctctccttcagcccagtgtctttctctcagtcctacatgttcaggagacctatccagctcacctactatgtttcaggcactgtgctatgtgtacagaaaggatgttaatatgatatggttcctgcctccaagcgatttacagtctagtaggaaagcagagaccttttccacatactctaaaccacctatgaagatttatgcctaactgattcactgaccccctgaccgtctcttgagagtggactccagcccacgtcctttcagggactctactctgcctcttttgctcygagctgcctcgtgtcctggcyctggatacatccctttgtattctgattttgacagctgttttgggtttatctaattcttyctcttgacattttagacccaggctctctttcatgaccttgaggcttttctcaagctgtctctcactgtcttgataaagacttcctgctcagtttccagcaccataaaccccactgctgccctccccaccatcyctctggctagtcccgcacccaccatgaaattaactcaaagctggaacaattacagagatacttctgtgggccagcctcctgtgcacctctggcatgtgggtttacttttagaggagaatgaatccactaaagcacatctttcttgaaatgatggtttccagagcagcaaaagtatagcatgcaccatttgcaaggagcaattcttgctctacctaaaatgccatcagcacaaagcatggatggctttgtagattgttactttttgagtaagctcatgtggagtttgataaaacttattcctcatgatccataagccaggtgtttctactgagataacatattattatttgtgttgaatctcagccrttaacataactgatattggccaagcatttcccatcctctggttaggtaactctcaaaagagctgggcaaggtatgataccagaacatggcccaggagcttcctaaagccaagtggattgcaggtgaaaatgagrggacagtcacttctcccttaygttctccagraagcatggaatagcaaaagaaccagaactttggtatctgtgagtacagggatctggctgtaccatttatctggagagggtgttttaccacttttgagcttcagtttcttgctttataaaatggggatgagaatgcccatattacaggggtcttgtgagaaaatgaagaagaatgtagatatgctaactccccaccctaaataccatcatatatatatatagacatatatatatagacatatatatatatagacatatatatatagacatatatatatagacatatatatatatatatagacatatatatatatatatatwgacatatatatatatatatatagacatatagctgtaaggagaaggtgggaaagaacaggcttggtggaaaggggaaaatgcgaatgatagatagagrtaattgtgagctgcctaarggrtggactcctggactagctgtgcagagatgaagagatacacggagcttgtcacaggccaaatagctatggctacggggaggggacaactaggtctggccttgcccagcaaggagtcaggctgtgatttctgggggactaaggactgatttgaagcagaactgcagcctgataagacagggagatgatccagtgccacacagagaagaggcctgctgccaaaaagcttgtcagaacctcaggmagacccattggcaccctggggaggacatcctgtagcatcrgagtggacatcacctaytggaattgaaacayggttcctaagaatgggctctcatggccaggatccaaaaggaaggctgtggttccacgaggagacctgttctgagtcgagatgacaaagctatctccaaaccccacctgctagggaggataagattgctaacaaccagctctgtggtcagarctggctcagctgcacagggtagtgctattggcagctaaagatagggtgggggaagaagagacctacgaagtgttcccaaasccctctccaactccccgtttggacaagaaagcctatcaaggcttccgagacatctaaggaggagagccagtaactgctcagagtacatctttatgatgacattccagaaaattcaccacttactgtagtttaattcctccttgtctatttgaatacctgggtggaaatatcagactcacccaggctcagttctacaggtaaygtggagccaaggagggtcttagaagagcagagtagatgagcaaagctgtgtttctcagacactgcttaagatgcatttcaaagggcaaagacaaggygacctcttaggaggcttgttctgcagtgctagcggggatgaagaagagaggctaagggataagcatggctaaggtgggattatcagaatccacctgtaaaaktagggaggaggcatggatggcagggacccaacagacttcaggcaatactctgtcctttgccccatgaggatagcctgtctccacaggaggaaggctgcgattcttcacccacccactcttccttgcaatggagacacctagagagtttggggtagtaagaaagggtaaggttgagaacccagccatgtgtattggcccagacagagccttggaagggagaaaaggagagggtcacagaaactcrtttcataaccaaatttccagccacttctcctctactgggcctctgcttctgcatatggaggtgggattggtggtcactgctgcttcttagagagggtcacaagggagtgtaaggagtgccagcagccaggtgggtgggcatgagagcagatctccctgtgctcctcaccagcgctggacctcaggcaytttattgatatttaacaagcacaaatttagaatttaccatgtgctaggcactttataattgctagcccatttatgcctaattacagtgctaacctcatctcaattttacagatgaggctacggcagctctgagaagttaactcacccaatgtctcagagctactaagtgatagaactggaatccctgtactttcctgtaggaatattgtacctaaatttcatgtacacacatgttgatctatgttgatctatgtgtgcatgaaagatgatctttcaaatcaatggttcagtgaaagaaaacaagttgtatgcattgcatactattatttatattttttaaaaagcaaacacctataaaacaaaaactatgtatgtctgtagtaaacttttgtgaatgtaaatacctaggagaatctggaagggcacactgaatggataattgtttgtctctgggaaagaaactaggataaaatggcatggtcaacaattggttttctctgtaatattgttatattaagaatgtgtttatggtcatggtgtaattaaaaatacattttttaaaactaatggaaaaatagggttggcacagtaaggttagaagcatagaagcagacatgaaagttttatatctatgaattttatatwttctttttctttctttctttctttggtttttttttttttttttttagatggagtttcgctctttttgcccacgctggagtgcagtggcatgatctcggctcactgaaacctccacatcccaggttcaagtgattctcctgcctcagcctcccgagtagctggggctataggtgcatgccaccacgcctggctaatttttgtatttttagtagagatggggtttcaccatgttcgccaggctggtcacaaactcctgacttcaagccttccaaagtgctgggtttacaggcatgagccaccacaccaggcctatattttatattgtctaaactttttaatttttatgtttactaaaataaagggtgtatactaaataaacatgctgttgttcctttgcaagttgtaaattataaacaataggctttgtagattgacaaagatatgcttcctttgatcacagcatggctttcatgggtgaggtgaggttggcaatgatggtgctataattttgagaagaaaggcagattgtgagtgattgggagtagaaatctctgggccttcttcctcctcmaactcactgatggccatgatctctaaaatgcctctgtttttcagagctgagttttgtgtgtctcctgagttagtaaagtcattggctgtgtaaggtacgcaagggtctggtcttgcccaacccgttttcacatctcttttgaagaatgcataaagtgcagggtgcttggtttttttctgatggtctctttgtgcctgtttaaggatgagagtgtgtcattcaaaccttgtccaaagatcaaactctctttgaggaggggattgatggaattccactgactgctttatcagtgtagtttgaagcttagagagagaaattgcttaagtgcttgtcagttttgtttttgatcccaaatcctcttcctttttctccaacacacattgcccactgtcaccaaacaacctcttctagttcaatgagtaacttctggtcctaattaaggagtcaacttggagtaatgattaagaacctgagttctagagtcagactctggatgtgaattttagcccttccaagtgcagcttctgtgacctgtgagctttctctctaagcctcggtgccattcttgtaaagtgggaacaataatagtttaaaccttacagggctgttgtgaggatgaactgagacaatctaagtaaagcatctcacatggtgtttaatacaaattaaaagctcaacaaatacttcctattattatgacatctgcatagcatttcatcaccttggtctaaaggtggggtttggagatagcattgtcccagcaggtggggtttggagatagctttatcatctcgactcagaacaggtctccttgtggaaccatggccttccttttggatcctggccatgagagcccattcttaggaaccatgtttcaattccagtaggtgatgtccactccaatgcagcaggatgtcctccccagggtgccaatgggtctgcctggggttctaacaagctttttgggaccaaaccccttctctgtgtgctgcagttctgcttcaaatcagtccttagtcccctagaaatcacagcctgactccttgctgggcaaggccagacctagttgtcccctccccgtagccatagctatttggcctgtgacaagccccttgtatctcttcacctctgcattactagtccaggagtccaccccttaggcagctcacagttatctctatctatcattcacattttcccctttccaccaagsctgttctttcccaccttctccttactaccagttctttttatgttttcttaataacaaaagtgttgttggttcttaaaacaacatttatttttttctgactaaaaaaaggatagctattcagtatagagaaacaggacaacattgcacatgtatcccggaacttaaaattaaactaaattaaattaaaaagagagaaacaggaaaacaaaataaaaaayttcagtgcacagaataaaatggaaatcatatgtaatcctactacctggatttttacagttttttttctatgcttatatgtgagtatgtacatttacccaaccaaattagaaatgtaatgtatacatgattgtatacttyttttttttgacagggtctcgctctgtcacccaggctggagtgcaggcgtgctatcttggctcactgcaacttctgcttcccgagttcaagagatcctcatacctcagcctcctgagtagccgggactacaggcatgcgccaccacacccaggtaatttttgtatttttagtagagacagggtttcatcatgttggccaggctggtcttaaactcctggcctcatgtgatctgcctgccttggcctcccaaagtgccaggattacgggagtgagccactgcatccggcttgattttacactttgttatattgaatgattactgaaaaacagtctgaaaaacaatggggtaaaataggttctgtaacattgtaatggctgcattcataaacattcataaaattacactgattgattgatgtggaaaataaatataagagacatggtctctgtcttcaaggagtatatcagtgattatatagtcatagcatcctattctacaaatataatatttagctagttttatattatttgaaatttagacttctagtttttctctgttatatatataaaaagtgaacatcttaatacatattcgttcactacgacggaaattcccatgttttaaattccagtcttatacatggaattgtcatgttgaatattatgtccttttaaaagtaattgacttaaaaatctttgaatcaaacactcgaagttgtttgagtgcctttttcctcatagcctcaccaacacagataatcacttttaaaattattggtcatctgataggcaaaagttatcttgttttaacttgaatttttgattataaaaattggtacattaaaatgcttttgggctaattaaaaatattggaaacagaaagtaggtagtaacataacatttcaaatagcatactgaggtatagatggtaagtttgttttctcccaccccaggctcctacaccccatctctggagctgaactctctagttagcatgtgcttaacatgactgcatgagggcaagggctttgttttcccagcgtgtagaatgatggctggcacacaacaggtactcattggatgcttattaaataaataagcactttcctgaatagagtaatgaaaattttctatgtaaacataaacacctacatgcatactttttaatcctttttatattattaacaaaaatgggaactcaccacacacactattcttaaatgtctcgatattgttccatataaacatatttagactcctttcactttttgaaaaatgctgcatagtacggtaatttagttaatatccttcctattgatgaaacatttaggggctttatgtctctggctattatttatggacgtttcttcttcaggaattgtttgctcatgctctttactaattttgctataaactttttctataaagctattaggagctttctgtacatttagaacaataaagctttgtttataatatatgctgtaaatattttcctaatttcccatggtcttttaatttctttttttatatcaatttttggtaaacctattcatatttttataaatatttattttctgcatttggtggtatacttataaggaccttttctaccccatatgaatattcattaatattttcccatacactttcgtgtttacatatgtttaacttatatggaatttaattacccataaggtataaggtagaaatctaacattttctagtagtctttgttatcctagatccatttattgaatagtatattttatccctgctaattagaatatattcaatcataaattaatttcttgagtttatttctgtactttatattctgtaaaccatgactaggtaaatagaataaatcacagaataatttgtgaaagcaaacactttaaattattttgggtttatttttgagatctgatctgatagtataagtttatgatcatgacattgaatttttttcctcaaataatctcacattcttatctctttcagatatgacttagaatatgattgaatatgaatacatgattgaagatatattataaaattgagatacttgttgcagtaagttataaattaattwgagagagttggaccttctctttcaatttgttctattactttatgcccttcaacaagcctttgtagctttgttttgttggttttttttttaatctagctcttaaatcttcagtattaaatttattcttgggtattctccttttgttactatcattaatggaatctgtgtaagtttccagtaggttttctataaggttacttatggcaatataaaaaatattgatttttatatatttatttttaaagtagcaaccttaggtaattctcttatttgttcttatcccttctaatagatatttcctgttagaaaatattatctgcaaacactgataatgttctcattttaaacacttgatttctttttcttgcgttagtgcattgcattgcctcaaatttcagagcaatgttaaatgatagaggtagtagctgccaccttgatctccatctgattttagcagggctaccctcaattttcactgctaagtttcatattggctattggtttgaggaagatgttctttactatgtgaagggaatattactataattctagtttccagttttttttcttgaagaggataatgaattttatcagatgcctttttggcatccattaagatgagacagtctctcttgagctattaattacattctgaaagtcaactttatttagtcatggtttacagctatgtttaaaatgtaggaacttctgattatccattgaaaagattaggctataatttgtatttttttgatgttttgttattctagatttgatatatgaattgagaaatttttttttctgttgttcgacagttaaatgagcattattttctgtcttcctttacagccactccaggcatatcatgtgcactggccctgctagctaatgctcttcccyccactaccatcaccttatggtaaactcctacttacttcttttttttttttttttttttttttgagacggagtctcgctctgtcacccaggctagagtgcagtggcgcgatctcggctcactgcatcactgcaagctccgcctcccgggttcaggccattctcctgcctcagcctcccgagtagctgggactacaggcgcctgcaaccacgcctggctaattttttgtatttttagtagagacggggtttcactgttagcccagtttaaccatcaacacttccatagagcactctcccaccactcccatagtattagcacatcctttattccagcattaattctactacagkttacttgtctattaacctattttcccctctagaatctgagcttcttgaagcagggacagtcatgtatgcatcttaaaaaaatcttcaatctccagtgctcatcagaagacctggcacatagcacattgttaataactctttgttatatgaaaaagtccataatgcatttttgctttaaactttgccagggaagaaaatttggatgctgtttgtgtatacttctttgccgttctttgacaataaaatagagataatatcacttactgcccttcttcacacctgatagagttactgagctgggataatagatgggcaaggtgaaagtgaaagaattaaatacaaaaatccataatagtgattagactttctttgatattaacaacaggtaacatgcattgagcgtttactatgttccaggcatgaaattatcaaatttatttcttataatagctgcaattttaggtgagtaaatgaaattttagacagtttaagtgacttgtctgaggtgaaacaactggcaagtcaaagactttctgaaatcagggtccactatgtggaaactattctatatcgactcaccagtgaagatagtgtgctccacttaaatgagaaaagcaacgaacaataagcccagggtgaagatttggttacataccctgcttctcaggttttgcttaagtttagcgcccaccaggaagaaagaaaacgattatctgcctccttgacttttgcatcatttgtctttcttctgatgaaagtgggactaatcactgagttagggtttccttatttttagtctacaccatgttgctttatcctaaaaggataaatatgggctgtgtgatggttgaccacctttcttcttccttctatgaaggtctgaaagggcacaagacaggtaaaaaggaaacagcttttctttagtaactaagttgctagatttttgatctcatggccctgagctacacgtgaatgactttgacctgtaatctgaaataagatagacttcagagttcacctctcccaccatttcactccaaaggtgagataaggtagagttgctaaaggtacagtatgaagggcatgtggcattttagtgttgacagtatgccagctctaagacctgcttcttccatctccaaccattcctgcttgctccccactccaagctgtgatccccccgagtgagtgatagaagtggcaagaggttgttcggaagattaaagacccaagtcaccagaggctgccatctcgcaagaatatttagacatttttccacttggcagtcattaatattcttcagcaaagagtaaaaagaaagcctgttcaaaaagcctccctcttcagatctctgtaccttggaagataaagtgaatgaaagggttttgttatgaaattaaatattcattggattgagttagagctattactgttcttgagaataaaactggatttttcctttgttttaaataactacggtcattttatgtaagaatccatttctgtactgaattgatcagggtaacgcatggtgtgatttttctaatataatagacacaacagggaaatgaatacagaagggctcaaagtattttatagagggtatacgagcaatttgacgtcgcagaaaacctgtcagaaagaagcaccatggaatagaggaaagaggcccggaatccagccccgggaactgtgacagcctctgggtgagatctttggctctgttaattgatagctgttgtggaacacatctgagtttccgtttcctaacctgtgacatggagagcatattcttttcctcttggggttcgtgtaaagatttggaaacagtagctagaaaatgagtggcacggacaaagcaggagcacaacggtggcagtgattattcccgttttcacatacatacccagaccggtcacgaaatggctggaaagccattcacatctgtttactttctctctctttttaatcttccaggcaccattgctcacatttcccttgaatttaaacttcttttaaaagctttcaaagctttgaaggttgatttcaatgaaacctgtttttattctaggtgtttttccgactgtcattctgagtaaaacaaaaaacatttactgtcaaaacaacaagggcttactctcaagcacaaaatgaaagcagatatgtctgcctcatttattttggcatccacctagcagttaaataggacaccttttaatttgtcacttctttaagattcatttaggttggcaaagtaaatccccagtgcttggtttcagctaaacttcaacgagttgggtaaaacagtttattctttatcactcagacacacaagctttgaaaggtgccggttaaagatggaactatgtatttagcagtgtaagacagtaacatctaatggattttaatttttactttgaatgggaggaacttagaaatttaacttattaccaaagatccactagcagtctgagaagagacacagaaggtcaatgtttttcaaaaaacctaggtagaactatttcaaacagtgaatatccaattattttaaaattagactcaagtatgagtaaagagacccaatattcaaatctcaactctgccatttgctggctggggaagttacttaatttacctgaatctcagtttctttatctataaattgggataatatctaccccttccaggttgtttagaaaattagctgaggcaatggacatagagcagctagcacctgcctggcacatactagctgttcaacatgtgcaagtcactgtttttattaagaaaaacttctggcttgctgcggtggctcttgcctgtaattctagcactttggaaggctgaggcctgtggatcgcttgatctccggaatctgagaccagcttgagcagcacagtgaaaccctatctccacaaaaaaatacaaaaattagccaggcatggtggtgcgtgtctktagtcccagctatttggagggctgaggcgagaggattgtttgggcctaggaggcagaggttgcaatgaacaaagatcacaccactgcactccagcctgggcaacagagtgaaaccctgtttcaaccaaaacaaaacaaaaatgaaaacaaaaacttctgcaacattttctaacaattcagtccaggatttagcatttctaactgtatggaaattgtttcttctatctgctccaaatgtactttgctagaatctaagcccattttctcattttctcaaagttagcaataacatctgtttaataccttctttgtaacaaggccagattgagggcttgtgtttatgcagtcattaacaaaaccattcttaaacagtggtggtttttcgcatctcaatgacctaattgtaatctggctaattatttgatttagttacaaaaggaaataaaaatcacacacacacacacacacamgcatacataaatatgtacacaacacctacatatattcatttttttctgttcttcaatacatacaatccagcttcaggcctttttattttggtgtggattttgaggggaatgtaaagaaagataaatgcttccttcttgagtcccttaaagcagatgaccttaaaatgaacgatggggaactctttgacagtctagattaatctcggttttccaatcaatagtttaataggttttttttgttttgttttaggggaagacacaatccacagggctagtcccagagtctttcccagttttgaacgtctcatgctaaatgtggtccaaataccacatctacccagggtttgctttttttctgacaacatcctccttcctgtctggggctgcttttccaagcatagcaagcacttgaattcaacygagggctgacaaattgaccttactccccaataaagcttgctctttttagctcagggccagggaaacacaggctgtcacttggtcagatggaatcttaggtaaagcaatttcctcttccgatccaagcctgaatatccagtggaaacttgtagaataaagccaggctaaagtgttgttctcaaacatgtttatttgtaacagttttacatggtgtgttacagaaattaatggaaaatttctaaaaattttgctgttctgttgaatgcattgtacataaagttaaaaataatgtgtccatatatgttaacaaactgtcatctgaggtaaagttaaagtaggtctagaaaggtactgcaacagtcattttctctttctcatctttattaaaaaaatatgtgtcagaacgcagaaattgaaatgaaccaaacccacagagtaaacatttgtttaaaagaaggtgcccagtacattacatgatggggtttcaggagacactgggatgagtacgagctatcaaaaaagtcttgcggcatgtaaagattgaagagctatggagaatggggacagaatgacaggtggtgtttccctggtttcaaaatttaaagtgacaaatttagtgctagtggaggatgaggaattaacagttgtacacatggattttctattgatctaaccagaaccgtgcagactccccatggtcttttggtattggcacctcagctcttgcttggaaatttcactgtactcctgggacaggatacggtgcttccaggctcaccaaacagtgcttggaaaaaaatcagaattctgccaatgagaatatggatggcagttgaaaaacttgactttatttcccttactttaatgcatcacttgggcatctatcttcttgaagttcagagccagttacattttcaatcatgttcaatgaaagaggacaattctcctggactttcaccttctgctaggaaattaactccagatggtatacctgaaacagcaacatcagccagagttcactttgaatgtgtcagaagcaacccaaagaattggtataatggtgtgatactgcaagacaaactcaagacagccatattgagggagaagatagcaccacttgtttagaatcaaatcataggcaacaaagcaatttaagcaatttcccatgggaactgcctatcttaccaaatccccagaaaacaaactggtctcaggccaactcttatggtcattccacctttcccatcttcccgttcatgtgaaagggttacctaatcataaaatgtttgctcatttctcaagaaactctgtggaccaacaggtgatagctacagagggaggtaaacggcccttctcacttttctggttcttcggaccttccacattaggatgatattgacatatattcttgaatagacgtttggtcagtttatctaactgaaaaaaaaattagactcctgtgacctgatagtgtaaaatgtgggctttaaatgataaccattaccttcatgtatcacttttcgctttgtgaacaagtatacaatcatttttcaaatgaatctcccaaatcattttagtttctattgatatgaagaatcaaatgcaggcctattcaaatcaattgtctcaatggaaattctacttttcaaatctaaaaaccaaataataataattatcctcaaatccaattaatcacatgaatctttaaagttttcttcttagtgttaaaacactttcaacatactgtaactgcataggaacatcaggaaaacacacttgacctgtataacaattctctgtagggcaaaaatatatagattctttatgaaaatcatgtsctaaacatacgaaccaaacactgcactttttgtctcataagtgtaaaaaaaggaagcttagcctcttctgtttcacgtacaaacagtccagtgatttatatcgggggtaggtgggagtggggaggtgggagagtttcagaatctgaattcttcagaatgtgaattgtctttttcttgtgttgcacgtagggtggggactctcgtggaaaggctagatgatggagtcacgtgctcccttcccgttcactagctgctgattggccaactgctcctgccagctgtccctgcactccagcttcctaccatatgctccagaataacgtctggaaagtgagccccatccatcaagtttgtcacaccttgcactcaatctgctaccttctctacagtgtaatggcattattaaaaatcattttcattaacatttatatttacaaaaaaaagacaattttttttcattagaactccttaaagccatttcccttaaatatttaaagagtttaatggtaaggtttttttttcaagttataaaataaaaatcccatttgaattttctgatgtacaaaaagagatagagatgaaccatttggaccacagaatcagtttgttattctgaatatttatgccaccattgttccattagaaagttggtttttaagatccaaaaccacattaccagaattgtaccagaattatttggcaaatgacttttctttgaaaatggcacgtggagaagacacttgtctgcatagcaacacagcagcaagatatcggaaaaataaaaaatatcattttattgtacttagagtttagagcttcttaagaaatcagatgcatttttcatctttctcatcaatgggatctgatgtcttttcctactcacagaatgaaggttcgtactgaaagctgtctttcttcaccaggatgcagaatagctaaaggactgttttggcaacattcgtgatcataatgaataatcaaccacttatttgtcttgtaatttcaagttaattcatttcactgaggctttttttctccccagttagatttcttcacccatatctaaaaaaagtcaaaagcaatacaaaaatttgtacacctattaattttcaaacatgacaaaaaaaggaaaggggggaaaatggcagaccaggccccatggagtgacaaaaaacacatcatcctatgtgaaaaggcatatggatgaygatattgtggtcacagaagaccctttgcttttgcttaaagaagtcagttccaaccctgttgtaatcctctgatgcctgtcactccaaatttggtgtctcaacagtggtcaacaggtagagaaataaaaagggaattaataattttgcacactgagtcatcttaaacccagctatgagggctcaaatatttgttgggtaagcatttgcttgatttctgatttaatgttgggtggatctttctatactttttttgtgtgctgccatagatatctgccattggttgccaaaaatgcttagttccctcttctgagcgagttccattgggcaatcatgaatttcttgtgggaagaggtgaaagaatacaagagagcctgtcgtgatgctgatgtccatgccagtcttgagcacccaccacgagctcgcatcgatgctatttcttaggtctgttgatctgcgcgtacagaggctctggctcctgtggataaaggaacaaagtgaggcctgctctttacacttgcatggattttctgagacagctttgggaaaaggggtttaggattaaaacagaaaagtgacagtttatgatggatgaccttaggttatttttggagtatttgatcagggtgcataacattttggcaacatttttattatccaaaatagctatgcactcagttctgtctttcgttttcaagttggaactgattgccctgttagggaagtagcatggtatagtagggagagttagaaaagctgtgtcatgtggacaagatacttatcctgagtcttggtttctccaaccacaaaatgggaatagtactgtttatcctacggggttcttgagggaattagagattacacatataaagtatctagcacaatgcttgctagcaatacatcttcagaaattgctaacaattaccatgagacaagtggacatttttccaacacagtttcataaatgtccacttgagaaccctgaaattctatttcaaattgctcttctacaaatagtgatgcctgggtgcactgttgagccagagaaacagcaagtgtgtctttgtctcttaatcacaaacttctggacttgtttccattcagtctgagccctccactttggccagtcatttgcctgcacccagggggctgtcctgaaacacatacagggattttcaaccagcatgtaatgcagcaaacctgcaatccacacctagataggaaacagcgttcggccctatttaaaccccgtcagacttcagctgatgttgagatggctcattgtgccttggccaagcagatttgatggatactgtggttttaagcatgcacaggaccttctgttaaaattgacctttatgctgtcactcttggaggtctgtgccagaattaaacgggcacaatgaaatcctaattttaccatatttgatatattagcttgtcccctgccttgtcatataggttcttattatttgcttttttcttgaaacttcaaaatgaattggcattctgggagcccctaccatgtgtctggcaccatgctaggtattttcaagtacattgtctttttatctcatcacaacagccttgtaaggcagatgctttatctcttttgcaagggtgaaattaagcacagagaagttarataatttgcccatggtcacacagctagtaagtctagagacatgagaactgaaaacagggtccaggggccagtgctttttctaatcttttacaacagtgaccatgaggagggagagacagagagagagagaccccaatctttccatccattggtgcttcagagtttacaaagcacctcatgtcttatttatctgccttatagtcctgagggtggcttttattttttgagtcctccctttgcagataaaaactgaagttctgaaaggttgtgtgatctcaaggtcattgtgctgtctcttgtgtgtagcatatcatattgcttgctttctactgtaaagtggaatggcctagaagataaggttgtactggcccatcattgtacagatgaggaatctgaagtcctgtgaagacagcttttgtttcttcagagtcacagggttacttagtatccatgccaagagtagaccccaagactcctgccatcagatccaatttctggttcctctagaacttgttatgtttgtattcttccagtgggaaggaacttctttccttggaggcaccctattatgcagtgtaacaaagtgccaacttgtccctccatgccttctgccygtagactttctactgcccttggaaatgtaaataagtacaatccttcgtccaaatgtctgatgacagaaaagtacggaagcccattcttccawgtcctacttctaggttaccacttgccagttccttctgcctttttttttttttttttttttgagatggagtctcactctgtcgcccaggctagagtgcagtggcgcgatgtcggctcactgcaagcttggcctcccaggttcacaccattctcctgcctcagcctcccgtgtagctgggactacaggtgcccaccaccacgcccggctaattttttayattttttagtacagacagggtttcactgtgtcagccaggatggtctcaatttcctgaccttgtgatccgcccacctcggcctcccaaagtgctgagattacaggtgtgagccaccgcgccaggcctccttctgccattttacaaatatgaacctagcacagtaggtcctcaatgagagtctgttgaattactgaatgattataatgctgtttctagtttcctcacagttctgatccctttgtcctaaatacactccaatttggctttattctctcaaaatcaaatgtagcaaaatctatagtaagattatgatttattaaacaccaaatctattcctttccagtctcttgaactatttcaaatacatgttgtaaggctaaacatgtaactttattgtgtgtttgtgttctacaagtgcagtaggtggagtcaaaaatagttaagtacaactactggggaaaaatatttccttttgcctgtgctgggcttcaagcacgcatattaatgtttcctggatagatgttctcagcycattcttctttttggatgccccaagaagtcaggctgccttgatctcaccctacaatttgctctattctaattttggaaactaatttatccaactgaaaatgacacctaaaaacagaagaagacagcaggctcagacagggtaattaatgccacactgcattaagtttctgcagctgagataaatattcacacatctcctacttgcccgaatttagcttcaaatacccatcacaacagcagtaacgactgcagtcaactctcaattatccccactaatgaaggggagcagtggtgtggaaaacccccagcagcagataatcccaaagtctgacactgtgatgcattatacgttttggcaatagctgtaccttccttattatggaatcttagactgtcagacttagaggggagctaaagaatcattggattcagaaatttccaacctggcctctgtcaaggtcataacggggtcttygagctattttyaaaattccaaaagcctaaatggaatcgcacattaacataacatgctgttgatgtttttgtttgtttgtttgttttcttttggcagatttgtccacgtctctgccctgcttcaaatccttcagaggctccccatcacccacagggtaggtcaaagcaccttcgccgggcacacaaggcccattagtctcttagtccattagagctaataaataccccttctagagcatgaatcaaaactctaccttcaggtcacgtaaatgatgttaaaaaaatctttctttatgtctttccaggatgatctttctgaaatggatttggccatgccagtctcctgcctgaaacagccctcctggctccttgtcactcaaaggaaaaggcaaactcctcaagactgcacataatgcccaccttcccaaccagcctctcctactgccactctctctcctacaccctaccttccaaaccctacttggggttcaccctcacatgctggagttttcccatctctgagacttcattcaggcagttccttctggcttcggaggcttctttgttcctaaagttcatactttaagacctagctgaaatatcaaggcttcctggactctgcaggtgacacgagccactgtgctcctggatgcttcagaacctgtgcagatctctgtcttcactcctactatggcatctcctagcatgttctacactgagctccactgggccttgcatgtcagtatcccgaattctgaatgaagcttggaacatgggaggtgcatccactaacaacatgaagaatgaagacatgtgtgagtaaatgaacagttctcttcttagtggaagttggcaaatagttgtgaactttaatatgattctgacatattaatatctttatttttagataacagagtagatggaaaccatatggtaaaacctaaagcaaaatccaccctctaacctttctgtaagtgaaacacccaattttctcgaaggtgcagtaaaagagctaaagcacaggagactaagtcatgcaggcctagcttagtgttctcctgccaatgatctgctgcaaagaccaccagggacacatctgtagttgaacatgttgggttattcctcagcgcagagggaggagcaatgaggcatctctgaaagagggtgttagaaagaatgtatcacaagatttgggcttaaggtaagtaattttggggatggtcaacaaagtggggtttttctctgaattggatgctgtcataatgtgggggtaattctgtgattatcccaacaatacttatctggaaggcaagaagaacagagcaaggctgaaaccaggctagagaaatgtttgatcagttttccaattttgacaatgttcatgttttgcctgtgttcagccatgatgacctggtggtcttgattttgtcttgacctatcatggtcactaagtggccttgccttatgctgatggtatgtgaaatgttgatgttcaacaggagaatgccagcaccttgctgtgggggtgggcctgcccctgactgtcagaggctgctgttctttttcttaccatcacacatttagcagccctaggattctgtgcagggtacttaacgtctttgggtgccagtttcctcatctgtaaaatgaggctagaaataccctctgtgaaggagaaaacatgttgattgtctagcacagagtctgaaacataggagatactccaaaaaacattaggtcccttatgtctgggagtgtggctttatcctccctttatagacaatggttttaggcctaataatcacctgtgggtttcttttcaaatggcctctccttcatagcacataggtgcaattgcagatgagctctcagttattaataaaagaatggtgctggaccagcctaggaaaattgtgcagaatgaatgtggagttaatgcaaacaacctggctgcagggccctgtggataacagaaacttccaccgtttgcagactactccacatgtcctttaactatctatgaattatgtgctcgactacagcagccaagtggactcacagaactggagtaataatggtatatctctacagaaacttttacagtttatatacggtctttccaatgtcacatagtcttacttgagctacacaccaggactgtgcctttagagctcctgtcttcattttacagcaaagaaacctgggctccctgcagttgggtgacctgtgcagttactcagccagcacacagcagagctgggacatactgctttttttttttaatcttttttagatttttatttgtggtgaaacataaacaacataacctttgccattttaaccacgtttaagtgtacaattcagcagcattaattacattcacaatgttgtgcaaccatcagcatcatttccagaactctttcatcaccccaaacagaaactctgtacccattaagcaattaactccccattcattccccaaatccccagccctagtctaatctactttccatctccacgattttacctagtcttgtttttaaatcaatttcagtgaggtataatttacatacaatgaaatgtacccattttaaatgtacagtttaatgaacttgacaaatatatacacccatgtcagctatagagcatttcttcaccctaaagacttctcttgtgccttctcagtcaactccctatctcagtgccagctctgatctgcttttgattgctatagactaggtttgttttttctagagtttcatgtaaacatactcaggtctttttaagcctactatcctctccactaccacgtgttccctctcatagaaggttgaagctggaagggccctcacacctacagctccttttccgcatgaagaaactgaagccccagacacaaggggtactttcccaaagctatacaggagacagtggagagccagggagcagctcagggttcagactcccatttctgtgctggtttccttgctttcttctcccagccccagctctttggcatgaagtataagggcaaatggtttcctatgtcacattataacaagacgctcttggaagctacctaaattgtgctgattactttctgcccatttaatatttcttgtatttgtttttggaaagattgactacctttgacaaaagtatgtcaaaagcaatacatcttactagtggagcgaagacactgcatgctgacaaaggtgatctcagatgtgaggtcgatggtgcgccatgcaatcagcttgctgagtgagcctacttatgccccatcccgggggcctagggtaagaaaagtgccaagcgaagctgaggatcagactaaagctggaaggtgagtcaaagcttgagtccctcagcattaccctgcccaggcagcaacttcagcctcatggtcttttagccctaaaacttaggactagctcagtgggagttttacattccttggcttgacaaatgaaaaaggtattggtagtcagaggggaaaaaggctaaaataactcaaagttctatctgaatccatgtggagggtcaggaaaaatgcatgggtttggggagccagaaagaccccagaaatcctcctaacttccgatatgaacttaggcgagcatctcacctatctgcaccccagttccttcatttgtaaagtggagggaataacatctacctcatgggactgtgacaagttacaagtgagctcgtataacatgaagtatcttaaatgctggcagccttctttttctttatattcaaacaaaaggaaaaacaaagctttctggccactttgagtctgaaagtctggctgttagggtagaaaagtcttctaaacactgaatggatttgatgataatcccttagggattgacactgccgaatgcccttgttcctggggtcttgggtgctgaaatccgcttggtgcatacagagatgcaccacctgagtttcgaggcaactgtgcatgttctgaagaacattctatttccccgtcaataataacaacaatgatgggcatcaatgatctgttttgcacatgtacatcatcttttttggccttgttatataacagatgatgacgctgaaattgctgacactaattatctaccataagcaggaaggccttttctgagtaagctcctggttactgggagcaggttgcatctaggactgatagtctctggggatcctaatgaagtcagcgtattttagggatttctgtcttctcctttgttagatgggaatagagacagcctgagggagagatgctgctggaagatcttatttggggattggttccatgctgtagctgggtgactttgggcaagttagatggtcttaaaatgtcagagctggaaggacctgtgggaactgttttacagaaaaggaaaccaaaggtcagaaatgaaaccatctgcctcatatcacacagctaaattgatgtgatgctattaaaacccaggtgtccttcctgattctgtttgagtgtgtttgaattacttaatctgggtctagattcaaatcctggtgctattacatgtgaatctcaggattttagcaagttgttaaactctctaccttgtctgcaatatttgtgaaatgggaataataaaaatacctgagtgttcctgtgaggattaaattaggtgatgctagtaattttaaaatatatcttattattattagtaagtgaaaggtatcatgattaccttctgcagtggttctagaaacagtgagcctgatctaattctgttagccaattctggtagctgcctgtgtttgtaaataaagtcttattagaacacagctacattcattcatttatgtatcatcttttgctgctttcctgtgacaatggtagagtagctgtaatagagacagtatggcccacaaggcacacatatttacagagagtttggcaacttctggttagatgatctgtgtattctacttgcactcactactccaatggctgaaacccatatggaaatctccatgtctagccttgatttctcttttgatctccagaggttgtatccagcagcctactggcatctctacttggaagtctcatgggcaccttgagttcagttggtcccaaagtaaacttgtcttctttctgctcaaacatgctgcttgtgttccttagcacagtgactggcaccatgtagatccccatgccaggaacctgggtgtcatcctaccttatgtcctcttcctcacctcccatgtctcttcggtcttaaccttctgttgatttcagcttttaaacatctcttggcactatgcctgaggtcttggctgacactgcccttagctagaccctggtcatcttctgcctgatccagtgccatcactttctagctacaggacctcgacagggagtctgttcataaaggtccaaggaagtgggacactgtgccctccaaaaacttaggttggacttgtcattgagttctgtgtccataaaataggtcattttctgttgttttgtggttctttattttaagggtctgttgtttggttgtatttaaaaagagaatggtaataataatcccaaatacatgtactttactttcaaagcttataaaacactttcatacttatgatattatttgattcttggacagcttggggagagagctattgcaattatctgtatttatccatatgaaaggatgtatgcttacctaaggtgacctgctttggaagtagaaatcagacctaaggcccctgactctgtgttttgtttcttcctttctttccttttcttcccttccctccctacctccttttttttctctctctctcttcctctctcactctcttaagattcgtcttcccaaagcatctgaggtttcagctttcttttcccttgaacactagaaatccatcaggtaatatgttatatgtcttgcattcccaccacgaagatcagtattaaaaaatgacagcaacttattatttatggcaatatctattgttactaagggaggcagaccaaacaattccccattgttacagatgctactctgacttgacagctgggaaagtctgataggcagtttatttacttagccatttaaccaaataaatgttttcatttttctttcatctcctcaaaagctaacatttcgtcctcaaaattgctccagcaacacatcagtgaagtataaattacctgccattcccataccagtcattataatattattttggttcttttttgcccttgttgacccagtctttcaaagacacgtgattctcccagatgggagggtagggggaaaaaagtgaagtaattgaagatactttcctttattgctaaaacagcactgctgtttgagattggccctgaagcttccacctgtggggattgagtccgtctgtttcctcttactatggtgtgatatggctttagcttatcaacagatgtcatccctacttactcagaactgtgcaggtatttctaataaaaaacagctggtgataatggttgcaagggtgataagagagacaggactcttgctttccaaccatatgaaagcagaggggaaaaaataaagccatggacataactttccctgcatggtctctcttctccaaatgtttggaaaggcactaagaaattgcagtcagtaaattttcagttgggtggatggg

SEQ ID NO: 8884 - DNA, 12405 bp, Homo sapiens
atagagggacagtgaggcctgaggctgcagagggattcaaatcccctggccaggtgtggtggctcacgcatgtaatcccagcactttgggaggatcacctgaggccaggagttcaagactatcctggccaacatggcaaaaccccatctctactaaaaatataaaaattatccaggcatgggggcggggcgcctataatcccagctactctggaggttaaggcaagagaattgcttgaaccaaagaggcggaggttgcagtgaactgagattgtatcactgcactccagcatgggtgacaaagtgagactgtctcaaaaaaaaaaaagaaaaggcagatgactccaaagactctctcaggtgctccgggcctggcacctgctccccaatgctctccacagggctcacctggcagaaggtggggctgtggacagctgacagcgcccggcacagagcgtccacatcgttgaagccaggtggcaggcggtccacacagaggcagcgggagtggagaagggcaggcgtcagttgcccggcatccgtccagtgcacgtagagggtgcgtggtcccagcggcttgcccagcaggtccgacttggcacgggcagccgagtccttcttcatgtactcagcaaagccatagcccttggattggccagtgcgctcactgtagaccaggaagcagcgctccaggctgccgaagggccgcaccagctcctcgaactgctgctgtgtgaggctggggggcaggttggccacacacagcagggcatccgtgggctgcagctgcaccgacagttcacgctcccgcaggcggctctggtggaaagcattgattgcggcctcggcctgctccccattcagcagggtcacgaaggctgcggtgggaggagggcagtgcgaggtcagccgggccctgagggcctgcccctccaccccgccaccctgcaaaccaggtgggacctccaaatgctgggcatctcaggtgcctgctgatctgagcagttgccagccttggcgactcacacaggcgagagcgcctgccattgactctaggctccacgaagcccactccctctcccagccctgcgtccacctgcacccacagcagcgctcaccaactgtgggcctggctctgtcctaagaacgctgtgggtcactcgggtgataccaagggcagtggttaagcccatgctcactggggcccagatttaagccccaagccccaggtggctttgggggtatcagtttcctcatctctcaaatggatataacttaatcatcacaatcaccattttgccagagaggaaacgggcccagagcagcacccctgtgccccgagtaggggagcctggacttgaacccaggcagccggactccagaggcccactctacacactgcccacccctgccacctttccaggccaccagtgcccctgaaccctgctgccacgtgctgccccagatttgcgatccacccagcggccgcaggaagctttgttcaaaacgatcacgccacatccatcttgtggcttctagctgcagggtgcagtgcagcctgtgcgggctcgctgacctcccctcccatctcaccgctgccacccggaccacgccaggcacactccagaggggcctttgcagctgctgtttcttgagcatggaacactgagccccacctcctcacctggttaacctggacccacccaggtagaaaccctgtctctactaaaaatacaaaaattagccgggcatggtggcacatgcctgtaatcccagctactcgggaggctgaagcaggggaatgggctgaacccaggaggcggaggttgcagcgagccgagctcgcgccactgcactccagcctggcgacagagcaagactccatctcaaaaaaaaaaaaaaaaagaccacacaagcaggggtgactggctgagtgaggcaagaggggtaagaagagaatgaacccacggccaaacgttgtcaagaattagctcaatgccaagcgagtggagtaggaagagaatcagcccgatgcccagtgttctccaaggagaacatgaaggctgtcccaagatgacaggatgacaggcagattggggcaacctgccatgttggcctggggggcaatactgggcctgaagctcagagcagcagacagtgagccaggccctcccatcttcagggatggtcactccctgccctggcccgccccatggccccacaaacctgtccctttgtatttgtccacaaaacagtatttgagctcatagtcactgagcaggtcatgtacttcctgtggagatacaagacaaaagacagggagttactggagatggaagggggcaacccagtgccgcttcatagctgccaccagctatgaaggcaggtcaattaccaccccccattttaccaatgaggaaactgaggctcgatgcagtaattttgtcaaggtcattctgctcatacctggcagagatgggattcagaacctagctgcagactgtgctattacccaggcaacatgctcttagagggtatacctttagctggctgggcggggtggctcacgcttataatcccagcattttgggaggccgaggcgggtgaatcacctgaggtcaggagttcgagaccagcctggccaacatggtgaaaccttgtctctactaaaaatacaaaaattagccaggagtggtggcgcacacctgtaatcctagctactcgggaggctgaggtaggagaactgcttgcacccaggaggcagaggttgcagtgtgccactgcactccagcctgggtgacaaagggagacactgtcaacaacaataacaacaaggccgggcgcggtggctcacgcctgtaatcccagcactttgggaggccgaggcgggtggatcacgaggtcaggagatcgagaccatcctggctaacaaggtgaaaccccgtctctactaaaaatacaaaaaaattagccgggcgcggtggcaggcgcctgtattcccagctactcgggaggctgaggcaggagaatggcgtgaacccgggaagcagagcttgcagtgagccgagattgcgccactgcagtccgcagtccagcctgggcgacagagcgagactccgtctcaaaaaaaaaaaaaaaaaaaaaaaaaaataacaacaacaaaaaaaaaaaaaaaaaaagaggccgggctcacgcctgtaattccagcactttggaggctgaggcaggcgggtcacaagatcaagagatcgagaccatcctggccaggaaggtgaaaccccatctttactaaaaatacaaaaatcagctggctgtggtggcgtgcacctgtagtcctagctactcgggagactgaggcaagacaattgcttgaacccgaggggtgaaggttgcagtgagcagacatcaagccactgcactctagcctggcgacagagtgagactccgtctcaaaaaaaaaaaaaaaaaaaaaaaagagtatgcctttagggaagccatttaacctgcatgaacctccttttgcaagattcactgtttccaacaactctgtaagtgaagtattaacaaactcatgttgtatatgagaaaacttaggctaggagaagtgaagagatctgctggaggccatgcagttgggcagcgcagccacccatgggtacctgactggggagcccaccttctagtaagccccacgttgtgtgggttcacatgcctcccaatttcctcctgctgataaagctgccctcttccaagccagctcatttatttttcttttttttagagatagtgtcttgttctgtcacctaggctagagtgtagtagcacaatcatagctcactgcagcctcaacctcctaggctcaagtgatcctcccacctcagcctcctgcgtagctgggactacaggcacgcaccaccatgcctggctaatttttaaaaattttttgtagagatgagggtttcactataccgcccaggctagtctcgaacccttgggctcaatacagcctcttgcctcagcctctcaaagtgctgggattaaagggatgagccaccatgcccagcctctcaagccagctttgaaggcaaagtgctggcgcctgctgggaccagacacactgtgcatcttgcaggagagacaatgtgttcccagctgagagactgcagacactgagaggaagacccagaaagaaacctgaccatccttaatgatccctgtcccgatctgtccccaaattcagcccctcccaacatccctggggttccactagccacgtgcccacccggtgtgctggtgggccggagagcagggaatctcagcagcaggaagcgagaacctatttcaccgccatagggcagggcagtatagatgccatttccctgggtccaaagagcattgggaagcgctgccccatgctggccccatgagaagggcactcctagcaggaagattagccacgaggggctccatagaacacaggcctcgcttccttcctgtaggtctgtaggctggtggcagaagaccccattttcccaaattaatcctgaggttttgggggctgagacccaggggctgctgttaacttccggatttatctctgagagcagtgaataaacgcgtgatatggaggggcgtactctccgcagtcctgaaacttctggatgtgaggtcccgccaccctgtggtagagtgggtggagaaaagcatcatccaagcagggggcaactggtggtccaatgtaccagcccattcacaattccccaacaggaccaaagctgtccgcccccttccattccccgcccgcttccatcacttggtgtcgcccaagcctgtggtcgcccctagcaacgccctccctcacttcgcagtcggtttcccctttcatcatcgcccccccacgtcccgctcttggtctctcccgatcccgcgtggatccggtgcttgggcgcccccgccaacgacccccgcgcacctcagcgttggtgtcgcccggttccccccgcgcacgcgcaccgtggtatttcccgccacgctcctacaccgccccccccaatacctggttggtcacgtcccccgggaggccccggatcagtatcttgcggcggttacggaactggcgctcggtgtgttccaggcgtttccggatctcttctggatctagaggcggcagctcttcttccggcgcccggcgctccgcggcatcgccggcttcgacttcggccccagacttagggctcagcgggggccggtgagtaacggacacgtccgccgccatcttgggaaacccggcgccttctgggaccagcgagccggggcggagcggcatagagcggcaacgagggcgcgcccgtcgattggctgggagaaaccccacctccttcccgccccccttgccccgttggctaagccccagcccacctctcaagagttcaagctgcgtctgcgcgccacaggccccgcccccttccgtcgcagcgacgctactcagtggatgtgcacctgggtgggagagacttgcagcgcgggtggaatcaaaccacagattagggagtttgaaggctttattggtgcggaatctgagggcacagccaagcccccgccaactttgatcccggatcccagcgtcactcagctctggacggttcttcccccattgcttctgtcggctgcatagacgtgaggggcagataggtgctctcctccctaacatggtaactgccgctccgttggtgctccctgaagacgtacattaaggccagtacgatagtcaccacgcccagggtcagtaacaccgccacgaagacggggacaaagtgggagctcccagctgtgcagagaaagcgctaagtcaatatgcgtcccttctgtctccaacccccccgccccccggcttaccggtccagacccgcagccccgtattagctcaccctcaatgtccatcaccacgaccagggtgtatttgcctcgtgagctggacgcttggcactgataagtaccattatgtgttacgttgacgaagaacgggatccccaccggcacctcccggctggagccttccttcaaacaccgcagctcggggtacgggttgcccctggcttggcactgcaggacgtgtctcgttttatctttccatttcaagtgctgggggcatgtggctcggtcaattttgggaccatctgtggaaccaccatgtgtgatcagacacccaacacacccgaggcacagtggtgcagaggagcgtctaatctttccagggmaggggtggagggattaaaggtcagggtgaccgactcacacaggactcgcagctggacgctactgttcctgtgcaagaactcgccgtccacctcgagagtggcactgcagaagaagctgcgtccgtcgtcactctcggtagcatttagctgaagttgagctggctgccccggggccgcggccggaactccgtccagcgtgacctggactcgagccccagccatgcaactcacggtcactgtggacccctcatgggcggtgggctcgctgaggttcacaatgggtcctaggaagcctaaaggcggggcattgcccaggagcttaatgaacaggaccttcctgtgggtcaagccgctccctccgccctcccctttcctctcgggatatccgggccacgctttcggccgttcaagcctcgccctctttccgcgctgtgtccagcttcgggcactcaggcccaacccacgttgcaactgctattggggcaagccaggccccaccttttcggctagtctccgccccctctgccacgcccccagactgctgaggccgcgcccccttcccacgcctcctcttactaaagaccgtcaagttctcccgggcctcccgtctctcgccccctagggtcacgttgcagacgatctcccgggcaccctcctgatccgcgcgcgccgtggctgtggctgtggccgttagcgtgtccccgtggttcatgactgtcgcattcagcatctggtcccccagcgccaggtagacctgggcctctgaggctggaaaaagcccgtctagggtgcagtccaccggccacgacgtttccacctccaagaaccggggggccacgaggcgcgggggggtcacgggcaggactggggagaaaggtgggcatagtacaacccccaggactgtgccttccccaggacaccctcatcccccccagtcaggatatcttgctgactgggtcacccttcttcacaggacacacacacagggccatgaaaacggccttcttcaaagatcccacggctcgggcctcccttccggggccaccttgcccagtggccgggggctttccttcccagaagcctgtgaggtccggggtaccccactctcaggaaccccaaggtcagggcaccgtctaccctggctcagctcgtcacccaccgtctgaagccccttctctcaccaaaggttcggagctggcggggggctgaggtgttcacgaacagtcccagcccctggggctgcatgtccagttctgtgcggcatgagaaaggggctccgtggtcgtctctgctggccagcacagtggcagtgacctccgctggctcctccactgcgggctgccggctcagctcctcctcccagcgaagcagcaccaccgtgaggctggtccggggcgacccatcctccacttggcagcgcagggtgaagttctggcccaccggctgccaaggaggcaggggtgccagctccacacgctccgggagccctgagagaggaggggaggatggcacttagcgggtcctgcaaacccacccactcaccccagggactggggaggagacagggtggtcctgccgagaactgtgagctttgagttaataaacttagagggcttagagctgggccagtcgaagcgtttgctattatcattagcgcagtgattatcatttcctgtgttgtcagataccttgcaaggcgctaaacaaaactttctgttctcaaagatggcacaataaaaaaaaatgaggatggaagggatgaacgtttatgactatgatatgaatattaaaaattcctgtttatggccagacgtggtggctcacgcctgtaatcccagagctttgggaggccggggtgggtggatcaaaaggtcaggattattcagttctctccaatcaggttcagacactcagggctttcctggttcaccagccctgtggcagcctctcaagatactccggcacagtcacaggagacttgacactcccaggctgggtgccctccccagtacacctacaaaacgctgggcctcaggccgggcactgtggctcatgcctgtaatcccagcactttgggaggccaaggtggacggatcacctgagaccaggagttcaagaccagccttgccaacatggtgaaaccccatctctactaaaaatacaaaaattagccaggcatggtagcacgtgcctgtaatcccagctactcaggaggctgaggcacaagaatcgcttgaacccaggaggcaaaatttgcagtgagctgagatagtgccactgcactccagcctggcgacagagagagactctatgtcaaaaaaaaaaaaaaaaaaaaaaaggctgggcaaggtgactcatgcctgtaatcccaccactttgggaggccgagggaggcggatcacttgaggtcaggagtttgagaccaacctggcccatatggcaaaaccctgtctctactaaaaatacaaaaattagccgggcatggtgtcacacgcctgtaatcccagctactaaggaggctaagacaggagaatcacttgaacccaggaggcggaggttgcaatgagctgacatcgcgccattgtactccagcatgggggacaatagcaagactgcgtctcaaagaaaaaaaaagtcaaaaagtaggccaggcatggtggctcacgcttataatcccagcactttgggaggccaaggcgggcagatcatttgaggccaggagtttgagaccagcctgggcaacatggtgaaatcctgtccctactaaaaatacaaaaattagctgggcgtgttggcatgcgcctgtaatcccagctactcaggaggctgaggcaggagaatcgcttgaacccgggaggcagaggttgcagtgagccaagattgcgccactgcactctagcctgggggacagagtgagactctgtctcaaaaaaaaaaaaaaagaaaagaaaagaaaaaaaaaagtagccaggtacagtggctcaggcctgcaatcccagctactggagagactgaagtgggaggattgcctgagcccaggagtttgagaccaacctaggcaacatagggagatcctgtctctaaaataaaggtataaaaaagtgtaaatgtaaaacctccatttgcctactgctgactgaaaggggtacccccttttttgcttaagagacaagggtcttgcttttttgcacaggctggagtgcagtggtgcaattatagctcactacagccttgaactcctgggctcaagcgattctcccaccttggtcccccaagtagctgggacttcaggcatgtgccaccatgcccagctaatattttttatttatttttgtagagacggggtgtccctatattgctctgcctggtcttaaatttccggactcaagcaatcctcctgccttggcctcccaaagtgttgggattattgttggggccaggcgcagtggctcacacttgtaatcccagcactttgagaggctgatgtgggcggaacaccccgtctctactaaaaatacaaaacttagctgggcattagctggacctgggaggcagaggtcgcagtgagccgagattgcaccactgcactccagcctgggctacagagtaagagacgccatctcaaaaaaaaaaaaaagcttgttggggccgggcgcagtggcccatgcctgtaatcccagcactttgggaggctgaggtgggcggatcgcctgaggtcaggagttcaagaccagactggccaacatggtgaaatgccatctcaactaaaaatacaaaatttgctgggtgtggtggcgtgcatgtgtaatctcagccactcgggaggctgaggcaggagaatcacttgaacccaggaggcgaaggttgcagtgagccgacatcgtgccactgcactccagcctaggcaaaaagagcgaaactctgtctcaaaaaaaaaaaaaaaatgcttgttggggcccaagttaattgatttcacaactgctgccttggcatgagattgagatgcgtctctatatctctgtctctgtctctgtgtctctgtctctgtctatctttgtatctcacacacaaatgtccaggtctgagctctgggtcagaactgtggtccattctttgcaaactgagggtccccactctcctgagccattggccacttgcccacaccactacccaagaccagtcccacctccggacacgtcgactcactgtacacggtgatgttagaggagcctgttatctgggagccattgcagtacactgagcagaggatccgactgttgccagtcacgttgctgagattgaaggctgcccagcccatgccactggccaccagctcctttgatagggacgtctccaaggcgattttctcagagctgggacaatcagtactgcagttcacaaacagggaccctccagcagagagcacagggttctggggctccacccgcaaaaggaactcctgcccctggacaccttcaggaacatgaagaagtcctggtgtttgtttccttgtcccccaacccacgcatcaacaggccccaccatttaacacctctctccttgtgccgagacagaagggttcctgccttcatggtccagtgggaaaggtagaatccatcagagaccggggagaactcagaaggaggccagaagaggctctgatccagcataggaggaggtgagtcagggaaggcttcctggaagcggggaccattgcagcccgaaactgaaggctaagtaggagttagcaagtgaaagggacaggtgatcctggcagagggaagcacatacgcaaagggcaaatttcaggagttcagatggagcaggaagcatgaggggtgtgtgtgtgtgtgttaggggagagggatggcgtacaagcctatgctggggcctgaccacctgaaggctgaactaaggaaccagaactttctcccgaggatacagagtcagcggccaggtcgcagtgtggcaggatgtgaacagcgttgcgttctattcctctaccctctactgatccccaaaacgcagccctctccagccctccccggcttgactggtctcacctggggtcagcagacagcagaccagcagagtccagcaggccctgggccacaacacggatggtaccatggtggccattctgacagaggaaggtgccttcctgaggtgcccgaagggcaggcaggggaaaaggcggggcctcccactgcgacggaagcacagcggttaagattgcagaagtctggggactgcaccttgcccaggcctgtgggtggaaggggatgctgtggcccttgggggccagggtgggggacccagacggggctctgcaaagtggccagcactgctgagtctcccccagggaatgggctggtcccagttgcactgctggcccccatttgaattcacaggaaatgctaactaaactggtttcttttgttctcagcactgggaagcctgggtgggggggatgaggcatctccttctggctgaacttaggtgggtaggggaatattctgtccccagagaggaagttaatggggaaaactgtaggcaccattgtgtagatgttaaggtgggatttcgaggaaacattaaaaaacaaaaacaaaaacagaaacagaagcagagtcttgctatgttgccccgactggtcttgaactcctggccttaagatggcctcctctcatcttgacctcccaaagtgttgcgattacaggcgtgagccaccacgcctggccacctttgaagatcttgaggatacctccctatctttgaagatcttggggatcccccatcccctgcacaaagagctaaggtaggtgatttggggacagctgagtccctgagccactgtctatccaggattctacttggtttttgtttgtttgttttgagacagagtctcactctgtcacccaggctggagtgcagtggcgggatctcggctcactgcagcctctgcctcccgggttcaaacgattttcctgcctcagcctcccgagtagctgggattacaggcatgtgccaccacgcccggctaatttttgtactttttggtagagacggggtttcaccatgttggccaagctggtctcaaacttctgacctcaagtgagctgcccgccttggcctcccaaagtgttggg

SEQ ID NO: 8885 - DNA, 19104 bp, Homo sapiens
agcctggctctggtccttggtcttgcaatgcccttgaaggagctgggtctccaggcactaacctctacctgaggctggcgcttggcctttgattccatcagcttggctttgagggctgttttctgagagtggagcgaagattgcctaagagaagagatgaaataaagagtcatttgggtagattagcatcagaaagttttcctattctctctgcaggaagggaatatacactggatggatgttactgtctcatcttctaacctcttctctttcaagtaaaacagagataatcttctatgcagatgctgtgttttaagagggcgaggttttgatttaactggaaggaaagtatctcaggatgcctgtcttctgtacctagtgcatccctatggtgtaggaaaatcctgctttcttaaggtagagcagtgattttcaggtgattttgtgcctcccttccactctcatttggcaatatttggagacatttttggctgacataataaggggtagggggtgtactattggtacctactaggtagaggccataaacttccataaacccacaggacagctccccaagaattatccaaccaaaaatgtctagagtgccaaggttgagacactctgccttaaaacctgacatttggatgttaggcatttcaaaagtttcaggaaactgcttgaattagggtgaatctgatctaattttaattccctgtaacattaattctgccactttgattttttttttaattcaaacagtttctatttgcagagtcatagattttagagctagacgataagtaccttagtaatcaccaactcccttgctttgcagaaaaaaatgaggcttagagatagatacttttagaggaatgacttatctaaggttacatggtgagctttgagacaacctaagactgagactcaggcctaccaagtcaatgaaaaatacagcaacttccttatgtattattagtttgatcaaagtttccctatggctaaagtgtaattcccagaagataaagatgctgctgccatccttgttcctattttgcttctcctgaaacattggacacttaataaattcttatcatgaatgctcctaagtgaaaaattgattttaaaagtgacacatagctattcaagtttgtttatttatttatttattctttgagacagagtcttgtcctgttgcccaggctgcgatgcattggcgcgatctcagttcactgcaacctccacctcctgggttcaagtgattttcctgcctcagcctcccaagtagctgggattacaggcatcaccaccaagcctgggtaatttttgtatttttagtagagacagggttttgccatggtggccaggctgttcttgaactcctgacctcaggtgatctgcctccctcggcctcccaatgtgctgggattatagaagagagccacagcgcccagcctgttattcaagtttaaatatgttaaatcgtcttaaaaaggagcatatatacttcttgatattcaatgaaatcctagctgacctatacgcaggaattttatctagattaattcttttaagctttcagccaggagccctgcctaatcacctacctggagagagaaacagtgatctcattctgaacgtgggccaacatttccctaacagcaagttcatgctgacatttgtggtatctcagctaattcagtggctgtcgtgtttgcaaaatagggcctgacatgtgcagttaataattttgtttccaggtgtttttcacacattaaatggaaattttcctgtccaagttactaattggaaaagcccaagattttggctttttcttaagaaccctaaaaaaaaccctttttaaagggaatatcatgttttggaaacatattgctgagaatttatgtgaaatcgtgcagttgtctgtgtgggcaattggtttatggtgttttcacccagggaaagattttttttgtttgtttttgttttgagacggagtttcgctcttgttggccaggctggagggcagtggcgtgatcttggctcactgcagcctctgcctcctgggttcaagcaattctcctgcctcagcctcctgagtagctgggattacaggcatgcaccaccacgcctggctaattttgtatttttttagtagagatggagtttctccatgttggtcaggctggtctcgagctcccaacctcgagtgatctgcctgcctcggcctcccaaagtgctgggaatacaggtgtgagccaccgcgctgggccccactcagggagagatttttatgtaccaagtctactgtagactgtagttcaatctccagggcctacaaggctggctcctgtacattcgtctcagtcttagcagaattggatgcagcagcggcaacctgccgttgcagcattcttttctgaaataccaaaataaaaacagagtcatttatcagtgaagcgaaattgtcctagatttattgaccttggctgtgttttttgtttactttattgttgaatctaatttcagcatcttggtgattgtgattggccatggcttcatagtgcattctcatgtcatgaggagctgtgttagatcagctccaggtgggctgacccattccacctgcaactcagagcctgcaacagctggctggcctttaatttcctgaattggaaacaaccctcgctcaaggaattcggccattatggtaagaaaataacttcatttattagaattttccttcacctcatcagactcaaattgaaggcaggaattatgtaagaaagaggaaagttacgacgtgctgtatgggcacatacctcttcctggttctttttgagatgagtgaactcctccgccgggtttcaatctgcatttctagatcatcttggacaaagtcatgtcattccggacttggtgcagactgttgatgtcagcttgacgctccagcgcagggtcagttcaatctcaaacctggaaaaagtttctaatgctttcagtggtcgttaggtttgtattattaatatcatgctgcattttaaatattttattagaatattatagaaatgccaaacgtctgttccttatttgttgttaatataatttgctattaactttccccatttttggcagtatgatggcactccatataaaatgctgcaagcttcggggaagaaccttttcagcatttttgtttcttagaacagagtgaccataccttgttggcctcttgtgtgttggggtcttctacacacacataaagtagggagttaaattaaagaatcctcagaaacacatgctggttcttttcagaaatctcacttgaaatatacctaactagaaattcttacttacggaagaaaattaagtggtggttccttcggacgtagaatcagcacagcattctcgtaaataatgtgcttccctgaggtttttaactaaaatatttttccattgtttaggattctgtttctaagaagaaaaatattcttttataactgtgattccagtgtaaaaagaagcatggcttcacatagtgttttttttttttttttttttgagacggagtttcgctcttgttgcccaggctggagtgcgatggtatggcctcagctcactgcaacctctgcctcccggattcaagcgattctcctgtctcagcctcctgagtagctgggattgcaggtgtatgccaccatgcctggctaatttttgtatttttagtagagatggggtttcatcatattggtcagtctggtctcaaactcctgacctcaggtgatccgcctgcctcggcctcccaaagtgttgggattataggtgtgaaccaccacgcccggccttacctagtgcttatctccatagcttatgtttttcatcatgctgctaagggtaactatatcacacttttgtctgaagtccacagctgctagttttacgctgacgatctgtagcatgaagttgcattgtcagtgtttgcatctgaaatctggaaacgcaggacacaaaaagttgtgtttgatacacttgcattctgaacctctgtatgctggtgttgaggcatgtcaatttcaggtctttcaaacaaattttatatgtatacggttctttaatggaaaatagcatatacctctgcttttgagaataaaagaactgtaaggaatttagtttactttttcttaagtattttggaaacatttctagaattctttccgtaaaatgaactatacaaaagtaaacaaattaggaaaaaaaacatagctaagaagtatattctgttgcttgttaaatttcttccttaatctgccaaattgagaaaagtacaggtatatgtggaagatattgccaatcttttcaaattttgtcatttttagtgtggttctttgtctagcaaaacgtcttaccttgtttttaagttctgtaattatctggtaatacttcttgttgtcctgtttttctccttgatcattagcccaggctcaaatttcttattccattctttgattttatattcaagtgtactctttgcctgcaccagagttgagaccttgtccagggaaactgcaacatggtcatctagattttacactgcatccttcttcttaccagagaagaacccacccacctcctcccaagttggtagaaaatctccatctgggttacatttctgcctataattctttctttccaatgatcagtatctaattgccatagagtagattttggggctgcgtgtgacttgatggaagagcttagctctacaaagcccaacagagagagtggtaagggaatcatcaattagtaattcctcttatggttgataatgtggctgtttcatctctgctataattgttttaaatatttttaatgaaatatataatagtgttattattttgttaattattattattatttttattttttatactgtaagttttagggtacatgtgcacaatgtgcaggtttgttacatatgtatacatgtgccatgttggtgtgctgcacccattaacttgtcatttagcattaggtatatctcctaatgctctccctcccaccttcccccactccacaacaggccccggtgtgtgatgttccccttccagtgtccatgtgttctcattgttcagttcccacctataagtgagaacatgcagtgtttggttttctgtccttgcaatagtttgctgagaatgatggttcccagcttcatccatgtccctacaaaggacatgaactcatcattttttatggctgcgtagtattccatggtgtatatgtgccacattttcttaatccagtctatcattgttggacatttgggttggttccaagtctttgctattgtgaatagtgccgcaataattatttgttaaactcaatagactatctttttattaaaaggcgcagaaaatgcctttaggtatttatttcatattggagggacaaagcagataatatttacatgatatcagcccaattaaatttgtgttttcccttatggaatttctgcacaaaggaaaatacctttttataggcacaatgcttataacacaaagtcctttggaatgatatgataaatattacttattttcagatgaagttatttgaaactaattttagggatttctggagaagtaacagaaaggggcagatccttaatttctgtatcctgtatattaaatatttgaagtatttaagaataaaatttaggaaaataatatgaaaataaatgacattcttctatttttttcttgaatttgattgattctaagaaaataaaaatttaaatttattaaagcctgtcttggaattttgaaatagctaatgatgtctaactttttccccttatcttatgaaagtgtatgacctctcccctgcccaagagagttaaagaagaatggaggaactgacataatagagttttgtgggtggatttaatgttaaatagcaaacttgtaagtttctccaggttcttgtaaacctctgcagtggctgtgtcttgctccttttgcggttccttttgcaatcataggaaaaaaaaaaaacatgatttcttttttttttttttttgagacagaatctcgtgctgttgcccaggctggagtacaatggtgtgatctcagctcactgcaacctctgcctccggagttctcctgcctcagactccctagtagctgggactgcaggcacccgccaccatgcccaggtaatttttgtgtttttagtagagatggagtttcagcatgttggccagactggtctcgaactcctgacctcaggtgatccgcccaccttggcctcccaaagtgctgggttataggagtgagccactgcacccagtcccccatgatttctatattaccaaatgcatttttcttcatgtttgttgtcagtgcagtgagataaacccagaggttgatgaaggatgtttctatctatcgttcgtcaatcaatcaatctttaatgaaaggtgttagacaatattttttggtaaaaacaaacgtggtgtgagttgatgttctttctctgaatggcttttgcttcattttactttattggagagtctgagtttatccctatggcttcgaacatcctagtcactaaataaatatattttttaacacttttgttaaaattgaaacaacttaacactcattcttagaaaaaatattccaatgacaaatttaggaaacttatatatcaagctgatattgttattggcaagtgtggggctattggtggatgctacttgtattttagttctgttgcttttgcttttttttaatgacacaaaatatatttaatacgttaaatgagagactaggaaatatatttaaagatctttcaggctgacataatgaccgcaaataagtaagacaaaaaagctttggtaaaataagtagaattaaaaaaatgcagttctgtgaattaacacaagaaaacatcagatgaagaataaagtttctctgccaaagttccagctcaacagtgctgtgaatgtgatgtggctgctgctgttagacaatattaaaaaatttacaaagcccagaggtcgtcttcccccagctcttggcccttctgtttagttttgcatgtcatattctagagagaatatttaatagcaaatatgttaactacatccgaaacacctggcccatataatgaagagtatggaaacaatgccaaatgaggcatggctaaagaaattaggatttttgtctagaaaagaggagacacaatggccatttgaaaatagctctaaagggctaaaccagaatcaaagagctggaagttacacagggagacagatttggaaacgaagacatttctaacattacacctgttcttaaatgaaatggactgccttacaaagtcatgatctttccaagctccagggaccttcagccacagactgaagacctagaataatctttcagggacaatttctgttctgggtgggaggttggaataaaagtcaccacccaactctttaacattctgggaattttatgttgctatgattgtaatagaaatcacaaagcaatgatattgaatcttcatagaaaatttggatgtggaacagccagtggggcaagcaaagttacctcatcttgaatcggtgtaacaaagccctcatttgcataaaacccatcatggagatttaaaagtctagtgtcttggtcttagtcaaactaataaaaaatcacatgaagcaatttatttaaaattaataaagatcatacgaagcaatttatttacagacacctgcaagctaaaagcagagtgtgtctaaagatgaaagtgttagaattaattaacaaaagttgtgatagttatggaaaagctctttccacaggtcagtaaattctgggcattaatcatttcagttatgaattgcacaagtagagggttttcaaggatgagagaggatgcttggaaatgtgattacatttctcaaaatatatgttaattttttaataaaattctttgcagaggatcacctcaccaccttattgttataaaaattttagaatggctcttgcttagaattacatatcatatgtactttctgcacatataaagttggtttttggccaggcgtggtggctcatgcctgtaatgtcggcactttgggaggctgaggcaggaggatcacttcaggccaggagttggagaccagcctgggcaacatattgagaccctgtctctatttttatttttaaaaaattggttttcaatgaaatagtttcctccagttgctactactgtgagattatgaagctcatttcaagatgctcctgtcctgcttagaaagctggtcttcccctggttttgcccttaacttgaaatccagcttcagttttagtggccaaagggccatgtggtagcctgctttatatctgaactcagaccaatgggtatcttttttagttcttctggtctccaatgtcaacaggtttctcctgtctacatagatagaaaactgttctggaaattttgaagcctccctgtttaggcgagggagaagcagttttggaaaaatgaaaaaaaaaaagtacttttggggggtacctctcacagaaataggccacttggtgagtctaggatatgaaactacagaacttcacttattttggtagagtagaattctagctcatggaattaggagatggagctttaacttgtaatttttccactttatttaaagggagaggcctttaaataaatgacctctcccagctttattttcttcatctataaaatgggaacagtaatacctacatcagagagtttgtggattaagtgaaataaaatgtaaacatagatacaaagtgtttatatacataacacgtgcttatgaaatataaattccttttgccctcctgttttttctcctttggattgctcaaaaagttattctgctcgacatcacttattatagaaacatctacataggttaattatagacattaatttattgtaatgcttttacatcacaggtggaaccacatagagctacactttctctaatttttttttttctttttgagaccaggtctcactctgtcacccaggctggagtgcagtggtgccatcacagctcatagcagcctcaacctcctgggctcaagcgattctcctgccttagcctcctgagtagctgggactacaggcacatgccaccagtaccagctaatttttgtatttttttgtagagataggatcctactatgttgctcaggctggtctcaaactcctgggctcaagtgatcctcccgcctcagcctcccaaagtgctgagattacaggtgtgagccactcccgtaatcccagcaaaaccccatctctacaaaaaatacaaaaattagctgggcatggtggagcacacctgtagtcccagctactcagggggctgaggtgggaggatcgcttgagctcaggaggtctaggcagcagtgagctgtgattgcaccactgcactccagcctgggtgactgaggcatgcaatgcacatcctatcgcaattttgttataagctcgcatgtgcttataacaaagcacatgttataagcttcatgttccttgtggttctgtcagcaaaataacttcatcatgccccctctctggaagtccaagctttgtacacaggatacctctgggcttgtcccttacctgctatttaagtgctaacttttaaaaaagtggttgaactattaacatttgcttctttcctgcattatcatttcatattgacattgatattacaaatgagtactttgttttcagaagggcttgatcaatattttctgttacccaagtgtcatatctcagccactgaaaagtttttaaagtggtttattacttgtagtattttgttccttgaggaggttgtgtggataatattacttgagcttcattttgggtgatttatattcaccagtttgtctcctcctgggtgaacactgtctaattccacgaagtcgtcaagccagtttaggccactttccttagagcttcaaatactttagcygtttactctgagctgcctgctgtgaaccttgtttcttgtttgtcatctctgtgaggatggatgccacgtcgaccattctcatcattcttgtgtatacttccctgaggtgagaaagaaaaaacaaccctgtgaatctctggattaaaagtcaacgggtgaaaacccatgtgcgaggctgggtgcggtggctcacgcctgtaatcccagcactttgggaggccgaggtgggcggatcccaaggtcaggagttcgagaccagcctggccaacatggtgaaaccccgtctctactaaaaatacaaaaattagctgggcttggtggcgcgtgcctgtaatcccagctactcaggaggctgaggcaggagaatcgcttgaacctgggaggtggaggcgagatcgcgccgctgcactccagcctgggcgacaagcgagagactctgtctcaaaaaaaacaaacaaacaaaaaagaaagcccatgtgcatgtgggcatgagctctcccttcttacagtaaatccactcttagaaaaaagaaatgtgttcctctcattcaaaagttgaggctgaatgcagtcgttcatgcctataaccccagccctttggaaggccgaggtgggaggattgcttgagcccaggagtttgagaccagcctgggcaacatagtgaaactccatctctacaaaaaataaacaaaattagctgggcatggttgcctgcagctactcaggaggctgaggtgggaggattgcttgagcccaggaagttgaggctgcaggtgaatcgagatggcaccactacactccagcctgggcaacagagcgagaccctgtaacaaaacaaagcaaaaaaattgcctggagagctgaactttagggtctcacaataaacatattcctattgtagagttttaaaataattttaaggcaagtaataatgtatgaacaccrtgtccttaactttttattcagcactgtaaatacgttttatgatccaaaatggttgaatagtttcagttttcaaaattgaacatgcccttaacaacacattctattgtgtctcagtgttctggtgtctatgattgggccttttctatatttgtaaacaatcattcagtacaaacgcagcatcttaacgcatgacaaggaagaacagatgagggttttcacctcgagatgactttcagagtagccttatacttttgccttgacatgaaaatagtactagccatgaacataggtctcaggtggccaaaatccacagctagaaggttagacttgagaagacccacagagagaggcttcgctgatgtggccgggatggcttaggttctgcaggctgcttacggcagatttccatttctgctcttgagctatgaatccagttggatgagctggttcagacttttagtatttcagcagagaagaagcattcagggttttatttattgtaatgatttgatggtggaaaacagctttgacttaagcaacttaacattgctctttttctttgagtagtggtttaatgtttattctgtggttagctattaaccttattctgtggttagctatttaagcagaagtcataatgtacccagaggttcattttaagttttattcaatgtgcccagaagatgaaaaactacatgttttgatgataggtttgatatgctcacacaattcttaattggttttatattggaagatacatgttcagatttgtccttttataactttacatttggctttttatgccacgtcccgtgttctttccttgaggactggcttgtagagttgattctctaatttgtgatatgggcatattaaattccttgattgagaaagcccttagccagcctgggttggtgctatgcctggttcttcctggggcccgtaccacctcctacccaatcttaacaggtttcatcatcccaaacaagacaagacaaagccatgtggcctcagggatactgtagaaatgaaagaatagggctatgaccaccaacgggatgaaagatcttagcagtggagactggggaaaagaaacaccagcttggcgaagtggcaggttttggctaaagatgtggctagatttggcaggggaacaagtgcctgaggatctcttctctttggggctttcaaggtttcaggaaatcagattgccatatcacatagccaatcttatttcccaagactcttttttggcccctgtcctaaatgtcctgtaaacacacatgtctgattcctatgtcacttctgatgcagattgtgaaatcaagtctttactattaacagctttttattgcttgctgtcttctttgtgttttagctcttcttctctgctgaaatgtgagctttttgaagtaggagggagattttgagtttcttttttatcttataaaatatcgagttcagtgatggacatatataaactagacrttaattataagttgattattaaaataatcacatccttctttgtgggctaagccgttgacacggtagtctaatttcagctatcatgccactgagttcttatgtgatgccattaaaaatgcccacattaaaaaaatgactataatctgaattgtataaagaaggtaatgtgataccctacctcgttttaacctgattgtctctcttagctgagagagccggacagactccatttttgtttcttcacttgcagctcccctcccttaaaggcataagtagtgcaagctgactccgagcacatccaggaatgcgcttactgatgagatatcgaggcaagctaaatcagcagttcctgaggacgcgcttgggggatggcacccaaagcccctgcattatctctttgtgatagtttgagcccctgcacctggaactgtttacttttctgtaactgtttctgtaaccaattaatctttcttaattggtttgcctgttctgcttctgtaaaaattgcttcagctaaactccctctcccctatttagaccacgatataaaaagaaatctagccccttcttcggggccgagagaattttgagctctagccgtcttgttcgccggcaataaaaggactcctgaattagtctcagagtgtgtcatttctctataactcgctcagttacaacagtaagatataaagaatgaactgacattagtaatatagtcatgcagctagatcatacttgatagcttccttcctaggtaaaatactttttaaaaaaataagtaataattaacttgcaaaagtaaatttattgaagcatagaaacaattaaagcaaagttgttaattcagctatttcaagagcattctaatgaggaaataagaagatgcagaaaagttggctagtcatccatttctggactgaagcttttcctgaaattatccagaaagatgcctagattgatgccatttcttcgcttgtgtccttcttgatttttttttctttgaaagacacttttgttgatctggaagttccttatttaactttcacctcagaaatactgctgacttgagacgagacaaccttgccatccaccaactcctctacgatagtcttagtcactctagtcttgcttgaatctgaaaatcatgggattgcaatgtcagtctggaaactctcacagaaacacagagcaagagaaattcaatcacatgcattcaacgtgttctgtctgggtaagattatgtaaaaaatagcggactcttttagtatgacaagcaaagtatgtcttcacttttaaattacagaactattatcaatattaaaaaaagtctacctcgtccttgaccagaacagcttccagatcttgagtcaccagataccagatccctggatcccatgtttacagatcctgagtttctaccaccaaattctgcaaaactagaaccactggagaaaaaaagaattatgttttcctttgcagtttgcaaaggcaggagaaagcctccgccccggggattcttcatgatgaagttttggatgtgtttatgtgttttaattggattgtgtctgctgcttttttgttcaaccttgcactcctgggctcaagtgatcctcctgtctcagcctccccagtatctgggattataggtgtgcaccaccatgcccagctaatttttttttttttttttttgagacaaggtctcgttctatcacccaggctggagtatagtggcatgattacagctcactgcagcctcagcctcctgagctcaagtgatcttcccgcctcagtcccctgagtagctgggactacaggtgtgtgccaccacgcctggctaatttttgtatttttagtagagacaggatttcaccatgttggccaggctggtctcgaactcctgacctcacgtgatctgcctgccttggcctcccaaagtgccgggattacaggcatgagccactgtgcccagcctccagctaattttttaaaaattattttttgaagaggaaggggttttgctatgttgctcaagctggtcttgaactcctgggctcacgtgattctcccacctcagcctcccaaagtgctgggattacaggcctgagccactgcacgcagcctgtgtctgttactttattactctctatatatacaagtctaagccctgagtcccattttggttttataaaataaattcactaaggtatgcattttagtttgttcatgactttggtttaccctccctctccatcgagcaggcggcggtaggtctcgatctccacctccaggcgtgtcttgatgtccagcaattgctcgtactctgcgttctggcatttagtctcaccccagatctggcagatctcctcctccagggcactgatctgcgtttgaatttctgacagctgagccacgtagccagcttctgtgtcagccagggttccctccagggagcttttctaagagaaaaagcaaataaaaaattcatgatgaaaataaatcattggatgattttttaaaaatgcaattttatgtggcactagaagtgcaccttcgccatataacctatattgttatatcattgcttctttaattttggttggcacttctttttaaactaaatcttttatgcaaaatagagtacattatctttaacttttaatgctttctataatcataatgcagttctccttaacactgccttttttatgtgcctagtgaacctcttggcaaagaaagaaaactgcatttgcttaactccctgttggaaaatgtgaaaagctatttgcacataccatggccagttgggactgaagctcaatttccagggcttgcagggtacgttttagttctgttatctcattcttggcagaagtggctgccccagcatcagtggagatttgtgcttgtagtgatgcgctctaaatacaaacataatgcagctgttgtaggctgatgaaaggagcagaagcggcttgtgtgtggctactggcttaggtgctcagcagagaggatctacctgcttgttgaaccgctcctcagcctctcggcggttttgctcagccagctcctcgtactgcgccctcatgtcattcagtaatttggtcaggtcggtccctggcgcagcattcatttctacggtcacctcccctccagagcttccttgcatattcttcatttcctagcatgaaggaaaaaagactatcgtgatgcaaacagaaaagtgatgacttccgaaaatgtgcctagacaacaacaatttgaaagtaggacactgaaaggaaaaaaaaaaaatcaaatctaggtataatttactcatgattacttttgtttcctggtcatagtatgtgggaaattcacttagataaaaatgagtttattttacctttttttctttttttttctttttgagatggagtctcactctgtcgcccaggctggagtgcagtggcttgatctcggctcactgcaaactccgcctccccagttcaagtgattctcctgcctcagcctcctgagtagctgggattacaggtgcaacaggtgtgcgccatcatgccctgtttatttttgtatttttagtagagagggggtttcaccatgttggtcaggctggtctcgaaatcctgatctcatgatctgcctgccttggcctcccagagtgctgagattacaggcataagccaccgtgccaggcctattttacttttttagagacacagtatctctctgttgctcaggctggaatccagtggcatgatcatagctcactgtggcctccaactcctgggttcaagggatccccctgcctcggcctccagagtagctgagactaaaggcatgagccactgcacccagccaattttatttgtatagaatgcatatggggagaaatatgttagctagagttattcgtttatgtagaacatgttcctacctcctcgtggttcttcctcaggtaggctagctcctcggtgaaactctcaatctgaatctccaggtcagagcgggtcatagtcaggtcatccaggactttccgcaggccattgatgtcagcctccacgctctgccggagacacagctcgttctcatacctggaaggggcagcagtaaggcaaaaaatactgtgagctcacctggccgtgtttcaaagggtaccttccattcttacatattgaaaaagttctcacttgtgggcattttaataaataaaggttattaagttttctcttgggaaattttcccttgtaaagaaaaataccaatgtaatgttaattctaatcatgtctaacatttttaataataaaattctcattctaaatttgcctctttcttttttctttttcttttttcttttgcagctgttgtaggctgatgaaaggagcagaagcggccggtgtgtagctactggcttaggtgctcagcagagaggatctacctgccccagcatcagtggagatttgtctaatggtctaaagtttacccttgggatgtttgtaaatttaggtcatgatcctctagtatatatatatatatatatatatatatatatatatatatttatttatttataaaatggaataaaatttatttttctcccgtaacacttgttttcaagtctttatgtttcttacttcagtctgaagtcatcagcagccaatctggcattgtcaatgtgcaaaatgatcccagcattttcaacagtggcagcaatgatctaaaaaagatgttaatagtgagtgaatcacgaatgatttttaccttgtgtctgcatgcctacttgtaagggtagctgttgcctgtgttattagctcttttttttgtgtgtgtgtagagacagagtctcgctctgtcgcccaggctggagtgcagtggcaagatctcagctcactgcaacctccgcctcccatgtttaagcgattcttgagcctcagcctcctgagtagctgggattacaggggcgtgccactatgcccggctaattttttttgtgtgtgtgtttttagtagacacggggtttcaccatgttggccaggctaatctcaaattcctgacctcaagtgatttgcccgcctcagcctcctaaagtgctgggattacaggtgtgagccaccgtgcccggcctgtgctattagcttttaaaggtgacttgctttgcaaacttacttagtaatgactaagtatacagccccagacctgtatatctggggctggtatatttaggactacatctttctgcaaaaagataacagtctgcacatttattggactaggcacaggaacctgttttacaggacatagtcctctgcatatttctgctactttgttagatcattatctcatgagctttttcagaaaatagtgcaaaaattgtatttcacttccaaaaaagtctttaaaaatatatttcccatacaaaagtggctaaacattttagattctactacattcttatgtaatgtttgcaccagattttctgggaagaaaaataatactaaagaatatttaaatcttgtaagacaataaaatgtgtcagtctgtcagaattcatcataaataattagattaaactaatgttgactcactgccaccattcttatatataaatgataattagctgcctggtgttgtataagttttactgttatgtagaaatactgaaactgagatggaaacagaaaattaatgtgattggacatcacataaggtactataataattaagacacatcaggtcccactttgcatatgtaacaagcaaatatgttttcaaataatttcttaaaattttcattatagtacatgatctgaaaagaagtgaaagatccacaaataatagaaactcaggcacagatagtctcacctggtttctgagatcttcaattattgaatagtatttgctataatctcttcccgatccaccgtctccagacccaggcccatatttgtcataccactccttgattttgttctccagatcagtgttagcctcctccagggctctgaccttgtctaggtaattggccaagcggtcattgaggttctgcatggtttgcttttcccctccagagaaaagccccccatcgccaacaccacctcccataccaccaccatagctgtagaagcctccagtagcaccactgctgaatctagaactcccacagaatccagaacccctgccaaatccagagaccccgccaaagctagaacccccaccaaatcctgtcccagagcctgaagctcccccaaaaccaccccctactgagcagctaccaaagccccctccaaagctgcccccaaaagcaccgctagaccccccactcaggctgcagctgctggctcctcctcggaagccctgggccgagctgccccccagaccacatctgcttccactgctgaagctgcttccaccagcagacaccctggctgagctgctgcctccagccctggaggaggaggcgcgagacgagcaagacatggtgctcctgcaaacatgagcttgtccaggcgaataggagaggtgatgacgaagagtgtattcaaggctgcctttttggcctttatatacacacttcgagggtgttccttttctctgtcacttcttaatccctgttacagttttggtaatccgtaattgga

SEQ ID NO: 8886 - DNA, 91576 bp, Homo sapiens
aatgacattgactagcccagtgttttccttgtttacatcttggacataagtcaggtggctcttttttatttgagactgggcaattcttttttagatgaccaatttgatcacaattataacatttccctccaaatgttctaacttgtcctcctaaagcaactcctgttattgtggaataaagtttagaaaatatccaaagcttatcagcctgtaaattctgggtagttcagttgtctaccatgctgttaattaaatgaaaacatcctgttatttcagggtccttccttgacaaagtactatacagctgaagaacatctcgaatacaattttggtgggaaaggagccaattgatttcaacagaatcagatctgagcttcataaagtctttgaagtgacttcacagagacgcagacatgtgcacttgaagatgctgccccttccctggtacctagcaaagctcctgcctctttgtgtgcgtcactgtgaaacccccacccttctgcctcgtgctaaacgcacacagtatctagtcaggggaaaagactgcatttaggagatagaaaatagtttggattacttaaaggaataaggtgttgcctggaatttctggtttgtaaggtggtcactgttcttttttaaaatatttgtaatatggaatgggctcagtaagaagagcttggaaaatgcagaaagttatgaaaaataagtcacttataattatgctacctactgataaccactcctaatattttgattcattttctgcctatcttctttcacatatgtgtttttttacatacgtacttttcccccttagtttgtttccttttattttatagagcagaaccctagtcttttaaacagtttagagtgaaatatatgctatatcagtttttactttctctagggagaaaaattaatttactagaaaggcatgaaatgatcatgggaagagtggttaagactactgaagagaaatatttggaaaataagatttcgatatcttctttttttttgagatggagtctggctctgtctcccaggctggagtgcagtggcgtaatctcggctcactgcaagctccgcctcccgggttgacaccattttcctgcctcagcctcctgagtagttgggactaccagtagatgggactacaggcacctgccaacacgcccggctaatttttttgtatttttagtagagacggggtttcaccatgttagccaggatggtctggatctcctgacctcgtgatccacccgcctcggcctcccaaagtgctgcgattacaggcatgagccaccgcgcctggccgctttcgatattttctaaactttaattcaaaagcactttgtgctgtgttctatataaaaaacataataaaaattgaaatgaaagaataattgttattataaaagtactagcttacttttgtatggattcagaatatactaaattaactttttaaaacacaacttttaaaaaatgtatcaaaataataaacgtgttctgatatttttaaaataagtgaccttgtgttctttaaccagtccacatctttagagaacaaaaatgtgttatgatattatgggccatgctaatgacctctagaaaacatcagaatatttctggatatttaataatagctttatatatgactaatgctcatttctatgtaattctgtttaatagttgctttaaaggtgaattttgccacatttactttgacagcagtataaggagtgagatagacatgaacctgaatttcaatttaaaatcatggaagagagggaaaaaaaaccagcttaagaaaaatcaactgataaactgcaagaaaaaaatgcaacttacatcacaaaagctaattgctttattatttagagagtacttaaaaattaaagaccaaacttctctccacccaacaaaaatgggcaaaggacatacagctaggtcaccaagaaagaagggcaaataggtggtgagtacatgtaaagatacttgataggacttttgcttagttgaatctttagcaaatctcttttatttcttgggattttgaagaagtaatttttaaaggaggactagaaactaagtgattgggaattggcctttttagaattaaaatttcccattacaagaaaaaaaaatcctgtgttcttttttttttccagaatggagtaggtcagtgagcaatgtgattaataaatatttcaatgtctgtgacttttgatttattttggagacagggtcttgctctgttacccaggctggagtgcagtggtgctatctaggcttactgcaacctcacctgtcactttttaattgcaagaaagctgaaaggtttttttctattatatcagttataatgagaaatactgtatatactaactatgagtaaaatactatattgcctaacttgtattattaagcaattctgctaacctgtgaccttacattttcatctgaaaagcaggggctggacaccaattgccctatgaagctattgctagtcctaacattctttgttttgtttgcttttttggcacacttaagtgtgtactatgaagtttatgatgctttaatgaaattttctgtctctaccattgtaatgagaaaggaataaaatactttattttgcaaatctacttatggaatatagttctgtacctgattgttttcataatccctgtgttgatgtgtaatgccacagacatgctcttgatagtaacaggaaagaaaatcagacacagctaaacataaaggtcagttggctggcaggtgcttagcaggtgtaaatagaggcccattcatgctgctccacttgctcctgaaaagcataatgtaaatacagtatactaattaggaggcaaagaaccatctaacatggttcttttttttttttttttttttttttgagataaagtcttgctctgtcaccaggctggagtgcagtggcgcgatcttgactcactgcaacctccgcctcccaggttcaagcaattcccctgcctcagcctcctgagtagctgggactacaggtgtgcgccaccacgcccagctaattttttgtattttagtacagacggggtttcaccatgttggccaggatggtctagatctcctgacctcgtgatctgcccacctcggcctcccaaagtgctgggattacaggcatgagccaccgcgcccagccctaacatcaaattttaaaagagttggccacagtttaatgacatccctgcacaccagcctccacccatactgcccttcataagccccttaaaggagatcccatagttctaaaccgggtccacaaacacacatatcctcattctctccttttcttctctttggcagtttgacaaaatctttagggggaattggaggaaacattaatctcctaaatcaacttcattcaaagctttggcttcaagttctacccgttaaggcctcaggaagttcattgtcgacattgaactcagtcactaaaatgacctcaaggctaagggatagaccacagctccacttcacaagtaagcttgcaacacctgatttaggaaagtttgctgtgcagacagttgtagctcatccattttacagaccgatctcgatttgtttcctagggtctaaaattatttaaatcaaaatctctcagaaatttctggacatttaataaattcatgctggaggagaactggcagagatatgttaaatgcacttgaccacaagaaccatttatttcatccaatatttaccagctattcattgtacacttactacagattttggcactggagatattataagaaagctctaaccctgacttatggaacttatcccaaaaaataggaaacaaggctcagaaccattcaaatgaagcttcagttaactcaaataaaaattagttttataaatttaatgtgaaagtcttcgagtatattaagaatggcttgattaaccccagggatggaaattttactgattgaaagaaagtttcaataaaataccgatcttcgaatctaatctgacacctgaaactaggaaatcaaacactagccatattttttcttctattctttataataatttttctcatgagaaaaaggtatctttcttccaagcctgaaaataaatggagaatttttaatatctattgatgtggagaaaaataaatagactatctgctttcacaaataagtgctggcattgagccacagaacatgtctgtcatattgctctttcacaccatacattaacaggaataataatttctcctcattgagtttcctatttactatccccttaattatacctcctttaattactgtcatagagtgtctgaattttataatccaagatactaagatgtttatttgatataccaccagactcaatgtcttgtattctatgccaaaaatttgaaaatgtttgggaagaggaaattccgtggtttggtgaacccagaaagtcttcagtacatctcagttatagaactgtattaaatacatttaaactctataattccataagacccattttaggtttatacactaagcatccaattcctcactatcctctcatacaaaccctgtgtaatacaagttctactcccataattctatgaacaaaacaacaattgatacatagatttgatttttaaaatacattttctttaccttattctaagtgtaacatagggtcaacatagaaaaagaaaactgaaaagcacaaggaaagtgaaatatctataatcttaaccattgttaattttgttgtgttccaaattagtgtatgtatatatatatatatatatatatatagcatttttgttttaataaaaggactgccaaaatgcacatgccaatttggactctgctttttccacttacaatgatatcatagtttctcacatttggtattcttttgcaatacttgctgcatagaattccatcacacaaaggtaactgccagaaattccttattacttttgctagacacttagggtttacattttttacaaaaattataaatctttgatcacagctctgatgatttctctgggaactgagagcctaacacaagtcatttccactttaagacttttaacattctgaaaagttatgttacaaacagagtgctggtccccctgcaacatgctcactcacattggctgacattttaattctttgccaatctgaggggaagagatgtcaactttttttgtttgctcttttaatgccagtcatgttcccttttttttcccccttttaccagtcatactggcttactcagaaccctacaaatcaatcctgctcattcttaattttccaacattgttcctgagattgtttcaccagaaaagttctcccccttatccacttcgcctaacaatttctacccatcccaatcctcctgcatttattgcttccaggaatttggcacttaggacacccttgtccttacattgttcatgcatgtatatttcgtcttcaataaaacatttagttgctcaagggcaagggtcccatagagtctcaatatgctaacggcctggtgttgcttaataatttagattctgacgggtcctctccagggaggggagcaaagggcaaattatcttaggggctgggagtgcagaagccaaacctttgagactgtgaaaagaagacggcgccgagacgattcagtagcaggcattcaagcaagaaaaactcaaatattgttcccaataatgcctgactaatgccaaataccaagtaagggcccaggcagtcctgacagcctgcagtgccccaggataaaactaaccctgaggggtgctagcccacgataaccccctgccagggctctggacacgccctgtctcctcgaaggccaacgggctgcccctgcgcgccgaggccccgccccgcggcccgccgattggccccagccgccccggcgctaagactcaatttcacactacgcgcccaggccacgcccacctgtcatgcggccctggaaactgtgagtttggggattgttgtgtccactaaccggactcagaagggacttccctgctcggctggctttcggtttctctgctcacctccggataaatcacggggtctcccgcgccgctcatggcgcctcccgtccgtctcgagcgtccctttccttccyggcgctttcctgggttgcttctggcggccctggtgttgctgctgtcctccttctccggtaggaccccggggtggattcgcgcgtccgcggcgaggctagarctctgctcagtcagtcgggcaggaggcgcggggcgaagctcactgcacgtcgtgcctgcttgggatagagagcgaggccagggttctccgaggggtgccgtgctcagatcccgggggtatgtggcgggggatgcgggaaccacgcagaagcttgtttggtggcatcgtgtgcgcggccgacatttacgcaggatctggctgcgttcccaaaagaagcgtgaatcgtgttttcgggattgagcccagtcagcaaggggagggcttactgggcgccccaggtgagggcttgctctggagtgcacaggtgcgtgggattgttgctagagcccgtgctgtgcccgtggtgagagtttgccctgtgttcccttggtgccttggtgagtagggtgttcattagggcttggacagtacccgcggtaagggttgcagtgcgtctgctktgccccatgggctgggctggcctgggctgggctgggcgagcaggggcctggccaggtgttgctgggagcgtgctgtgcgcaagtggcctgtgtgcggagttcactgtgggcaagacagctcactgtttgctttgagtggagcgagcgcggactctgcggctagggagggcatgttgagtgagagcaggctctcagtgcctggggttagagaggtggtaagggcgcaccatgcttttagtgcyttctgtgaacagtgtccgtgttgcctgagatcgtattggtcttgaattttaagtggctgcttttttggggggtgggtgggccatcgagtcatcttcctgttcccaaccaatatagacagtatctgattccattgcctagtggctttttgacattgttttccttcttttcattagtttgagtcatatttgagagatgtgaagcaacctaaaaaacactggtagccaaacctagtgagaaattagtatcctaacaaaggaaggcagataatgttaatcttgttttcccctacagctcataaactgaagcttaaggcctatcccactgttytgtatttcattgaatggaatcaatatttttaaaaatgcatgctaggccaggcccagttgctcacacctgtgatcccagcactttgggaggcccaagttgggtgattgcttaagcccaggagttcaagatcagcctggacaacatgtcaaaaccccatgtctacaaaaaataaaaaaattagatgggcatggtggtgtatgcccgtggtcccaactactccagaggctgaggtgggaggatcgcttgagcccaggaggagaagactgcagtgagctgtgatcatgccactgcactccagcctggatgacagtgtgagaccctgtctcaaaaaaaaaaaaaaaaaaaaaaagccaaaaaatacatgcttaaatacaggcttattgtgcaaaatgaacaaaataaaaggacaactgtttttaatattttgttatatttccttctgactttattgtgtttcatgtgtatctatatccaaattatatttaggatcttattccatgtacagattgtacgttgcatttcttctcttaggaacattcattcaacgaatatgggtcttgtatgtctggtgctgttacactggtaggtaataacagacaattcctattttctttatcctttttttactatttgtttacacacgtacatgcaggaagataagcagggactttttttgctcattgttaagtgcttaatgccgggaacacagtaggcaatcaacagatgtttgctaaaatgtattgggagtggcagacattaaccaaaacataatagtaacaaatatattaaccagggaagtgttctggaggaaaggagtataattttctgacagcatttaacaaatgactggggggagggaaggctttgcttctcatcaaacagacaaaactctgccactttggggcatctgtgctttctgttccctcagtcctggaacgttctccccatgacctgctgcataaatgggctgtttcttctgcaagctcagctggaatgttaccgcttcagagaccttcttggaaccccccaactcaggttgaacacatacaacccagttcaagtacctcttgtaatcacccttttaaagtgatcttttctgttctctgtctctccccatcagaatgcaggaatcttctgtcttcccccatttgtggtyccaaaagccccatttgtttgcttctgtatgaaccctaactcagtatccatatagacatctgttaaatatcagaaaattaaatatactatttggctggggcttagagcctaggaaaaagtccctcctgcctccaagaggaaggttctttaaagagctatgctcaggatggtctttctgttgtacctaaaaagctagggcagcagcagctgagggccagaaaggatctgtctcccctgtttatgttgactctgcagggcttccagtacttcagtcttgcatctcactgatcattaaaacgttcattttgaaggagggtgatgggattagggagcagtggtgttaagaagaaaacgaaaggacttttttttctttttaaagattaatgtttagaataggcttagtactagaagtacatacagcctgggcatcataaggagagcccacctctacagaatattaaaaacaaaaaattagccaggtgtgatgttgcatgcctgtggtcccagcyacttgggaggctgaagggcgtgaagggggaggatcactggagcccccatggtcaaggctgcagtgagccctaatcataccactgcactccagcttgggtgacagagtgagacccggtctcaaacacacacacacacacacacacacacacacagacacacacacacacacagaaaaaaaaaaaaaacctggaagttgaagaagataatgaaagcaatttgaaatagaggaacatagaattataaaatgaatagggtgcaacatggaagataacaaaactaaaaatgaagagaaggaaaaataaggttaagtttgaggttgatagggttaaatcaagacaggtatgaaacctagagaaagtaaaaatgagaactcacgatgctaggcagagagaatacatgaattaaaataaacattcaatttttggagcaactcactctcacaaagataaggttttgtaagcaggtggtgctgtgcatgggagacctgccctctcaaaggtagttgccaaatggttccagatagcagaaggaaacatgtgtcaaatttcaggccagtctcattcattcctccagaagaggagctgcttttttggacaaaacccccgatctcctgttgtgtgtggtctcttctgcctatttcaggtgttttccttattttcaatgaaagaagccaagaccartaagttcttattgcttcttagtttcctcactcggcatactacaatgcaaaaagagcagtccatatctggtcacctgccaggataccagaagactgggagataggcagcacaagaaatggctaaatcttctttctccattgttctgtagaatgattattttcaatatgaaattgattacaatatattcttcacattgttttgtgtttgacagcagtggactttgagtaccaaatttttttcraatagctactatgagggacatattgtgctgggtgttgtggccacatggatgaatggagtcggccttgttaactattaaactcaaaaacacgtgataattacctgagagatccatgcaggggagagtccaggggaaggtgactgatcactgcttcccagggggaggcagaaaatgcttcttggaggagatgatgggtggattaaagaagacaagagctgagcaggagttgtagctaccggccagggaggaagggtattcagagcagaggaagcaaggtgagcaaaggcaccaagatgtgacactgctggactgccaagctattcagtgtggcagagtagggtaaaggagacaacaaagaagggagaggaataaatcacagggtgagcagttctaaaaagcaacagtcttgtcaggaataaacaatcaccatcgtaaactcagactttgrtattattccctgtccttttagggcagcttgagcccttttgtttgacttagcacaacgtgactccaaactagggttgttttaatttcccragacacagtagtaggcaatttcttgaggacctaattgcagatagagtttgtcggtctcagcatgtgggagctccagatgaatggcagtaatgggaagcagtttggtagtggttcagcagtgtggcctgggaacctagttgactggcctgcctcctgggtctgccaacctaactggaatgtattcttgggttctgattgtgatgggatttaaaagtctctaagctatgttaggaagccttagacattatcctgaggtcattggagagccatcgaaaggtatctgtcttggaaaaaccttgattacyctgtcatataaatactgctctggtaatgtgaaaaatgaattgaatgaaaggtggcaagataggtatggagacctatttrgttatgtcgtggtaatccagataagaaatgatagtggcttgaatgaaaagtaaaggatacaactacatagaataaacgggcatttcagttgtggaaacataacttgtttggggggcgtgtgtgtgtatgtgtatgtgtgtgtagagtcaaaagtggctcttgggyctccctttgttgtttgagctagagtgacacattccaagtagagctgtgtggggaggcaattgaatatgtagttttggcaccccagctagagatctgggatggagagatacccagctaggaggcagctggttatcagtggtaatgaagtcacagaagtgtatatattctcccagggggacctgcagaatggaatcacaggaagtcctcctacagactcatcagggatattaccttggtatgagccagaggacaagctgaaaaccagagtggtttgctctcctaaaagccaaggagtgagaactcttcaggcagaagagagtgagggcagagtgatcagtagctctcacgttatcaagagggtaattcaaactattaaggaagagactgttaggaggagtttaacaaggaggaggccctttaatgactcagaaagtagttgaagtaattttcatagacctaraaatgagtgggaagtgagaaataaaattgaaatatgtagatgtcagagtttatgttttgtggaagcaaaaaaggttttaaatagattggatagtgggagaaggagcaagatggtcaggtttcattgccatttcacttgtagtcaaataccatgaatttctggtaatactaatctgggcagggctgtggrtatgcgtgtacattagttaattttttgcaagcaggtgtgaatgtacagaagttgaacagttcagtggatgcagtgtagatttttttttttttgagacagagtctcgctctgctgcccaggctggagtgcagtggtgcaatctcagctcactgcaacctctgccacctgggttcaagcaattcttctgcctcagcctcccgagtagctgggactacaggcgtgtgccactacacctggctaattttttgtatttttagtagaaatggggtttcaccgtgttagccaggatggtctctatctcctgacctcgtgatccgccsgcctcggcctcccaaactgctgggattacaggcgtgagccactgcacccggcccagtgtagataattcactttactaaaactcacctggaactttggggaaatttctgactgcacctatcttatgatataatggcacctactgttgaggtatagtattgtagcttaatattaattataatataaaatatctagaaaaaataagtcaagatactgtttttctgggggtaggcatgtttagtttgaaattttccataggaagaaattcagtcctctgaaaacgtattgccaataagtgcattgcaggacatgatatataaagaaaatattggacagtgtatatatggagaattttagaatttagaatatgacatgaaatgaaggtgagatttcacttggttagaattttcttgaccagtctctcaacctgaggcaggaccatgaccagggagtaagaaaagaaatgctccttggagatcaaaatagatctatctactttggtccttccactatagaagaggcctttgcattctgttggccctttaggcttttacttgatgtctccatcatcttattttgcaagcccacagataatttgaggaagatgagttgccgcagtagaaatgatagggagaaaaaaaaaactacaaaaaacagaaataaaaaattctaaaaccacagcaatatagtagctttattataggacatgctggataaacaatccaacagctacctcagggagcttctgagagaatgcatgatgcaatgatcagtgaggcaagatcaaattgtgtttgatgttcaagaaaggaaaaacaattcatgtaagtctatccaaagtagtaaatgttttatatttaagtagtgtatattcacttgtcagatgctcagttcacttatctgaaacctatgaaataaagtcttatattttagaatatttgagttcatatttattttaatctatgaaatccactacatttacttaataatcacctcttaccataacatttcttgagcacccacaaggtgggtagagtgtagtagaaaaagaagaacatggtccttgacccccaggaacttgccttttaagagaagacaccctgaagtgacaagctgttataagttagtgttttaaactatggaagaacaatctgagcagagtgctctatactgtagatgacttcttagaggagaagttacttttgaaatgaatttagaaaaatgtggagaaagatgcatccatatatattttaagatcaaagacattaatgctgtctcttcagtttattgtcgaatgtttattcccaaacaaaccaaaagctaataggatgttacttaaaacatgcaaatcccatttcctccactactaccagcactcaggtaaaagcatggaacagtcatttaaaatcttgccaagggccttcctattttttctgtactacctgctgccagaccacagtccatggctgatgaaagtgatatcagtacttcatcttcatgttcctattctcttatccctagatgcctatgaggagccaccaacatttgaagctatggagctcattggtaaaccaaaaccctactatgagattggggaacaagtagattataagtgtaaaaaaggacacttctacgtacctcctcttgccacccatactatttgtgatcggaatcacacatggctacctgtctcagatgagccctgttatagtaaataaactagcctttttttttttgttttctgcttgctctagagatttgcacacattttakggtacatattccactatggagatgatgatttttttttcttgtgaaatgaggtttaagatagcaatgcatttttgcagactttgagaaattgaaatctccaagaaatctttttcttggcaatagattgcctgggtgaacatgaaactgaaatttgcccttataataggtaaagaaagaaaataatatgcccwtgcattcaaarycgcaatgcagaattttgaccttgattccaatctgtttagaaactggattgaaaaaatctcaaaattattttcttttaggaaaaacatgtccatgtataggtgatcctttacatggccaagcagtccttgcaaatgggacttatgagctaggttatcagatacactttatttgtaatgaggggtaagtaagttcctccttagaggaaataaggaaaatgttagtaattttattttcgttttgcttctcttcttaagctttcatataaactttatttaattttgctttctatgtgacaagttatacttctagccaaacaactcttggatgttttatggagacagcaaagacrtagagtaaatagaaattgatattgaaggaaagcataactacttgctatttctgacaataagtctgttgaaagcattaagartgtagtaatcatgagaattcatccttcacaactgagtgtcccctatttaaatctgcaaactcttagagttaaagtagggctsacagaaatgagaaatagaattgccaactaaaaatatgcttgtatccagatgactctgtaaagtgtgacctggttagcctttaccatcatgttgaacaaaagctctcagttgaaaaaccttatttctgagactgctacaatgtgaagcatctcaagaacaggcactgagcactcggtaatagcctttgttctgcaggacttttaaagtcmtrgatattggggatactggacatttaagtgaaatgtgcttttagagagtaaatgtaattttcatagattttctattgctataacacaatacgtgagactagataattcataaagaaaagaatttatttggctcatatttctggaggctggggaattcaagggcatggcagtagtacctggcaagggctttcatgctgcatcagaacatgctggaaagtgaaagggaaattcagcacttgcaaaaaagacaaagcacaagggaggggctctcgctttataacaacctgctcttgtggtaacgaatccaagcctacaagaatgaagatccactccctcaagaattaatgaagaccctctagaaaggcattatccctcttaatgccctaatcatttctgaaaggccccatcacctctcactgctgttacactggcaattaaatttcaataagagttttggtagagacaaaccasattcaaacaatagcaataatacactataatatataaacaaagtgagtcttggaggaaaagtgcactgtgaccatgtaaggcagtttcactaagagtttttaaaatttggtcaagtagaaatattggagtattcaattaatagttacatagagcttgctaggcactatgagggataccaaaagtttaagacatggaccctcctaaaagaagttctaaccttattgagaaacaatatatactgagaggtatcaaaccaaaatactaaatgagaaataccaaataatagaattaatcatgttattacactaagagtccagaaggaggagagattcctgtgaatttaaatcagggaagatttcactgagtataggtgtatactcaatgaaagtattcctatactcaatgagctactcctagaaagacattctgttctaaataatattaataggagctaaaactcgtgtagcactcactatgtgccaaatgctaacttatctaatctcctaaacaaccccacgagctatgtactgttatccccttttaatcaattaggtaactgagtgagaggaactttaagtgatttacccaagctcaagaaactagtaagttgggaagcagagactctaatccaggcattccagctctagggcctgttctctctacagtcttgtccttactgagcaaagtcgtgtgagaaaacgcacagaaatgaatgtgtaatgtgattgcaggaggcagcaaagaggctgggtggaacggcacagcagatttatttagatgtttttgctctcggccaatatacgttcaaatagagaaactctttatttgattaaattgcagatttatttagcactttcattatatagtatgttgtttaagaaaccacccccctcaaattactgcagcgtagaaaataaaccatataaaaagttccttcattattatgtgkcttattaattgctatacaaaacagtaaccctttcttttcccatttagttattacttaattggtaaagaaattctatattgtgaacttaaaggatcagtagcagtttggagcagtaagcccccaatatgtgaaagtaagtaaattcttttttttttttttttaattcagaccagtagtcctcaaagattttttgcctcagggcaccttttacattttaagattaacaaagatcccaaagaggtttcttttatgtgggttatatctrttggtatttatcatattggaattcaaactgagagattttttaaataagtattgattctttttgtttttgtttttgtttttcctaagagagggtaccagtatgtttcccaggctggagcacagtggcacaatctcaggtcactgcaacctcagcctcctgagcagctgagactacaggcatgtgccaccatacctggctttttgtaacttttgtagagacgtggttttgccatgatgcccaggctggtcttgaactcccgtgctcaagcaatctgcccccgtgggcctcccaaagtgctgggattacaaatgtgagccaccccacctggcctgattaatttgtaagaatagatgcaatacaaattaacatatataacattttttaatgaaaaataacaattttccaaaacaaaataaaattagtgagaatagtggcattgttcacattttttgcacatctcttcaacayctaacttaaaggaagacttggatttgggctgttgtgtaatcacacaatatgtagactttggaaaatatcactatacacttctgcccggcgcagtggctcaggcctgtaatcccagctctttgggaggccgacgcgggtggatcgcgaggtcaggagatccagaccatcctgtctaataccctgaaaccccgtctctactaaaaatacaaaaaattagccaggcgtggtggtagcagcctgtagtcccagctactctggaggctgaggcaggagaatggcgtgaacccgggaggcggagcttgcagcgagccgagatcgcgccactgcaytccagcctgggcgacagagcgagattccgtctcaaaatcaatcaatcaatcaatcaatcaatchctatacacttataaggatgagagtgaaaaaagacaatatkttggtggtattgtgaatcaccaatttagaaaatggatatatttaaaaattgcaaaggatttctcagctagcgctcagttaagcatattttctcattaaattgtcagyatttcttgtgataactagaagaaaacttagcatggccttgcaaataaatataggcgtattaggccgttttcgtattgctataaagaaatgcctgagactgggtaatttataaagaaaagaggtttaattggctcgtgattctacaagctgtacaggaagcatgatgctggcatctgctgggggtttggggaggcctcaggaaacaacaaccattgggaaaggcaaagggggagcaaggtgtctcacatggcaggagcaggagcaaggtggggaggacgggaggtgttgcgcacttttaaataaccagatctcccaagcactcagtatcacgagaacagcaccaaggggacggtgctaaaccattcatgagaaatccacccccatgattcagacccctcccaccaggccccacctccaacattgtggactacaatttgacatgagatttggtggggacacagatccaaaccatatcaataggtatttacactttaagaaaatgagatttgttctgaaagttagttactacattaatggtttgaatttgggatgatatatttgctcatagaaaccttcttttaaatccatattgaattcacaaccagcttgtagaaaccctatattgacaaattcactgaagacacagaaattttactaatgctgccttaatcttttacatttctttcctctttttcttcaattttaagagattttgtgcacatgacctccaaaaataaaaaatggaaaacacacctttagtgaagtagaagtatttgagtatcttaatgcagtaactgatagttgtgatcctgcacctggaccagatccattttcacttattggagagagcacgatttattgtggtgacaattcagtatggaatcatgctgctccagagtgtaaaagtcacctttcaatttatttccttcttcatctgtaagtactctggaaatattttgtaaatagttttatctacaaataaagcaggtgtatgtgcttcctcctcctgtgtaattggatctaatttattttaatacaggtcaattcaagccaaaaaatagttctagctagagttctctatttttcacccccacatgttcttgggatttcatttcatacagtgtgaactactgtgtaatctgcatgagttagaagtttttgtttgaaagaccaaaaaaaataataaatcaacaaacactggcttaaaaataagaaaggtggttcttgtattacaagaaatctaagagttctggctttggtagtggtagactgtaacagactaatgctctcaccaataaaaatgataaactctggataaaaaataattttcttaaagaccagagtgaccaaaagtatgaagactccacaggggacttgcccgtttaaacaaagaaatcacagaataacagtgatttaaaagtatatacttcccaagtatgcatgaaacattctccaaagtagaccatattctagacaataagacaattttccacaaatctcaaaaaattgaaatcattcaaaatacattatctgatcacaacagaatgaaagtaggaatcaacaacaaggccaatccccaaagaaatgaaaagtatagaagacactcctaaataatccatgcataaaaatagtagtcagccgggaaattagaaagtgttttgaattgaatcataacacatcaaaatatccaaacatgtaggatacagctaaagcattgcttacaggggaatgtatagcataacatacttacgttagaaaaaaaagaaaagcctcaaatcaatgatttaattttccaccttaagaaactaaaaaagaagagcaaattaaatcccaaactagcagatgtaaggaaatgataaagatagagccaaaatcaatgaaactgagaagagaaaaaaaaaaatagagaaaatcaatgaaaccaacagttgctacttggagatcaataaaatgtgtaaacctacagccagactgacaaagaaaaaaaagacacaaattaaccaatactgagaatgaaagaagtggtggtcaagcacggcaccccagccagcttgaagaccctgcactcctgcagctggcaggggcagtcactcctggacttgtccttttagaagctccagctttaccacttgctggtggagcccaaccactgccgcagggtcctcatcaccaacacgcctggcagatccaagaggagatggcccaggatgggatgtggtgaacagcagcacccaagagtgtggggtgcgtgtggctccactgcctggtttctgcagagatcctgtgccagtgccctgtgcccgccacacaggagccagagggggagcaccatgccccccacttcggagactgctgcacgaaggggccaggtatcagacctttgctgtctcacctcagcactggcaccaggagccctgcaaagcagcatctgggagatggacagccagggggaaaataaaggaagctttcagaagtggctagatgagatatttgaaatactgaaaactaaaaatcccaactgcatggaagagctggcctcagatgtggtcagttcttacgacaacctggacacacagtgctgacccgcatgatgggatgcaccaagctgggcccctgcaacgcacttggaggcttggccctgccaccgccccacctcccagctccagctacaattgcagtctgacctgggcaagcaagagcacatggtggagatcctgatggagacctgagccacacgtgccacagtgctggccagacatggaggatgggatcccgccaagggaactctggccagcctgtagcccactgcccagccttgccggctcctctgctgattcctgcatggtctgcagccccaggcccattcccttccttcccctctgcagagggcaagccggaggctggtctcagcaggagctagggctctcctcaaaggctttctgaccttggggcaggcttgacatccccatrgccctgcatccctcatcccttttcatgtctactggaggacagtgagccatagctgcagcaatcttgtttaaatttaggtagttgaattttttagaattaagttttgtatgttttgagcaataaattgtcttaagatatatattttaggttgcttcaagatagctgaataggaacagctctggtctacagctcccagtgagatcaacgtagaagacaggtgatttctgcatttccaactgaagtacctggttcatctcactgggactggttggacagtggatgcagcccatggagggcaagctgaagcagagcgggatgtcacctcaccaaggaagtacaaagggtcaggggacttccctttcctagccagggaaagctgtgagtgactgcctggaagaacagtacactcctgcccaaatactgtgcttttcccacagtcttcacaaccagcagaccaggagactccctcctgtgcctggctggggaggtcccacgcccacggagccttgctcgctgctagtgcagcagtgtgagatccacctgggatgctggaacttggctgggggaggagcrtccgacattgctaaggcttgactgggcggttctakgctcacagtgtaaacaaagcgccagggaagcctgaactgggtggagcccactgcagctcagcaaggcctactgcctctctagattccacctctgggtgcatggcatatctgaacaaaaggcagcagacagcttctgcacacttaaacgtcccagcctgacagctctgaagagagcagtggttctcccagcacagcattcgagctcctataacggacagactgcctccccaagtgggtccctgacccccgtatagcctaactgggagacacctcccaataggggctgacagacacctcacacaggtgggtgcccctctaggatgaagcttccagaggaaggatcaggcagcaatattgactgttctgcagcctccgctggtgatacccacgcaaacaaggtctggagtggacctccagcaaactccaacacacctgcagctgagggacctgtctgttagaaggaaaacaaagaaacagaaaggaatagcaggtggtgatatcccctttatcattttttattgtgtctatttgattcttctctcttttcttctttattagtcttgctagcagtctatcaattttgttgatcttttcaaaaaaccagctcctggatccattgattttttgaagggttttttatgtctctatttccttcagttctgctctgatcttagttatttcttgccttctgctagcttttgaatgtgtttgctcttgcttctctagttcttttaattgtgatgttagggtgtcaattttagatctttcctgctttcttttgtgggcatttagtgctataaatttccctttacacactgctttaaatgtgtcccagagattctggtatgttgtgtttttgttcttgttggtttcaaagaacatctttatttctgctttcatttcgttatgtacccagtagtcattcaggagcgggttgttcagtttccatgtagttgagctgtttygagtgagtttcttaatcctgagttctagtttgattgcactgtggtctgagagacagtttgttataatttctgttcttttacatttgctgtggagcgctttacttccaactatgtggtcaattttggaataagtgyggtgtggtgctgaaaagaatgtatattctgttgatttggggtggagagttctgtagatgtctattaggtctgcttggtgcagagctgggttcaattcctggatatccttgttaactttctgtctcattgatcgtctaatgttgacagtggggtgttaaactctcccattattattgtgtgggagtctaagtctctttgtaggtcactaaggacttgctttatgaatctgggtgctcctgtattgggtgcatatatatttaggatagttagctcttcttgttgaattgatccctttatcattatgtaatggtcttctttgtctcttttgttctttgttggtttaaagtctgttttatcagagactaggattgcaacccctgccttttttttgttttccatttgcttggtagatcttcctccatccttttattttgagcctatgtgtgtctctgcacatgagatgggtttcctgaaaacagcacactgatgggtcttgactctttatcctatttgccagtctgtgtcttttaattggagcatttagcccatttacatttaaggttaatattgttatgtgtgaatttgatcctgtcattatgatgttagctggttattttgctygttagttgatgcagtttcttcctagccttgatggtctttacaatttggcatgtttttgcagtggctggtaccgattgttcctttccatgtttagtgcttccttcagaagctgttttagggcaggcctggtggtgacaaaatctctcagcatttgcttgtctgtaaagtattttatttctccttcacttatgaagcttagtttggctggatatgaaattctgggttgaaaatyctttyctttaagaatgttgaatattggccctcactctcttctggcttgtagagtttctgctgagagatccgctgttagtctgatgggcgtccctttgtgggtaacccgacctttctctctggctgcccttaacatttttttccttcatttcaactttggtgaatctgacaattatgtgtcttggagttgctcttctygaggagtatctttgtggtgttctctgtatttcctgaatttgaatgttggcctgccttgctagactggggaagttctcctggataatatcctgcagagtgttttccaacttggttccattctccccatcactttcaggtacaccaatcagacgtagatttggtctttccatatagtcccatatttcttggaggctttgttcgtttctttttattcttttttctctaaacttctcttctcacttcatttcattcatttgatcttccatctctgataccctttcttccagttgattgaatcagctactgaggcttgtgcattcgtcacatagttctcgtgccatagttttcagctccatcaggtcctttaaggacttctctgcattggttattctagttagacattcatctaattttttttcaaggtttttaatttctttgccatgggttcgaacttcctcctttagctcagagtagtttgatcgtctgaagccttcttctctcaactcatcaaagtcattctccatccagctttgttcctttgctggtgaggagctgcgttcctttggaggaggagaggcgctctgatttttagagtttccagtttttctgctctgttttttccccatctttgtagttttatctacctttggtctttgatgatggtgacatacagataggtttttggtgtggatgtcctttctgtttgttagttttccttctaacagtcaggaccctcagctgcaggtctgttggagtttgctggaggtccactctagaccctgtttgcctggatgtcagcagcggtggctgcagaacagcggatactggtgaactgcaaatgctgctgcctgatcttcctttggaagttttgtctcagaggagtacccgctgtgtgaggtgtcagtccgcccctactgggggktgcctcccagttaggctatttgggggtcagggacccacttgaggaggtagtctgcccgttctcagatctcaagctgcgtgctgggagaaccactactctcttcaaagctgtcagacagggacatttaagtctgcagaggattctgctaccttttgtttgtctgtgccctgcccccagaggtggagcctacagaggcaggcaggcctccttgagctgtgatgggctccacccagttcgagcttcccgcagctttgtttacctactcaagcctmggcaatggtgggcgcccctcccccagcctcactgctgccttgcagtttgatctcagactgctgtgctagcaatgagcgagactccgtgggcgtaggaccctctgagccatgtgcgggatataatctcctggtgtgccgtttgttaagccattggaaaagcacagtattagggtgggagtgacccaattttccaggtgccatctgtcacccctttctttgactaggaaagggaattccctgaccccttgtgmttcccaggtgaggcgatgcctcgccctgcttcggctcatgcacagtgcgctgcacccactgtcctgcactccccagtgagatgaacccggtacctcagttggaaatgcagaaatcacccgtcttctgtgtcgctcacactgggagctgtagactggagctgttcctattyggccatcttggctcctccctcctattttattcttttcagagtgatctgttgacacctttactgagtttgttcctaytgcaggactctttgattttctggagtgcaaccagtttgagtcttttgatgtaacacatttaaacagggaaatttctgctgtctgcagaacacgacctatatttctgtctcttccctgcctgcagtcttccacacctcataatgttattctttttttctctttactgggcagttttatctggcaatagcaactaaatttatagcaactgaaaggcaggaaaagtccttatttactgagatgaaatagaggactttttgcagggactcctgatcagcagctgtgcttatgactggagagattattttgatatgayggaagggattattgtcctgatttcagcactgctatctctggtttcactttccttgcrgcagaagcaagagactaattgtaggaagagcattagcctgcgyagactatgcttaattaacatcatttctgtggtcttcagtttccatttagtttaatgagattgttgaactcaaatctcaatcactggattctaatttgtttatatatttcctatctccctaatattttaaaggatctaggggaattatgcacgttaacatagtaattagaataccattttataattcctataaaagcctgttaactggtagcctccttagttgagtcctgtaggttttgaggggcaggaagagatggtttttttagtggactgatatatgagcaaaacaagattgcatatgaatttaatactcaataaggtatccaggcttactcacatgctcctagtgggtatatgtactaatactaagtttgttgatacagtcttttgaaagagttaactataagcatttcataaagtgtttataaaacactgatctagcttagtgtttgagagcagaggagagaattgcttgtgagaaaaagtttataaaaaagagaaactacaggggtattttttgaaaaatgacaaatcaaaattcctcatgggattgtcagtcattttttgtcatcagtaagaggaagaataaatagcaagataatgatgttaaggtagatctaaatgtgctaatgtgaaaaaatgtccaggaagtcctaagcggaaaagaggaagatgtaaattatgtagtataataccacttaacagttttttaaaaagatacatatgtttaccccaagcacattacttttatgatttattactkgttatcttctaggatttccattataaaatatgaaacgtagtgagcatttttttggtttttttttgaracggagtctcgctctgttgcccaggctggagtgcagtggcatgatytcggctcactgcaagctctgcctcccgggttcccgccattctcctgcctcagcctcccgagtagctggggctacaggcacccgccaccatgccaggctaatttttttgtatttttagtagagacagagtttcaccatgttagccaggatgatcttgatctcctgaccttgtgatccatctgccttggtatcccaaagtgctgggattacaggcgtgagctgtagtgaccattcttgtacatgcatccttacatacttgtgcaaatatatatgtagattaaattatttttttttctagttggagccttgctctgtcacccaggctggagtccagtgacatgatctcggctcactgcaacctccatctccagggttcaagcaattctcctggctcagcctcccgagtagctgggattacaggtgcgacaccatgccaggctaatttttgtatttttaatagagatggggtttcaccatgttggccaggctggtctcgaactcctgacctcrtgatccaccygcctcagcctccaaaaatgctgggattacaggcgtgagccaccatgcctggcaaagaatgacactgggtgtattaaaaagtatgataagtgacatgatcacagtagacatttcctccaatagaatattgggagaaagcctaatggaaaccaatgaaaaataagaaacacacgtagcctttggaacatagcctttctcacctagtggaggaggagctgagacttgagtaagacagtcagatgaagtaaggcagtattcgggaatgtttgtgtgagctaagactatacatcctgagtgatacacgtgtgttggaccatgtatacatgggtctccattagtgaagccgcactgagtagagaatagttttctacctaaagcatctttactccatgatgaatcagttatgcatggaggagaaagagctaacacgtgtactgaaatatctgctacattatctactcaaccctaattctactcacctttctacagcctttgatatttagagttactccgtcctcacasaactctttccaactccagcactggaaacaattgactcctgtctctaccaaactgtacgtcccagattcttgtcttaggagccatagaactccaaaggtttatggctataactgtgttttgacataattggctttctttatagtcctacgtgatttacttatrcattacaaaaaacagctctgagaagggattcataattctgaccagccaggcaaaggtgtatacatgatacataaagatattaagaacccctcatgactattcacaatagcaaagacatggaatcaatttcaatgcccatcagtgatagactggataaagaaaatgtgctacatatccaccatggaatactatgcagccataaaaaagaatgagatcatgtcctcttcagggacatggatggatctagaggccattatccattgcaaactaacgcaggaacaggaaaccaaatactgcatgttctcacttataaatgggagctgaatgatgagaacacatggacagatgtgggggaacaacacatactgggatctattggagggtagaggataggaagagggagaggattaggaaaaataactaatggtactaggcttaatacttgggtggtgaaataatctgtacaacaaacccccatgacacaagtttacctatgtaataaacctgcacatgtacccctaaacgtaaaagttaataaaagaacccctgcatggatatggatcatgtatttccattcagatcttcctttcattaattttacatgcccctcttcaacagtctcattgattcctgtgattttgaccatctcccatccattatcttttacaaaagtcctcttgtgccttttttggaagtccattttcataatcaacaaattacctatattcccaatcttttcctaaacattctcacacctcctggccttcactaaaccccatctgtcccatgcccacatctttctcagtttaaaaaacaacaacaatgaaaaactttcgctgcttaaccttgatggcgctatcccttccccacccaatggtttcctattgctactgtaacaaattatcttgtggtttaaaacaacacaaatctattctttcacatttcaggagatcgtaagtccacagtgagtcttacaggatgaaaaccaaggtgttgaaaagactgactccttctgaaagctccagtggagaacctgtttcttgcttctaaggggcactagcattccctggctcatggcagcaacactctgagctctgttttcatcattaccttctggtctattaccttcctcttataaggatccctgtgatcatatcaggttcacctagctactccaagatactctttccatctcaatatccaactgcaaagtcctaaactgcaaggtaacactcacagattctgggatgtaggatgaggacattttgggggaacattattcagcctaccacgcactcctccttttctctcattcttggattgttttttattgttattttttaaattggctcataatgattgtacacatttatgggatacagcaaaggaaacaacagagtgaagaaaaaaacctacagaatgtgagaaaatgtttgcaacctatgcctttgacaaggggttaatatccagaatatctgaggaactcaaacaactcagcaaaataaaacaaataatattatttaaaagtgggcacaagacctgaacagacatcactcaaaagaagacatagaaatggccaacgaatataaaacaaaatgctcaacattcttagtcatcagagaaatmcaaaataaaaccagagagagatatcacctcaccctagttatcagagctcttatcaaaaagataaaagataacaaatgctgctgaggatgtggaaaatagagacctcttatacactgttagggaatccaaattaatatggccattatgggaaatagtatggaggtttctcaaaaaattaaaagcagaactaccatatgatccagcaatcccactactgggtatatacccaaaagaaaggaaaccagtatgatgaaaagatatctgcactctcacattcaatgatgcactattcacaatagccaaggtatggaatcaacccaagtgttcaccaatggacgaatggataaataaaatgtggtatatatacacaagggaatactattcagccataagaaagaatgaaatcctatcatttgcagcaacatggatgaatctaggggatattatattawatgaagtaaatcaggcacagaaagacaaatcctgtatgatatcagtcatgtgcaatctaaaaaagctcatctcatagaagtagagagtagaatactggttaccagaggttggggtagggagagacaatgggagatggagagagattggttaaaggrcacagggtcacagatacataagaataaattcayccttgaatacttaaccctctgccctacatctgtcactcctacatccatattcattgctaatcctggggctaactcttgattgctttcttctcactactaaccttaagaaaggaagtaaccaaaatccaatacatgagcaactgttcattccatctccaatatctttgttmattgtccactttatccacccagtcagggccaccatcaaacctcacttggatgtcagcaaaagctccctggctggtctcccctctccattattgctttaatctagtctccatactatacacagatttacattttttgaatatatatctaattgtccttccctttttaaaaatcttacaatggcatgacatctcaattcacgataaggaaattggttcttcacattccctgtgcactgtacacatcgcctgcaattgcccttcaacacagagagcaggcatttcattagctgaccttcccacacacattcttgcaaagaggaaaagtcaagcagggtgtttggaggtgagttgccatcatccaccgcctttgtctgkaaggaagcgyagggcctcacacgcgggatccatcggaagcccaagcattgtcaagctctgctgctgcacctgggtcagcaaggtgggctctgccagcgaaactcgttagaaacaatgcaaatggggagtaaacatggccttgcccatgaaggggaagctggtcaaaagcattttgtcccggaaccccgcagccctccccatgctctgggcgcggagcacaaggattggtcactcctctttgcactgcgcttttcctcttatcaaatctggtttgtagatgtgcttcgggaggatgggggtctcttctccgagaagccgggagcctgttgggcagcsggcgcccggtctccccttctgctgcggaggatccctgctggcggtcgtggtgctgctcgcgctgccrgtggcctggggtgaaacgctggggggcgtggggaggcgcccgggctgacgaggcacccagggccccgcagagaactcgcgtgccgcgctgggctgcgctrctctgcgcgcccgggtccaaaggcagcgcgatgggtgggctgagcgcgctacctggcagggcggcgggtctgggatccttctgcgcactggagaccctcgctgcctctaggtaagcgtggagttcccacgtgcaggggcttaagtcgtgacgagcgcagtggaaggcgcagatgctgagcgggtgccgcacgaaattccttgcctttgtgtattcacagcctcggctggctatagccgagcgtggcgtcgatcctagcgaaacgggacttggggatccgacaaacctgagttctggtcctagaaacttaactgtgaggcaagttagcacacctaagtctgtttgctcttctgtaaaatggggacactggtatctctgcattgtggagttgctgcctcagtggcataaagcctgtcgagtatctaacacagggcctgtccccgagtccatttctatcccccaaccgttacctctgcactttgctcccagtggtgtttagacaagcagtcctagggatgtcctgcatggaactgtcctcgtcccctaccccaagccaccaccgccatcatcatgatgcacttgattgacagcatactttaagacagatgcatgccaggcacttggggattagaagagcaagggaagccccagaacatgcaatgtaaccgctgcaggtagaagggacagtagatatgtttacaatttgcattttagtgatgtgtttagtacaaaataaagcctattataactactatggaaattttgaggccacatctcttcctttttttaacttcaagtaggtaaacatcttcagttagaacccttctattattagttttgggctccccagaagtcttcttggttgcctagactcactggcaacatctcacttgaagtgacagtcttggttgttttggtcctgtctcttcctgacaactcagggttcgtccttctctgccactagacgttttgcattcattatttgagtgttccttcttctctaaaagagtaaggggaaaagaaaaccaagttcccccaagagttgttattaatatttgatcttcttaggcaccagaaagtaacctgtctagtgaagagatatgataaaacttacaattttatttttaggagagaagcatgcccagtaagttaagcaatctgttgtcagtgcttactgaggttctcacaataacctccaaatgtgaaacagcctaaactaaactacctagaaattttgttgctggagtaatttcaattttaaaatgcttatggatgcttccggtgtgcacagtcctttggaatttaaaagaaatgtaagagaaagagctatgctcccaaggtgtatgcatatagaagtaggtggtggagttttatgaaatctactttttaggaagccagtgttctggtttttccagactctgctacttaccaactggggctgtggacccagcaacttaagtcacatcactgaccttcagtgtccacgtgtataaaatgagcatgactgacatcctgatttctgagagaggtattttgaaaatcaggtggggtagtgcatgtgacagcgttttgtaatctgaaaaccctcatgcatgtctgaaaaaccatgactaagcagtcgtgcaggactgcaggatcactgaaaagggagaaatctcaactcctatgatcaggaaagggtgagggaaaagagtatgactttactagcacttgaagagtgaatccagaaacaggttgcataggacagtttatgggaatatttatatataaaaaataacagaggaactaggattgttttgtcattagagggtactcctactacccatgaagtggtatggtgctatttgaaagagaacttagattagctgcaaatagatattgcaaacttagggcaactactgaaaaaagtgaaaaaaagaagtacaattgatatgccagtaaggaagagtgaattgcatcatataaaatgctcagttaaaacaataaacggggccaggcgcagtggctcacacctataatcccagcactttaggaggcagggtagataacttgaggtcaggactttgagaccagcctggccaacatggtgaatacccatttctacaaaaatccaaaaattagccgggcatgatggtgggtgcctgtaatcccagctactcaggaggctgaggcaggagaatctcttgaacctgggaggcagaggttgcagtgagccgagatcatgccactacactccagcctgggcgaaagagtgagactctgtctcaaaaataaaaataaaataaaataaaggtcaggaaaagaatgcaagacaaaaaatagaaacagagaacaagagaagaaagacaacaaatagaaacaagtaacatattaaaccaactatatcaaccatcattttgagtgtcaatgatctaaaggcaccaattgaaacagatcatcagagtcgatcaacaaacaaaactcaactatatattgtgtactccctataagaccattttaaatatagacaatatatattaaaagtaaatgggtaaagatataccatgctaatgctagtcacagaaagcaggagtagctgtgttaatttcaaacacagcagacttcagacgaaggaaaattattaggaataaagagggtcatcatataatgataaaggggctaattctccaagaaggcataacaatatctaatatgtatccatctgacagagaaacaaaatatgtggggcaaagctgatagaactgcaaggagaaatagatgaatgcactatcatagttggagacttcagcacctttatcttttctgatatcagaaaagataaaggtgctgaagtctctttatcagaaatgggcagattcagcaggcagaaaatccataaggacatacttgaactcaacagcaccatcaatccacttggatataattgacatatacagacgacttcatccaacaacagcaaaagacattctctggctcacattcatggggatagaccacattgtgagccataaaaatagtatgctaattaagctttaccagggagtgtttaacatagggtagactctggcgccctcacatggtcctcatgtaggatctgatttggttttccctgctaggtaaaggtgcaagatagaaagaagggtaattccaatttgctttctgtgctttgtgatgtattctggtttacatatgctcggatgagtagatgtatgatttatattatctactgttatctaaaataawcttcacattcggacaggcaacatcaaaactgtcctacacagaaatactgggtgaagatcacttaataagacgaactccagaaaacaagaaaatggcagagttgacaatccctctcaccctccctgcaaagacrcatgtatacaaatttcttttgtcagagacattaagagaaacaaatgctgtcaatctaatcacaactgatcacaacttgatgaaaccaaaaaatctagaaagtatcatgaagacagttgaaatacagctttacattcactattgtgaccagaggaactcactgtggctgttttttgtccccttagatgtcaactaatgattgtgttaagtgatcatgattaacagagcatttaaaatgtttattttatctgttttacatttcaaaaatttatatttaggcatataatttatatatttgtgtacatatataatttattactttatatttttgaaagtgcatgctctttttttaagctgacagacatgcctaagcaaagcaagtgcaagtctgttccttaaagggtaagtatgcagaatggaaagcagagtgtacttcgggttgacagctcatatttgcrcagacatgaaagtgatgatgtgttaattgtgcgtatagcacagaataaatcagcttgctttgaatggaagatctgaaccaggagtgcatgaaattgggctgagtcatacaagaaaaaacccgaaatgagataacaaaatatacccactagaatggctaaaatggaaaagattgaccaaaccaagtgttggcaataaagtggagaagctggaattataatatactgctattcggcaggtaaaattacaacataactttagaaaatagttcaaccgtttcttaaaaccttacacacacayctgtcatattactcagcattttactcttaggtttttacccaagagaaatgaaatcatatgtccacamaaagacttgtacatgaattttcataacagttttgtttgtaatagccaacgagtgggaacaatccaaatgtccctcaacaagtgaatggataaactaaattaacatatatttatacaattgaatattacccagcaacaaaaggaaacaatttgtatatgtgcagcaacctagatagaactctaattatgctgtgtgaaggctaaaacatttaaaamaatcggagtgatttcctttatatgataggatataaacgaagtgattcgggttatatgaaattttagaaagtcaaatcaatctgtagtaagagaaaacaggtcgaaggttgcctagagaaggaagtggatgtttggatgcattacagaaggacatgagggaactgtgtggggtgaagggtatgatggaaatgttcattgtcttcatttggtgatggtttcacagggcatatatataagtaatcaaattgtacactttaaatactcatcaaccattttatgtaatacatcttaataaagctataaaaactttttaaacttatggtaggtcttgagtttatggagtttatattaatatatttatcataagaaccagccacaaattgagggattggtaataaagagggaaaggaaactacatcaagcattctttgttgaaggctcatatgttccttttttgggctactaygcaaatttatattattacctatactatgcatwtactactataaaggtaagaatattaggtaattaaggggaaggaacttctttctttccaagaatggttcattatatttgctttgttgctttgatctagttctaacctctcattgcaagctttgttgtgacgtttaccctctctyaatacagcttttggcgctaggagagctccacttggaatctcttcctttgtctagcatcaatgcataagacacatatcaaaattgtatttcatcccacatatcaactagaggaaaggtgaatgcataacactgaaagtcacggaactgttttattcgtktttttttttttatacagtggttctcaaagtgctgttatctatccaaatcagctgtgaaacttttaaaaaatatagactcctgggctctaacccagacccactaaatcagagattctggggacatagcgtggactcttcatttttttttaagttttataagtaattcttcaattatttgatcattgcaacaaatatgcattgagtgcttataactgagtgttaagcacaaggactaggtattaatttagaagtacaaaaaacatgtcatcatttgccctcaaattatacatatctaatatcttttgagagaaatagatacttctaaaagcacacaaaattaaaaagcacaaattgcaaccacaaacaattattgatatgaaaggaaaaggaaagggcctgactagaaattatcatagggtggggcagagggaagtagtttagattccaaatccctgagagggtcagggaaggcatcagactagattgggtgcgttcagggtggtatggccatagacaggccagggaaggcttcgataagaaggtggtattttagcaaacacctggaggaagaattgaagtcatagccaagataaaagtgcatcacacaaaaggaatgtcatagacaggggaaaaatgtgtgtcttcaggaaactgaaaaaggggaaagggccaccacaccttggtgaggggacccagtggtaagagatgaagcaggaaacatagacaagggcatctttgtacaaagccaaaagttggttcttttaagtctaataaaattgacctctggcctcaatctacccaattaattagtggaaggtgtgggaaggaacagaaatgaaaacaaaacaaacaagatatttccaaaactagagtaagatgctattctttttcaacagatatatcttcttgattacatactgtttgactctgtgatttttgttgctttaaattaaatctacaaggccttaaggggcctagctgagtctactatataatatgaaatatctrtgagaaaatacgtcttctttatggtaaagtatagctttagttgttgagctttgttcactctttgtgctcaagattgacgtggcgacagacttccaacattggtggctgctactgagggccaaagaggagatgtgtactcccactgaatctgagtgtccactgagtgtgaaggtggatggtaaaatgcatgagtgtatcttacactcatactttacaagaaagtatgataaatgaggatgggagagaagctacaacacaggcacttactgattaactaaaatttgaagctgtgaattgcagcttcccctttagtgaaagatgatataaatagcttagttttcttcaaactagcagagactttttaaatggatggatgctgattttttttttaaaaaaagagcccatttctaaggcatgttttaaagcaggtgtcctcaacccctggggcataaaccggtactgtccggtggcctgttaggaactgagcagaacagtaggaggtgagcggccaagcattactgcctgagctccacctcctgtcagatcactggcagcattagattctcataggagcagaaaccctattgtgaactgtgcatacgagggatctaggttgcatgttccctatgagaatctaatgcctgatgatctgagtggaacagttccatctcaaaaccatttccctgcaccctccattcacgkaaaaattgtcttccacaaaacgagtctcaggtgccaaaaagattggggaccaaagttctaaaggaatcaatctctttgctattattgttattattattgttaagatggagtcttgctctgtcacccaggctggagtgcagtggcacagtcttggctcactgcaacctctgcctcctgggttcaaatgattctcctgcctcagtctcccaagtagcttggactacaggcacatgccaccatgctctgctaattttttgtatttttagtagagacggggtttcaccatgttggccaaactggtctcgaactcctgacctccagtgacccacccaccttggtctcccaaagtgctggaattacagacatgagccaccacacccagctcccttggctattagtgaagtcttctttttcttttttgatcacatctatgcagtatatttgagagaaagaggaagtagagtgggaatttcagcagggcatggtggctcacacctgtaatcccaggactttgggaggcagaggtgggcagatcacctgaggtcaggagtttgagcctggccaacacggtgaaaccttgtttctactaaaaattcaaaaattagccggatgtgatggcaggcgcctgtaatcccatctactcaggaggctgaggcagggagaattgcttgaacctgtgaggcagaggatcgcaccactgcactccagcctgggtgacagagggagactctgtcacaaaaaaaaaaaaaaaaaaaaaaaagtatggtaatttctccattaacttcgatgctgctgtggtcttgatccccagatcaatgcaatgtcccggaatggcttccatttgccaggcctaccaacctaactgatgactttgagtttcccattgggacatatctgaactatgaatgccgccctggttattccggaagaccgttttctatcatctgcctaaaaaaytcagtctggacaagtgctaasgacaagtgcaaacgtaagtaactctggagtgggaaccyctctgttagtcaaacatctgtaagatctgattcaatttgttcaaattttgtaactgagttgcatacaacaattagtttgctaaggtgcaatacatatgagaattattcttgtagatcataccttgttactgctttgagttcctggcaccttcattacaagtttatttcatgagaaaccgtcattgcaggacatgattgagggaaaayccccattcactgggggtctcccaytttcatgactaaaattaagtaatgaatgacttgggacaagaaagagaagtggattaaataactaaaagatgcgacaatcttgggcyttgagatctttggattatatcagttgaattgaattacagataataacgaagtttacatttttctgggaggcataatatggggatgaaacagatctgaaaggaaagttttttttgaaagggagctgatcctgaggcagtctggtgagtttcctcaaggtagcaaaatctgtggaaccatcagaactgcatgtgttcctcagtaagctataggcaggttgagaccttatgtactaaaaaaaaattcagtttactctacttggcttcaaatttctgtttctttcctgtaggtaaatcatgtcgtaatcctccagatcctgtgaatggcatggcacatgtgatcaaagacatccagttcrgatcccaaattaaatattcttgtcctaaagggtgagttggcatctcttgaaccaacatctcttggttcaagggttctaacacagccatactaccttctagtcacatctcagaaaggacaactaaactattaccatctgctctttaaagrcttcaacacaggtgcttagctcctgactgaaatggacaaaggtatgacaagatcagggggaaaatcatctgtatccttgctggaaaccaaggcagagcatatatgaaaagtgtggcattcattgggtgggaaggaagaaaatgggggaagagtatagtcaaagcacacaatcagccttaacacagattagacattgctcaaagaaagggaaggccattgagcagctgtgtgagagaaatcttaatggtcatagcacaratagtttgctagggctgctgtaacagagtactccaaaacaggcggcttaatacaaacaaagtttttggagttctgttccggaggctggaagtacaaaatcaagatattggcagagccagagccagatccatagccatgctccctccaaaacctgtagggatggatccttctttgcttcttccagtttctgaagccccaggccttggcgtgtggcagcagaactccagtttctgtctctgtctgtcctcacatggctgtcttccctctgggtctctgtcctcctatgctgttctcttatctgtgcatgtctgtgtccaaagttctttttttttttttttgagatggagtctggctctgttgcccaggctggagtgcagtggcgagatctcggctcactgcaagctccacctcccgggttcctgccattctcctgcctcagcctcttgagtaggctgggacaacaggtgcccaccaccatttttttttttttttttttttttgtatttttagtagagacaggatttcaccatgttagccaggatggtctcgatctcctgatctcatgatccgcccacctcacggcctcccaaagtgctgggattacaggcatgagccaccgcgcccagcccaaaattctctctttcaataaggacaccagtcatattggattgcggcccacactaacaacttcatcttaacttgattgcctctgcaaagaccgtatttccaaataaggtcacattaataggaactggggattaagacatccatatatttcaggggtgaggggaacataattctcatgcattgctggtaggaatgcaaaatggcaccatgactttgaaagacattttggcagttttgtataaaaataaacatactcttaacatattatccagcagttatcctccttggtatttatctaaaggaattgaaatctcaggttcacacacaaaaaaatctgcacacagatgtttataacagctttattcataattgccaaaacttggaagcaatcaagatgtcctttagcaagggaatggataaactgtggtacatgcatacaatagaatattattcaataccaaaaagaaatgagctatcaagccatgaagagacatagaggaaccttaaataatgaatcttctttcactattactaagtgaaagaagccaatctgaaaagcctatatagtatatgattccaactatacaccattctggaaaaggcaaaactatagagatgtaaaaagatcagcagttgccaggggttagggaagaaggggatgaataggcagagcacagaggattttgagggtagtgaaactactctgtatgatgccataacagtaggtacatgtcataataaatttatccaaagtcatatgatgtacaataccaagagtggaccctaagataaactatggacttggggtgaccatgatgtgtcagcgtaggttcatcagttgcaaaaaatatttaccaccctggtgaaagatgtttataataggggaggctatccatgtataggggcagggagtatataggaaatctctgtatcttctgttcattattgctgtgaaccaaaaacttgtgctaaaacacaaagtctatttttttttaaactacataaaagtaaatacacaggcacatgtgcataaacagacacgcacacagtcgagtacaggtaaaacaggaaatttgaacaaaactggtggatcatacctgtctcaatatcttgagtttgatgttgcactattgttttgcaaaatgttattattaggggaaaattgagtaaagtgtacctgggatctttctgtgctattccctacaactgcatgggaatctgattatctcaaaataaaawwwttttttttttaagttactactaaatttccaagggsatgggcttcctaccaaagaattgtatattgtgaaattaaatcattcgaacttaaaacaattcaaacttatagctgggagaactttaaattattctgagccatgagaagactgtggctatgcagcctgagtcatgcagcaggcagctgtaacttctgcctttttatcctgtgaatagttaaaaccaaatggcgccagagataagacccactcagatcactacgccttttcagggagcaataatcttccttggaatgtagcaatatgtaaccaatcaaagtgatgtaactatgcatggtcccatatggaaaatataatcctgctaaaatttctctgtctctgcctatgtaagtgataccttacgtcctccactttggaatgctgaccccattcatttggagttggtgtcttccaggtggctacccttaagctgtgtgctcaaataaactctatccttaaatatattttctgaatctcattatttaargttaacaatgtgctaacctaaacaattcacaggatttgttttttattctcattttttcctaacccaaccacctgkttcaaggcacatagattaagaaggaaaatggaaatgggactaatatcccaggcttcactgtccctctycgggccctggggaggagactcccaaaagtctagacatgttcacccacatcctgtatgtggtttctggaaacgaaatgatcatggcwtttcctgaaccatggcttaactttgtgaatccacaactctctcttccccaggagatccaaaaagrtagggtaggatgtaaaggcttcaatctgtttaaatggatatgagagtccctggctctccttaaaataagtagcatggattttgtctctctgccttacttcctcacaaacattctgaatgagaaaagttcaaaccattatttgttcaagtacttaatctactttgggacacaagtttaataaattaaaatattcttctatctgttccctttgatcagtgaacataaagttatcctttgactcatatttaaaatgttcagtactacaacactgaacaatagtatggaggaaaaaaaatgccaatttaagtttgaacttgcttcaccattcctatcccaacccccatgattagaaaatcaaaaagaacactttgagaaataacctcagtggggtcaaaagccagagtctccaggatgtcttgttcttaagacaaatagaaggaggtacaaatataggattgcagacttgtttacttcatttgttctctatttgtgtgcatgtgtgttggcagtgcaattgagaatgctttcatttttggtggtgtactagaaggcattaaaaaacaaaatgagaagtgggaattgaacaatgtgaatacatggacacagggaggggagcatcacactccggggcctgttggtgggtggggggctaggggcgggatagcactaggagaaatacctaatgtaggtgaccggttgacgggtgcagcaaaccrccatggcacatgtatacctatgtaacaaaactgcacattctgcacatgtaccccagaacttaaagtataataaaaattaattaattgattaattaattttaaaaaacaaaatgagtccaggcgcagtggctcatgcgtgtaatcccagcactttgggaggctgaggtgggagaatcacctgaggtcaggaattcaagaccaccctagtcaacatgatgaaaccccgtctttactaaaaatacaaaaattagccaggcatagtggcgtgcacctgtaatcccagctacttgagaggctgaggcaggagaatcacttgaatctgggaggtggaggttgcagtgacattgcactccagcytgggcgacaagagtgaaactctmtctcaaaaataataataataataaataaccaaaatgatatcgaagtcactaataattacaacataatagctactataatgtaacaatgtgtcaagtgtctgcagaaggacccactgttgtctcactattcatttgatctccatttggcactgtttcgttgtttgaataaagctttatgctgccaggttttcctacatatttgtaaaacaaagttctcagccattccaataaccatgactgttacttgacattgcttcattcatgtatagtactatcaagtttgagcctaccctcactatgactagtttggcccaaccatctatcacaacagagggtctcaggtgaagtaaaataaatgttataaattcttccaaatttatggcacactttgaacagtttgagacatactaattgagaattgctaactttaacattttaagtataaaataagtgttcagttctttttggtcagcttggattgcctttggttctagttataaatcattttctttctttctttctttctttytttctttttttctttctttttctttctttctttctttytctttctttccttccttccttccttccctccttccttccttctttctttctttctctttctttctttctctctttctctttctctctctctctccctctgactctctctctctctctaccccgcccctttctttcctactgacaaggtcttgctttattgcccagactggagtgcagtggcatgatcaacactcactgcagcctcaatctcccaggctcaagcgatcttcctgcctcagccttctgagtagctaggactacaggaatgtgccaccatgcgtggctttttaataaaawttttgttgagacagggtctcactatgttgcccaggcttctctcgaactcctgagctcaagcagtcctcctacctcagcctccaaacgtgctgggattacaggcgtgagccactgtgaatggcctactttgatgaatcttactgataaaagcccatccatgcatccatatattaatacttataaggcatagaaatacatacaacaggactrcatacacacatacatatgtatatatatgacagcttccctgcactcaagaagcttgtgttgtcttttaaaaaaatgaaatttataggaaaaactgtaactcatctttgatttatataaaaatgtgtcataagataataaaaaagagaaatcccatccaactgagaaggcatggaagagaaaatgacaaagtcccaagaatgtgaaatttgggaaggtgatagacaattctttgacaagtggaaaatgtccctctgaattctataagagtgtaatctctggaagtagtaatytaattgggtagttgacctgtgtatttagaatgtaacattccttattttttgcctctagataccractcattggttcctcgtctgccacatgcatcrtctcaggcaacactgtcatttgggataataaaacacctgtttgtgacagtgagttgaaatatgcattcctatttcttttaccgatacattctaatttttctctggaataataaaaatcttaaccgaattccttctgtgcaawctgtacttcacatggctgaagacagccataatgttctcagatattcctatggggttcctggcaactctttctttaagttctttcttatcctgggatgtgtcttttctaattctaggggcctaaatacgtaaaaggcttcaaacttgattttacttcaataaacttgaaattatgttggttctaccacctccagtataataatcatcctgcttggcaaatcagtaaagattttaaaaattgatactcttcaaggttagcgaagctgtggaagaacctggactctcatgtaccacgagatcaacacatcctcttgaaaggccccatgcactataaacctcagaagtgggcatgtattttaacctayttcttaraatttrtacttaggaaataatcacacactttttaaagyagtttggtataaacttttcattgcagcattatttatattagttaaaatgttagagtaacctaaatattttaaactatggtttggaaataatctactagtaggaaaaagatgtgttcaaatgaccattayaaagaattccctaagaaacatraaatagctatgcagaatgaaaataagtatatccatacactggcatggtattcagccataaaaaatgatagcataaagaagcacttaatgactagaaagagatgtgttttatgtggaaaaagaatcagatgaacggcatatatggcaagatctcattttattaaaaaaaaatacacctatgtagtgagggccaggctgaggctgagagaaatgcagtgtataacatctttgtcttactcttctctttggataacttggggacttctttacttttcttcttggtatttaaaaatgttgttacttttactagaaagtttacgagcttcagaatctaaatttacaaatgacattggtcacacatttattgctgtttatccactttaagaaacagttttgctattttgtaaaacaaattgggaaaccttccatcttatttgaaatctgtaataagataacatggaattggaataggaattttcttggaaatattaaaaaaaattagtaaaatagaaaaaacaaacaatataataatacacctatacctatatctatatttttatctctgtttctasttctgtaaactctctatacccaaatcctggtaaatggctgtaagtcttcttggagaagactaggggaagatttacaatacatgcttttgactgcgtagcatggtgcttcctcaagagaatccagtctcccatccgttggtgctgctctgggtctataaactattcaagtctaggaattgttgatgaacaatgaacttcttttgcaataattcaagtcagacttcaattcacttgacctaaatctcttatgcttatacaaatcaaataacaccttagtcggctatccctctacttcggttttagagactccatgatcaattagcccaataacaatgttctcttcagtcaaatcattctgattgctgtttcagttctaatagccattacaattgtctctggcaattaagtgctgccaattggactctgtcaccctgagctcctttggtccccaagtgaattcagagaacccagttcaatggcaacagttcccactgtcattcctggcctacagagaatgagccatcgcagaggatgctgaaactccccgtgtgaatgtttttctcaagcctccagtaaaaggtctgtcttctgaaccctccactcctgcatgtgcctcaccagctctatccaaggatgtgactttcagagtggaatggctgttgcttaacctctgcctctcaaatatcaggctaatttctcatgctgtaaccctagtccagaaccatacagagaaactaagtctggaaaacttaattccaaattggcctggttgacactgtacaaaaccaccagataattataattttatttaactctttgtcttcttttctttccttccctccttcccttctgcctgcctgcttgccttccttctttgcttgcttccttcctttctccctcccttcctccctcctttccttccttcctccctccctccctcccttcctccctcccttccttccttccttccttccttccttccttccttccttccttccctccttccctccttccctcctttccttctccttattttctttcttctttaccacacggctaggaccaccagtataacattgaacattggtagcaatagatgtcatccttgtcttgttccacatctcaaagggaaggattaaaacatttcaccattaacctggtgtttacagtaggctttttgtaggtaaccatttttgaattaaggacattctcatayactcttcattattaaaaattttttgtctttgaaacatgttgaagtttatcgagcactttagttatatgtatcgatgtaatcatatctgtttctcttttttctgttaatgtaacaaactgttttgagtacatttttgaaaggcaaataattttgaatttcaattttacattcttaaaatcaactaagtcaatacttaatcatttttatatataacaaatacccttttataatacattttatatgtttctattaaagtataattcatgtatcataaaagttaccttttcaaattacacaattcagtggtatttagtatattcataaagttgtatattacggtctgaatgtttgagtccaccccaaatccatatgttgaaatctttacccctaaggtgatgacattagggagtgaggcctttggaaggtgatgagatcatgagagcagagctgtcacgaatgggattagcgtcctaataaaagaggcccagaagagctcctttgcccctcctgccatgggaagaaatgctgaatctgccagagaggttggtcctgaactccttagcctccacaactatgagaaataaatttttgttgtgtatgagctaaccagtttatagtattttgttataacagcccaaatagactaagacattgggcaaccagcaccgccaattaattccggaacactttcatcatcccattcctgttttagagattagactgtaattttctttcttgtaatgtcctcataagattttgatatcaaacttatgacagtcttataaagccagctggtagtgtttcatatatttgcttccttgtaagagtttatataaaattggtattatttcttctttaaatgtttaaaagaattcactggaaaagccatatagcctggagtttactttgttgggaggtctttttttattccaacaattttcttgtaccatgtagactttttgctgaagtataacatatatatgtagtaaagtgcacacatcttaattatgcagttcagtagatatttacaaattaaatgcacccatgtaagtggcactcagattaagatatagaacattatcagcaccccagaagccttcctgatgccctttcccagttatcttcccaaagtaaccgctattctgatttataacactaatagttttgctgcttcctaaattttataaaggaatcaaaaaataggtactcttctgtgtccggcttctgctcagtgttatatttggaagtcacttttgttgctgcatgaaggatggtcagtttttttattattatattgtatttcactgatgatcttgagtaccttttcatatgtttgtgaagggcctattccaaacttttgtctgttatttactggtttgtctatgattttattgttttgtagaagttgtttaaatattctcttgttttctaataaatgtaacacaaatgttgtctttcaggctgtggcttttctttttctttttcccttcttaatgatgtcttctgttgtagtaagttctacattttaataatattcaatttatgggtctttttttccagttactgctttttctattctacttaggcaattgggccaggtgaggtggctcacgtctataatcctagcactttgggaggccaaggcaggaggattgcttgaagccaggagttcgagaccagcctgggcaacaaagcgagaccctgtctctacaaaaaataaaataaaattagctgggctcagtggcacatgcctgtaagtcccagctacttgggagcctgaggtgggaggatcccttgagcacaggggttcaaggcttcagtgggttatgatggtaccactgcactccagtccaggtgacagagtgagaccctgtttcttatggataggcaattgatctaatatcatttattaaatgttgcaccatggccataagtcaggtgacctatatgtggatgtcattccagggaggttctgttccaytggtttatttgccatacattgtgtttttgtttggtttagttttttgccatactataatggcaaaaaaaactgtagcattacattaagattttaattactatagcatgacattaatatttgatatctggtggcatatatcttctaactatgtgcatcttcaagatttacttggtgattcttggcactttgcattaccatataaaatttagaatcagcttgtcaatttccacaaaaagaatcctacttgaatttgtattgagtttctattgacttagtacawcaatttgtagacattaacaaatttagttttgaagtttaaatttatgaacatgatatatcctcccatttttgaagtcttctttaatttcttttaaaaatatttgttaatttaccttatagaagtcatgtacatctttcattatctttattactacatattatttttaaaattttattctctatttacttcttagatatgcactggtttcacctcagctccagcaattttattaaatttacttttaaattgaatagtttttctgtatatcttttgaagttgctgcataattatgtcatctatgaatctgacaaagtttttaaatcttttcctttcttatgtcttttgtttatttcatctgctttattgcattggctagaacctccagtacaacattgaatagaagagatgatacaagccttttaatggttatcacaaatcatgatgtatgctgtagatttttgtatgatatcctttattagattaaggaaactcccctttacttctgattgctaaaagatttatcatgaatgttcattctaattgatcactctgcatgtattgagattatcatgtttctttttcactctgttaatgtaatatattacattgattgatctttaaagggcaaacaaactctgaattcctagaatcaacctatgttgcttgtgatgtgttatagatgattatcctatcwatgaaatgtgtgtgagtgtgtgtgtggtgtgtgtgtgcaggattgctcatatttttattgtaacgttgtaacattgatttaatatttaaaatcagtcaaggtaaacctcactttgatcattgtatcatcctttggaaatattgctggattcagtttcataatattttgtttagaaaatttgcatttatgttctcaagagatctttggttataatttggttttattttaatgtccttatcaggtttgggcatcaagattatgttgggctagtaaaatgtgttaaaaattgtttatttttttctagtctccggaataatttgtgtaacattaatattatttttccttatatgtttggaagaattcagcaatgaagcaatctggacctgagggtttgttgttgttgttgttaggttttaaattagtgattcaatttctttaatagctataaaagtattattttatatcgtattgaattagtttgggtaagttatatttttcaaggaatttactcattttatttaaattttctaggttattagcataatgctatttattatatcctcagaaatcctttggatgtctgtaaattctgtagtggtactcctatgctaattaatttctgatattggtaatatctttttgcttctttttccttaattagttttactggggctttatcaagtttactaagcttttcatataaactacttttaactttcttgttttttctttaaagtgtgactattttctcttttactgatttctgcttattttcttctactttctttaagctttgtgtactcctccactcctaaattcttgatattgattagataatttgttttcaacctttatttttctaatatatacatttaacctatacatttttctctaaaactattttacttcccacaatctttatatttttattatcattgtacataaaagttttctaatttaccttttgatgtcttctttgacccataggctatttagaagggcattgcttaatttctaaatatttggagatcttctagttatcattctttcattaattcaatcatttgagacatggtttatggcccagaatatggatgattttggtaaaatgttacatatgcacttgaaaagactgtacagttattttgtttcattttctagaaatgtcatttaggaaaatgtggtttagaacagactttttttctccctccacttgttctctcagttatggagaagcatgtgtaaaatatctgtattagtttcccagggctgctgtaacaaattaccacaaacttggtggcttcaaagaagagaaatttactctctcaacagtttggaggccagaaatccagttaagatgtcaataggattggttccatctgcaagctgttctgtgcctctcttcaggcttccttccagtggctgctggcaatcgttgatgttccttggcttgtagatgcatcatttcgttttccgcctccatcttcaagtcgccttctcctctgtgtgtgtcctttgctcttctggctcctgtaaagacactggacatggatttagaagccaccctggcaatccagaatggtctcaactcaagatcattaatttgattgtatctacaaagactctccaaactgggtcacattcacaggtttcagagattaggttaggacacagatattttttaaggaggacagtggttattcaacccattacaatccccaactatgactatgaatttgcctgtctttcctctttgttctagcaatctttaagcaatctttactttatgtattttaaacatgttattaaatgcatgtttaaataattgcatttgttaaattttttgtttattctttctgctgaattgactgttttatcataatgaaatgtctctctttacctctcataatacttcttgccttaaaatctactttgtacattaatatagctatatcagctttctttcttgtatttatattatatatatttcaaatcttttactttcagcccttctttgtcttatatttaaagcttgtctgttataaacatcatatggtaaagttttgttgttttattcagtctttctttgttgttcattagtgtttgaaacatttaaatttaataataaaaagttaaaattataaataaataaatttaatctagttactgataagtctaactcttggttatttgttttctatttgtttcatgtgtttgtgcctttattcctcatttctcacatttttgaattcatcaagtatttttattattctattttccccagtagcttttaagttatatttcattttttattcttaaatcactactctagagacagacatccttgatttactatagtctactaaaattgtgcttttaccagtctccaaacaacgcaagtacccaaactattaatatttaattccatttgtgtcctcctcctctttttgtattgttgccatacgttttgtaaaaagaaaagcttcagctgaattaaatttaaaagagtttaattgagcaatgaacgattcgcaaatcaggcagccttccaagccaaagtaagctcagagactcctgcccagctgcgtggtggaagaggatttacggacagaaaaaggaaactgacgtacagaaaacagaagtgaggtacagaaacagcccgattggttatagctcagcgtttggcttatttgaagacagttcaaacagttagccacatttgattggccaaaactcggtgattggcataagagtaacctacggtctgtttacatcttcactcgttataattcgcagtttacagagaaacctttaggctgagcttaaactatgtaaggctttaggctaaacttgatttaacaatttacatatgttatatatttcaaagacgtaattgttgttgttgtctttataaaaataatatctatttatatttacaccgtagtgaattcttagaatttttatgttgcctcagcatccatttagaatatgtttagctttctcatgccagaagcagggcttagtcacccttaatgccctttctagttctgtacctcctcccaattttgcaacgtggtcgagccagatatctgctttatacaactgcctcctggtgaccacctctccatgggacagctagataaaacctacttgactagcgtccctgccctctgtgccctgcatggacttcgcagttatgctgccgtgaccacctctcagtcgcagcatgactgcctggaacatgtgcctgctttctttaaactcaccaattagaactccccatgggagataccttggcttgtagatgcaagatgctgggtcatactctggtccccaataaaggcattggccgatggatccccttctctctctctctctacgttcctcgcactgaccaacctctttgtgatcttcaggcgtgccatacccccagcccgtaataaaatctttactkccatcttgtgtttcttgtaatgactgaagaggttttctctatcataaagatcctaaatgaaaacatacccgcatatgagctctttctggtgtgtttccttcttattgcaattctatcaatcctatatgaaactattttccttcagcctgaaaaagtctctttggcatttttgtattgtagatcttctgacaacaaattctttaaacatttttctaattgtggttcctttgaaggttattgtctatgtttcctgctgcttttatggattacactttaaaatagattttttacaatattactatgttgtgtctaggtaagtatttctttgtattgcttgggtttatcttgttgcacaactggagtgcagtggcgcgatctcggctgactgcaatctccacctcccagattcaaggaatcttcccacctcagccacctcggtagctgggattacaggcctgtgccactattcctggctaatttttgtatttttagtagagacagggtttcaacatgttggccaggctggtctcaaacccctgacctcaggtgatctgcccacctgggccacccaaagtgctaagattacaggcatgagccaccacgccaggcctgtatagctttttgaatctgtaatcttgcatcagtcttggaaatttctcagttattacttcttcaaatgttgtttatgtctattatctcctctcatggcaggacttcacttaaacatgctaggctttattcttctatatcttggtctgtatgtttaacatgcatttaaggagtttttgtggactaatatatgaccacttttacacagatatcatgttattatatcaaacttagatttgagtaaatgagttgataagttttatacctcttgtgtgttgtgaaatattgaaattacatttggaagcatctgttacttgaaagttcaatagagcttatctttttttttttattcttacatgtttgttgggtaattctagctttctaaatctttttgaatgaatattggcaatttatrtttccatttatatcatttagattttcaaaatatttaacccccagtagtctacagttttataaatattctcatattcataaaaatgtttaaattccttttcctactgtgtatatttgtgtcttctctcttcccttatactttatcttttggcaaaggtttttatattttatttttctaaaaaggctaacctcagttattaacaaaaatgcaaattaagaaagcaaatgaaaagagtaggagaacactgtataaactctataatactataatcaaagggctatttaaaatgaaaagaatgtggatggagttaataaatgcatgcaaatattataggaaatcatataagtaagaaaggcaggacacatcatattatccccaccaaaattacaactttgtaaaaatgtacctacgtgttagcaaagaataaaagcaaataatgaatgtaaaaatagttacagtttagtgactcgtgagatttttgtcattcattatttaaattgactgtgctcttcctttcccaggaattatttgtgggctaccccccaccatcgccaatggagatttcactagcatcagcagagagtattttcactatggatcagtggtgacctaccactgcaatcttggaagcagagggaaaaaggtgtttgagcttgtgggtgagccctccatatactgcaccagcaaagatgatcaagtgggcatctggagtggcccagyccctcagtgcattatacctaacaaatgcacgcctccaaatgtggaaaatggaatattggtatctgacaacagaagcttattttccttaaatgaagttgtggagtttaggtgtcagcctggctttgkcatgaaagggccctcccatgtgaagtgccaggccctgaacaaatgggagccagagttaccaagctgctccaggggtgagtctgactgaggcctagaagggccctgccagtgacatgcattgctgttggatcaggagattagtatttgttcagggggagggatttgtgctgagcagggtcgagaagcaaattttctaggtagtgaacatgaaattcagaaggtgtgtgtacatgcagatgtgctgaaatgaagaagcaaagctaaacctggacaaggaacgtgatgtttctttggagttcttataagcaaatctattaattacctttgagtataataactgctgatagaaaatgagtgattcttccagccaggcaccataatacaggctacatgtgaattttaatccttaaaacaaagttattaggtagttaccagtttttctaggtttgtctgttttgttttgcttgagacagggtcttgatctgtcactcaagttggactgcagaggtgagatcatggcttactgcaaccgccacctccctggctcaagcaattctcctgcctgagcctcycaagcagctgggactacaggtgcatgctaccacrcctggttaaattttttatattttttttatagagatcgaatctcaccatgtttcccaggcttgtctcgaacacctgagctgaagcaatccacccacctgggcctcccaaagtgctgagattataggcatgagccactgtgcctggcctctatgttttgcagagaaaatgtgccttagagaaatcggataactttctaagatattaacttgcagactgaagactgaaaygcaagtccacccgactccagagacttggctttgctagtcagcatccagtcaggaaatcaaaacttactctagatactttcaaggagggagggatttcatgcaggctgtattagactcttctcacattgtataaagaactacctgagactgggtaatttataaagaaaagaggtttaattaactctcagttctgcaggctatacaggaggaatgactgaagactcctcaggaaacttacaatcatggtggaaggcaaagaggaagcatgtatattttcatatggctggcaggagacagcaactagggaggtgctacacattttaaacaagcagatctcaagagaactatatcacaatacagcactagggtgatggtgataaaccattagaaaccacccccatgatccagtcacttcccactaggctcctcctccaacactgggaattacaatttgacatgagatttgggtggggacacagagacaaaccatatcacagctaataggtcacaaagatgttagaagggcaggaaaatcaggcagcctccctagcaataggacgaaggcagagttaccagagatcagggagctgctgtggctcccagtctacacagcacaggagcctggagggatgctcaagtggccagcccctcccactgagcaggcagctccctgaaagctgctaatgctgcaggagccaccacagctgccagaatgcagctgatattgctggagccaaagtcattggcatcgctagaattgaagctgtagctgctcactgaagtcatctatactgccactgcctgagccacctctagaagtagaacagactctgccatcatcctgctttttaatttggtatatatgcctccaactggaagaacctaaccagagcccagctatcaaggaagacaaatgattatagttttaaggtttccattgctagcagccaaaagacagtgcagaagtgtgaggctaggggccaacagaaatttaaccagcacagcacctcaatattacatcaccaggcattgattagtcaagggaaacactgggtgatgagccctgaaaatggacattacagcatcagagtatttacaaactccctaaagaagtcatttttctagtccaatcccccatttgatgcttgagaaagctgaagtccagaaaagggaactgatctgctcaaagacaaactgaaattattttttccattttataacagttttatataatttagttgagacctaaatgtgttctgacttcctgagttccgatcaactatattaagagagagccagcgctgcccttacaatatgttgtgtgaaatagacactctcattatggtgacagtaggtcttttagattttgttcgacagttgcccaccttctcactggagtgaaatgaatgactaggcagcaccttgctgcatagcatgaagggaggagacccatagttctttaccaccctatgtcaggtggccgctgagagaagacttgaaaggagaagagaatagatgtatgtttgttgcaccagtgtgataggtgatggagggacctattagatgagacatgggcaggggcactcctttatggcctaaaatgcaagackaaattggtgatgcctttctagaaaggaagcatggagatataaaaatccatcatccctcccaattttgtactgggtgaacagtaattggaagcattctagaaggaactgtccattgtgaaatcttagttgcatactttagatgtaaaacaatgaattggggatacctctgttttagtcacagttgtgcaatgtgtcagttctatgagtgatggcaagacatcttcctcgccctgtgtatttagtttgttatcaatgtaataaggctgttattctaccttttttgttacatatagatttgtaattattattcccttggccagtttaacagtgagagaaaagttattttcacacaattagcagtactttgtttctctctccccagtatgtcagccacctccagatgtcctgcatgctgagcgtacccaaagggacaaggacaacttttcacccgggcaggaagtgttctacagctgtgagcccggctacgacctcagaggatctacgtatttrcactgcacaccccagggagactggagccctgcagcccccagatgtgaaggtgactagactcttatctggcttggtatttttagcttgcgtctttattctccacatgccagttatttctgttcgtttttctttttttccagtgaaatcctgtgatgacttcctgggccaacttcctaatggccatgtgctatttccacttaatctccagcttggagcaaaagtggattttgtttgtgatgaagggtgagtatgagcttgcctgacctgctggacattgaaattggggttaggaattagtccaaaaaggggagatttgatgtggcttaaaaaaagacagacagacasacacacacacacacacacacaatcagagagatgaacttttgaaagtatatataggaagaaaggaaagacacatatggaactaataayatgagatatgaagaggacactgggccatatattaactggcaaattcaaagacaagtataattacttgttattaatatataggtaacacagtaagtttaaaaaatcctattttcaaaattttagaatttcaaaacagcaaatagaatatgagtaatttaagagtctcagaaaaaattgcaagtaacaaaaaacttattctaaagagctaggatcatttaagaatcatttcagtaaattctttaaaccatcagtaatgaaatttgtaataggactgaaagtgtaaaaatcagcattttaaaaaaatccagtcatatatcgtctggctagtcatgggctctgggctctgagctggggttctgatggctgctgttaatatttccagcaaggtcattaccttgtttatgtccacctagtgctcttcrcagggtgcacatctctacacgggagctgaccagcatgggcaacaaagcacctgatcccaaaatgtaacacagaatcttggcaggctccaaaagccagcacccagtaagagttaggagggcatcggggcccaacagacattgagaattttcaacaattgcgtacaaaaattatgtcctctcttctttcctttttcccctagaatattcgtgcttactcttcagcagcccaaattgcccttttgagccttcttcacgccatcacagatgtggagatgaaaggacaatctctgttctctcgccagctatttcccactttaccactccaaactgggagctgttttacttgctgttccagggtcagagttacgaaggcattgcattagaagactgggtttctaataatgacaatgagtaatcagtgaaactccaagcctgggtcctgggtcaaggagatggtggcyattttgtgaccacctttttcaattcaagcaggactatcatgtgaccaagctactgcattttgccactctatattgctcccttctggaggctgtgatttttccagaataacgtagyctgtgcaactctgccacctgctggcctcaggtcctcaaaatcctgaaattggggctgggccttagattgtgaactaagtgtcctcttggctgaaacagctcrctattcactcctattttcttctttagatttcaattaaaaggcagctctgctagttactgtgttttgkctggaatggaaagcctttggratagcagtgttccagtgtgtgaacgtaagtaataggagtaacatttcaggccaatctctccycttcatctgttcagtatttgacccaygacctcccctaatgtggttcttcaattttctaatctgaattattgatttgaaaatttcttattttagtaatgtttggttgtgaatcaatgtgtacatcacctgtctttggaactatctgatctgtctctgtcattttgtattctatgttctmttgcgataaatcctatggtcgtgtgcttctaggtcaggagagattagataatgtgaagcttttacaatttgctttctttctctacttcttttctttcttctcttctttccttccttcagttcttttttcccttcttctctccctctctccttccttctttttcattttgttctccaatcaatgtgcagtcagtctacaatttgtgtatatatttgataatactcaagtatcaaacatgcctttatttaatcaattatttattgatcacatactttgtgcctctgttcatctagatactggagttatagcaatgaacaagatgagtgaagtccctgtccccatgttgtttttactcaggtrgggagaaggacaaggaaaaaaataagcaaattaaatgctacggataatagatcaaagcaatgaagaatgagggaaaagtggggagtaacattagacagggtgagcagtttgagactccataaattctcaaaatatgtacctaaataatttatgctgagagattcataaataataagtcatttttttaaaatgagcctcatatgttcaataatcagtagactactgatttctcctagtctacccatttataatttccccaatagaagatagaactttgcttcatttcttgattctaatgattggaaaacatgtttctttagaaaaccatgaaattttactaaaatgtttatgttcttagaaatgtacttggacatcttacagtgctttttagagtaaaattttggaagaacataacttatatagagatgcttgctgtctaagaaatccagtgctccttgaggcagcatgacaaatgtctgttctactatcatgcatgaaagctcattgattggactactcaagctttctcttatttttcataactctggtagttaaaataacttcttccaaatgccagttctaatgaaaaatgccaattagaaatgaggaagagactattataaacaaatcagtagatgctagaaaggagtaacaacttgaaacctgacccagaaagtaaaaaaagaaaataaatcatcaacagacsttgacattttcaaaagcaaagcaatctgaatccatttggagttttttataatggcctgaatatgtttcaattcactgtggcagggctattgttatcactgagactgatgatcaatatcagtaagtaatcagtgaaagttttcacctatttaagatgattagcacacatatatacatttgwgaaatatttcccaagaacgtaggcyccttcctcagcactgtgtccccaggatcctgatgagtggctgacacaggataagtgctaaattaakaaakattgactaaatgaatgagtaacccttcaaaacggttatttttcttcttcaaatgttttgctacttcattaaagttgtaaagtaagtaaacttgcaytggatctttcccatgtctgcaaaagcttcttattgaattttttcaattgtgggataagagaaaccttttttcaaaagcgttcagataggtggatgtaagagtttttcttgcaggtcgtctttgattattgcttgaaatgctcacttcaygagaatgtttcaaggaatatttgtagagaaaatcttcattccttatgggaaaataaataataaatgactctatatcaggaaataaarattgtgtaggaagacaaattctgtttgaataactaggtgggaagaaatcctttgaaaactttattggtagtaaataatgccataaatgacctttacattttgataagggatgcaaggtctctacacagatctaaatctagatctagatagatctggagggaaggtctttttgaaagtggggcttagtaggtggctgatcctgaggctctctgatgagttttctcaaggtgscaaaatctgtggaactatcagaactgcgtgttttcttcaggaagctacatgcaggttgagaccttacgtactgaagagagttcagattactctacctggctccaaaacattttctttcccacaggtaaatcatgtgaaactcctccagwtccagtgaatggcatggtgcatgtgatcacagacatcyakgttggatccagaatcaactattcttgtactacagggtgagttggcagcaacatctcttggttccagagttccagcacagcaatactaccttctagccacatctcaggaaggaaactaggctgttgccacctgctcttgagaggtttgaacacaggtattaactcctgattgaaatgaacaaagataggagaagattaggggaaaaatctgtgtccttgctggaaaccagggcagtgcacacataaakagtatgccgttcactggatgggaargaaaaaaaattaggagtatagtagtcaaagcacacaaacaaccctaacccagagtagacattgctggaagaaagggaagggcatgtagcagctgtgtgagagaacaaatcttaatgataacagcatgatcgcttgctagggctgccatcaaaaagtacaggccttcctcattttattgtacttcacagatgttatgctttttacaaattgaaggcttgtggcaacgctgcaacaagcatgtcagttggcatcatttatccaacagtgtgtgttgacttcgtgtctctgtgtagcattttggttattctcacaatatcccagakgttttcattattatcatgtctgtgatagtgatctgtcttcagtgatctttgatgttactattttcattgtttggagtccctacgaactgcacccatataagacagaaaacttaataaatgtgcatgctttgactgctccatggacaagacattccccttctctctccctctcttcaggactccctaatccctgaacacaataatactaaaatgaggccaattaatagccctacaatggcctttaagtgttgacatgaagggaggagtcatgcatctcttactttaaatcaaaagctggagatgattaagcttagtgaggaagatatgttgaaagccaagacaggccaaaagtcaggcctcatgtgccaaacagctagcgagttgcaaaggcaaagcaaaagtacttgaaggaaacttaaagtgctattccagtgaacacatgaatgataagaargtgaaacagccttattgctgatatggaagaagttttagtggtctagatacaagatcaaactagacatatttccttaagctaaagcctaatcctgagcaaggccctaactctcttcaattctgtgaaggctgacagaggtgaggaagctgcagaaaaaaagctggaagcagctgggcactgtggctcatgcctgtaattccagcwctttgggaggcagaggcaggtggatcacctgaggtcaggtgttcaagaccagcctgaccaatatggtgaaacctcatatctactgaaaatgcaaaaattaaccaggcgttgtggcgggttgcctgtagttccagctactcgggagtctgaggcatgagaataacttgaacccgggaagcagaagttgccgagattgtgccactgcactccaggttgggtgattcctgaggtttaaggaaagaagtcatctccataacataaaggtgcaaggtgaagcaacaagtgctgacatagaagctgcagcaagttgtcctgatgatctaactaagatcattgatgaaggtgttaaaataaatagcagattctccatgtagacaaaacagccatctattggamcttcatagctagagaggagaagccaatgcctgggttcaaagcttcaaaggataggctgcctttttaggagctaatctcgttggtgagtttgagttgaagccaatgctcactgaccattctaaaagccctagggcccttaagaattatgctaaatgtaccttgcctgtgtctataaatggaacaacaaagtctgatgacagaggtatgtttgcagcatggtttactgaatattttaggctcactgttgagatatagtgctcagaaaaacagattcctttcaaaatgttacatacagctcattgactttgtatccaatcaggcaagagctctgatggagatggacaaggagatgcatgtagttttcctgcctgctgacaacagcagccattctgcagcccatggctgagcagtaattttgactttgaagttttagtatttaagaaatatattttgtgccaggcatggtgtaatcccagcatattgggagaccaaggtgggcggatcatgaggtcaggatttcaagaccagcctggccaacatagtgaaaccccgtctctattaaaaatacaaaaattggccagcatggcagaatgtgcctgtagtcccaactactcaggaggctgaggcaggagaatcacctgaacccaggaggtgaaagttccagtgagccgagattgcgtcaccgcactccaggttgggcaatagagggagacttcaactcaaaaaaaagaaaaagaaaagaaaaggaaaaaaaaatacattttgtaaggctatagttcccacagacagtaattcctctgatggatctgaacaaagtaagttgaaaactgcaggaaakaattaatcattctacatactgttaagaacactcatgattcatgggaagaggttaaaatatcaacattaacaggagtttggtagaagttgattccgaccctcatggatgactttgagaggttcaagacttcagcggaggaaataattgcagatgtgacagaagtagcaagaacactacaattagaagcagagcctaaaggtgtgactgtattgctacaatatcatgatcaaacttgaacagaagaggagttacttcttatggatgagcagagaaagtagatttttgaggtggagtctcttcctggtgaagatgccatgagcattgttaaaatgaccacaaatttagaatattacataaactaagttgataaagcagcagcagtatctgggaggattgactccaattttgaaagcagttcagagggtaaaatgttatcaaacagcattgcatgctacagcaaaatcttttgtgaaaggaagagtcaatgtggccagttttattgttgtcttagattaagaaatagccacagccaccccagctttcagcaaccaccaccctgatcagtcagcagccatcaaccttgaggcaagaccctccaccagcaaaaagattgtgacttattgaaggtcagataatctttagcattttttaccaataaaccattttttaaagtatgacctttttttcacataattctatttcacacttaatagactatartatattacaaacacaacttttagactcactgaaaaatcaaaaaattcatatgacttggtttgttgtgatatttgttttattgtggtgttctggaactgaacctgcaatatctttgaggaatgtctgtaacacaaaatgggtggcttaatacaacagaagtttttggagttctgttctatagactggaagtccaaaatcaaggtgttgggaagaccatgctccctctgaatcctgtagggtaggatccttcattgcgtcttccagcttctggagccccaggccttccttggagtgtggcagcagaactccaatttcttctgttgctgtcctcagatggccatcttccctctgggtctgtgtcctcatatgctgttctcctctctgttcatgtctgtgtccaaagttttctctttttataaggacaccgggcatattggattagggcctaccttaatgacctcagcttaactggattgcatctgcaaagattgtatttccaaataaggtcacatccacagggactgggggttaagacttcccaacatatttgggggagacacaattcaacctataacagagtccctttgaaaatgtcaagtgtcaggtgctcacagcgcatggtccagctgttggtgctcacccttgctcagcacacagtggaggctctgcctcaatctcactcttcacgggaacagctaagccaggtagtgagtaggggctatgtttgtgccaccgcaacaaacacagaaaggaagcttgtggtgtccagcatatttgccagcctaggcttcagagaccatagcacctagaatctgacaaaataaaattggaataaatccaaagtcctcttttcttttttgagcatttttaaaaatacaattgataaatttcctaactgttccttcctcatcttgcattgtggaataagtgcgaacctccctgcggcatgaggcagaaaaccattgagcttatgacaaaaaacaggaaatacatgtaaaagagaccaattttaaaaaatcaggagaaattttacaaaagagatttactgccaggaaaccaggaaaactttcagaacactctccttttcctatttttaacaagactcagttgtacaaataattctgtgaaactagccatgaagtttgcacacgaatgaatatatgtagtcagtgtgtttatatatttcatttcatatatgtgtcatatatatgtgtgtgtgtatgtrtatatatatatatayayayatayatatataaaacactgaatattgcagaaaattaaagcaaagagtaagaagagttaaccaaattttccctcaatgcagtgggaaaagatgaaaaggagaagataggtgggcacagtggctcacacctgtaatcccaacactgagaggccgaagcaagagaatcacttgaccccaggacctcgagaccagcctgggcaataaggcaaaaccccatctctacaaaaaagtataaaaattagctgggygtggtggcgtgtgcctgtagtcacagctacacaggagactgaggtgaaaggatcacctcagcccgagaggctgaggcttcagtgagccgtgatggcacccctgcactccagcctggatgacagaatgacaccttgtctaaaaaaaaagaaaaagagaagacgtatgtaagacagtgtcaggattcaaattatgtattaaaaaaattccagaagggtaagcaaataagcccatacctagccatcactagggaaatttctgtgtttcagggatagagaaaaaaactcagattccagaaataaaatgtgaaaatgtaatacccgcaaaagaaataaatttattgacaccacattgattctacacaacactaaattgtagaagatagcacttctgttgagccaagctaatattcacatctagaggctccagatacacattaaagaataagcaaagacacaaaaattgtaccatttaagtatgtttcccargcaattaataagcaaatttttaaaaaggagaatgatgaattsctaaagaaatctcaatgagatagaaaagtggtaaaaacaaacaacaacaacaaaaaaccataaacacaaaaactggcaawgtaatcataatttagtaataatctctgtgaagtcatagaatatatcaatagaagtagaaaatgtgagaaagcaggaaaaggtaggctagacttrcagaaaagatgagtagactgactgtacagaatttgactctgaaattgagaaaataggtttaaatatatgtatcaagtgtatatatctacaatatacatgcacacatataaaattaaattcctaattggaaaaaatattaagtttaatttccaaattattagaataactaaaacagctgaatctatctgttccatatagtaaggggagggaaggaaaaagaatagcaaggaatgcatttgtctctgtcatcggaaataagccccatcatgtttgggtcaggtcattttattcattgctttctcctcatcctcatcatgggacatcgtgaaatcatgaaaaaggtagtgaaagaatkatgacaaggccgagcacagtggctcacgcctgtagtcccagcactttgggaggccgaggtgggagggtcacctcagatcaggagttcaagaccagtctggccaamgtggtgaaacaccatctctactaaaaatacaaaaattagctgggcatgttggtgcatgcctgtaatcccagccactcaggaggatgagtcaggagaattgcttgaactcgggaggcagaggttgcagtgagyagatattgcaccattgcactccagcctgagcgacagagccagactccgtctaaaaamacaaacaaacaaacaaagcaaatcaaatatataatttatttcaatccatttggtttaamcttcttgtcaaaaaaccaagtctactagacaggatcaaaagcaacaaatcttgtatttataaaaaacatgcctcaagttaaatggcatagtattacacacacacacacacacacacacacacacacacayayattaagggaatacgcaaacaaaaaatggcagaaataatatgggaaaagacagaacttaagaaagaaattgtcaagcaggtctacaaaatrattgttttattttggtgccaggtacagtccacaatgaagtcaagatattaagaagtaaagtggaccaggagaagttagagcagaaatatctcttttcaatagtgagagcagaaaaagaagtagaaaagctgggaacaataggtaaagtttaggctaggccttagacttctcctatattgtaatccctctggtttgccacatrtgcatgctgtcaggaagttgatgaggtatgkamagcacaattattttccattttttgcctttaggcaccgactcattggtcactcatctgctgaatgtrtcctctcgggcaatactgcccattggagcatgaagccaccaatttgtcaacgtgagttgaaatctctttccccattcaccccaccatttaaccctagagttgtcctcctagaattacaaagaatgaatctcatccctcttggaaatggtatccttctgatatttgaagaatccagtcatatccttaaaatggctcacagcattccaaacttccaccttcacctagaaatgctttttttcttatcttaaggtgtaatttattttaaactagtcttgagctaatttaaatagcccccaatttcatcctctgttgggtgaacacctcccagtttgaagagcattttctttggtgaagtcaacaaatacaaagtcagtgaaagaaaccgcatatcctctctgcaagctgttagtatcacatcagatattcaagccatgcagctctttcttccttcttattctttgtctaaacaggatcatgccatcttccctgtgagttgtttggaagatgagctttctacattttggggagcaaagaggaatgagcaattgcaagctaataaggaatataaaatgtgtataatcctgggtttagtgatggtgtgaggaaatcagcaatttcaaacccatctggtgggagrataagtgggaacaaactttgtagaagggcaatatactggctgggcactgccctacagtagagtaggacacagtattcagttcttccaagatcagatgaaattgggtgcattcagggtggtatggctgtagatcagtatccagttatttgtattacttctgaatctgtaagtatcatgtttattatatgtaatattgtatatttgtgyttgctttgtctttattagttctgccagagcttttgttcttattatttaataaagatgttatactgggccaggtgtggtggctcacacctgtaatcccagcactttgggagtcctaggtgagcagatcgcttgagcccaggaggtcgagaccagcctgtacaacatggtgaaaccctgtctctacaaaaaakacaaaaattaaatgggcatactggcacacgcctgtagtcccaactattcgggagactgagaggtgggaggattgcttgagccagagaggtcaaggctgcaatgagccatgatcgtgccactgcactccagcctgggcagcagagcaagaccttgtctcaaaaaaaatgctatgctgtatgctttattatattaatatccaatagaataaagacacatgccttctatatagagagaactaaattaataatggtgagataacatagttaaattctcatttagcaggagaaatataaatgtgtactataggccaggcacagtggctcacacctgtaattccagtacattgggaggcccaaggtaggtggatcacttgaggtcaggagttcaagaccagcctggccaacatggtgctaccccatctctactagaaatacagaagttagctgagcatggtcgtgcatgtctgtaatcccagctacttgggaggctgcagcaggagaatcatttgaggccaggaaaggaaggttgcagtgagccaagatcatgatactgcactccagcctgggcaacagagactctgtctcaaaaaaaaaaaaaaaggaaaaaaatgctctataataatatatggacacatttagcaaagtaatgttaactacgaagagcacaactcacaatattataaaattgtaagaatatatctgtacattagtaaatattagatgagaatgatattgtgaatatttacttccggtaatttgggatttcagaaaagctattagcataatttacaataaagtataattttaagaaaccatgccgggcacgatggctcacgcctgtaatctcagcatttggaaggcagaggcaggtggattgcttgaggccaggagttcaagaccagcatggccaacatgaccaaaccccaactccaccagaaatacaaaaataaaccagatacggtggtgcgtgcctgtaatcccagctactcgggaggttgaggggggaggattgcttgacctgggaagttgagattgcagtgagccatgatcgtgccactgcactccagcctgggcgacagagcaagactctgtcccaaggttttgttttggtgaacttgcggtctcttttcccaggaattccttgtgggctaccccccaacatcaccaatggatatttcattagcaccgacagagagtattttcactatggatcagtggtgacctaccactgcaatcttggaagcagagggagaaaggtgtttgagctcgtgggtgagccctccatatactgcaccagcaaagatgatcaagtggkcgtctggagcggcccagtccctcagtgcattatacctaacaaatgcacacctccaaatgtggaaaatggaatattggtgtctgacaacagaagcttattttccttaaatgaagttgtggagtttaggtgtcagcctggctttgtcatgaaaggaccccccgcaccgtgtgcaatgccaggccctgaacaaatgggagmcrgagctaccaagctgctccaggggtgtgtttgcctgaggcctagaagggccctgcaagtgacatgcattgctgttggatcaggagatgagtatttgtttagggggagggatgtatgttgaggagggtgggaaagtaagttttgggggaagaagcatgaaattaagaatctggggtgtgcawgcacycatgcatatgtgtcttcattttgaaaagcaagaccttaattagccaagaaaactggtattttggactcacctattaatcaattgtcagggcaaagtaccagctgcaatctctctcaattatattgaaaaattatatggactttatggtcagctgtgccctaagcactttgtatacattatctcatttattatttaaaacaacactgtcttatttaagggcttgtgtttttgatggctcatcttgtctactgatgccacaatagctggcttagcagcggagtgggaggtgttatggcagatacatagggacagagaaagagcttacaattcttctaccaacccatgttagccttgtgcaaccactgagctgggaagacaaacagataaagggatataaagacggatgtaccgaggcaggagatgggcagggcttgtgttctggtcacaatcctgctgaccaaaacagaatctggcctagacaggatgaagtgaaaaaacagcagcaacaggcagatggcgatgaaagcaatcactagctgccctcatattcccatcagcactgtgacagtttacaaatgccatggcaacgatctggaagttaccacccctttccaggaaagttctaaataacacgcccctcaatttgcattgatgtgccccttaacttacctgtaattggctgggcatggtggcccatgcctgtaatcccagcactttkggaggccaagatgggcagatcacctgaggtcaggagttcaagaccagcctggccaacatggtgaaaccctgtctttactaaaaatacaaaaattatctgagtgaggtggctcgcacctgaaatctcatgaggctgaggcaggagaatcacttgaacctgggacgcggaggttgcagtgagctaagatcacacgactgtgctccagcctggatgacagagtragatatcacctcaaaaaaaaaaamacacaaaaaacaagaaacaaaaataatttacatgtaattgaagcgggcttacaggagtataaatacagttgcctgccaggagctcatatgttgctgactctgggcacattgcctgtgagttagccctgctctgcaaagggcaatgcctttctaaaagatcgctgtctagcaccactggctcatccgtgaattctgtcctgagtgaggcaagaacccttccagartaagccccaatttaggggcatgcctgtccccaaacagtatgactgtactttagtcattggtgtgcaatcagagaaatatggggaaatctgtaaaacagacttggtctcmggtgacagtctcattacctgaataatgatggtacaaatacctccctaggaaatatgtagatggagaatccaccaatactaataactccacactggatatccagagctaggagaaaatacttcatgccctgtagatttacaggtgaattttgggccatgtgctagggagaattgtgttctatttctctaccttttactaactatgaggccttcagcaggcataggatatagcaaaagaaattcccccataactaacargtactctggaactgtcctttctacaatgtgtcagcygcctccagaaatcctgcatggtgagcataccctaagccatcaggacaactttttacctgggcaggaagtgttctacagctgtgagcccagctatgacctcagaggggctgcgtctctgcactgcatgccccagggagactggacccctgaagcccccagatgtacaggtgcctctctttccccctcacatggaagtcttactcctgttgttttattttttcttctcgtgaaatcctgtgatgacttcctgggccaactccctcatggcygtgtgctgtttccacttaatctccagcttggggctaaggtatcctttgtttgtgatgaagggtgagtgtgacccagtgttgagaccaaggactcagtgtggagaatcactgagttaatccaattaaggagctgacctagtagataagaagtacccagagagattaatttatggaagggtagttttgaaataagcgttaatccaattaaggagctgacctagtagataagaagtacccagagagattaatttatggaagggtagttttgaaataagggtagggactaagtggcaccgccttcagaaaacaatgaaaaaatggcacatacaactcaatrtcagatacaaacctaaatacagtcactgatcttgggtacacagttggaacttgaaatgaatgggtacgtatttatttggaggcaaaagaacataattttataaaatgtrtgctagaaaaaaaagatgaatgagatggaaattgtttgcctcataataaggcaaaggttgttttaggaaacttaaaaccagtcaatartggaatctgtaatagtgtatgaataactatgttttaacccaattacatatcttcatgtcaagaatggccagtgtaattgttttgatgcaagatttttctcagccactttgccagctggtgacctctggccagaaacatccctgtccaggccttgctctacccaggatcaatgcaggagacacctcatctacttggcccacccaggccgtgccaggcttgtgctctgatgcagagcccatggctgccgcgactacatgctcagcctctgggagggggtgtgtgagtgagcaagtgggggttccagctggccgcgccaagcactggcacaggagcgggctccgtgcaaggcttgtggctggaccaggcatgtcacactgaagggaatgtgttggtgcccaaacaggggtccccacgaccccgaagcccagagggggtgtaacagcatggtaatagctcttagcatttgataatgcctgcagcccaacagatggcggtgtgttaacaactctgtcagttccatcgccctgctcaggcctgcatctccaaggctgacttggcctgcatctccaaggctgacttggcctgcatctccagggctgactggacctgctggtgcttcctgttgcatggaataacttccctcccctaggagacggcaaagagccactgtattacagccttcttcatacctgcgtttggtgggtcctgagttcttgtcccgcatccaagaagaacaagcttatgctgacaatagaagggtgaggagggtggagaagagttttattgagtgacaaaacagcttctcagcagagaagagacacaagggtggaccccagatgaagtcagggggtyattctctcagtgtggctggttctggagcctttatggactcagaattggaagtgtgtgttaattggttggtgagtatgcaaaaaaggctaaaacaaagccaccactcaaaggtgggcacaacagtgcaaaaaaccaattagggaagagcaggtatatgtgaaatagatgaagagtggggatcaatcagaggaaagcacacccaacaggaagagaggttctcaagccagtccatggatttacctggaacttgtagctaggctttaaactgtcttcagcttgaaggtcgggtttcaccgggatccgccccatctgcctgtgatttgtctgcctcctgcttctaccactgtcaagtggtattattcgttgcttatgtgtatccattattcttggtgatacagtatgagtctgggggataactagattgagcaattaaggagttatttttaataatttccaaggattctttggcatttacaaagtccaccacctaataatgatttccaatttcagaacgattttagatttcagaagggaagcagtactcaatagtaagttgagcatttcagggtggcaaagactcctcccctgacccttctttttttcttagaacacatggttcagcatgcttctgtgagcctctttctggcctgttacatttggagtggcgagaagaacagatattcctggctttgcttaccaaatcaaaagctgttctgcctcatgacccactaatgagaataagtgggatgtcagagagccatcaatgaaagatgacacctgaaggttatggctcttgtgcccatggagaagtctggttctgtgttcatgccttctgtaggtgatgctgggctatgaagtttatatggcacttcagctctgattgctttgccagtcacagggtaccatggttctttagaataaattggcctttgagtttctgtcagctactgaagaattcagatccctaatgaactaagacttttagctagacctgaacctaagacccaaatgatagtcaaggaggaaatggtagtgaggaagctgagcatctattagtgaagaaatcaagggagagatgggaattgctcayacatttgctaccacttttttttttctttaggttctgattaaaaggcaggtctgctagtcattgtgtcttggctggaaygaaagccctttggaatagcagtgttccagtgtgtgaacgtgagtagaaagaactaygtagtttggatagctctccttatttttgttttccagtgttttactgcacggaatcacttgtctggatctttacttaactaaattactgattaaaatacttctctgttggaagaatttcaagaagggtcttgtaggacttttctgacatttgttactaatctgtaaatcacttagtttaatgactgtttaattttgtggggaatgtgtggcaagaaactaaatgacataaaagtgcagcacattttagtcagtcatttatttttaattttcttataaggagtaatctttcttacattttttttttcttttttgagacagttacccaggacagaatgcagtggtgcaatcacagctcactgcagtttcaatggcctgggctgtagtgaccctcccacttcagcctcccagtagttgggactacaggtgcatgccaccacacctggctaattttttatattttgtagagatggagtcttgccatattgcccaggctggtctcaaactcctgggctcaagctatcctcccaycttggcctccaaaagtgttaggattacaagtgtgagccacygtacccagccaaattyttatgttcttttatcccctcacktatcataaacaatttagtcagcttgttttttagcctgcagtattgaatgacatagggcttcccatgtgctaggactttccatgtgtagaaaatgcaatgaagagtaaaagaatagtgaagccacctccctactttcctggagtatattttcttgttgggaagaagactaaaaacaataaaataagaaaacaaaattctaaaaattataatatataaaatggtagttaaatagggatgttatggagaaaataaaacagagttatatgataaattagtacagtggaaggagccgggatgacgaatcagtgtctgaaatgatgaggtgtcctaaatttccaaaccatccgcttaaataaaatatcccaaaattcagaaagaattcagaaactcagataaaagtacatatttgacatactaagacattactgatttaccctattctgtctattaaagcaaggcatgatttttttaaaccttttttttcttattggaaaatgtttactttaatttgcattgtgttaaaataacttacagaaatcaatttggatattttatggtgagtattatggtgaagaacattcaatacctgaggaaactcaagtatccaacaaactcaacccttacagagacacatagagctgaaaataaatatataaataaacttaggaaaaacacaagtaaaattcaagcatgagaagttaatcattgtttgatgtactaagtcttttatgtacacataattccgataaacttgggtatctcttcctaaattcatatcaaattagaagcatcaagtgcttttagggaaggaactgttctaaacagaagaaaagaaggaagaaatgatggctaataatytggaagaaagaaaaaaagcctctttggcaccatttaatctgtgtaaaaagagccttaccaatgtagtctgatgacaccactggaaatttggtattggtcctgatgataacagtcttgaatcaccaagaaacatttacattgctaaagatgatagttcatgactattaaagttcatagatttccttggaacttatggtctctgatggccaaaattttgtctgtcttgaacctcattgtcaactcaggaatcttactatgcctgatttaaagtagacaaccaaatgggtgtttgtaaaaaaattaaaaaaaattactttccaaattcattatgaacrtagctacctggatggtccaaaaacactgtctttgggcttttgcaatagactgtaatttaggtctcacaacagttagttgcctctcaacaaaagccttacagatttaaattccatccaccttagttatagtctttctaaaagaaaaaaaattatattcatagcactgtcgcaggtcactaatatttcagtcatcttaagtgaaactctaatagaacttaaaagctcttgttttctttctagaaatcttttgtccaaatcctccagctatccttaatgggagacacacaggaactccccytggagatattccctatggaaaagaagtatcttacacatgtgacccccacccagacagagggatgaccttcaacctcattggggagagcaccatccgccgcacaagtgaacctcatgggaatggggtttggagcagccctgcccctcgctgtgaacttcctgttggtgctggtcagtatccgcttccacatatcctaaatgggttcagaatatgtaggtgagaaccttcatatttctatagtgacagtcatttttgcttgtgaaaatggctttgctgtaactgtcagagacagaactacctcccaagtgaatgacaaatgggttctagataggcacactgtctcaattattggtattctgatggcctttggggtgaggagggtgggatggtaaggagagaagagggtggacagtgaagagaattggtgaggtccagattttgtagagaaatttttgaaagtactgaaaacaaatgctaaagaatgtactcttttattctacccctactatgagttgtctttatcctggagagatggatgtgctgcgcaaaaagtacatgatgatgtaatttacttcagaactgataacgctataaaagtaatttaagaaattcagatgtagggatttatactttttatgttgtttccaagggtttgttcaagccgctgactatatttagttggtccttcacctcaccattaacaaagggaactcgggaggccctggagaagcagagtctgagactgtactcttagccttcatagctccttcctttgatatattactctggctttaaacgacagtacttgacaaccgtagatgcatttgtggctgtgactgcccacacaagctccatcctccagtaaggacagaagagcattgaattataaaaggtgttgactttttaatgtgttcttttgagatggagtcttgcactgtctcccaggctggagtgtaatggcacaaactcggctcaatgcaacccccgcctcctgggtttgagcaattctcctgcctcagcttcccaagtagctaggattacaggcacccaccaccacacctggctaatttttgtattttttagtagagacagggattcacaatgttggcccggctggtctctaactcctgacctcaggtaatccatctgcctcgactttccaaagtggtgggattacaggcatgagcctggtgctgacttttttgacctgttggctaattggacttagaacttctgtatgttgaaaaaatgactataaatcatgctgctataaagacacatgcacacgtatgtttattgcggcattattcacaatagcaaagacttggaaccaacccaaatgtccaacaatgatagactggattaagaaaatgtggcacatatacaccatggaatactatgcagccataaaaaatgatgagttcatgtcctttgtagggacatggatgaaattggaaaacatcattctcagtaaactatcacaagaacaaaaaaccaaacaccgcatattctcactcataggtgggaattgaacaatgagatcacatggacacaggaaggggaatatcacactctggggactgtggtggggtcgggggaggggggagggatagcatcgggagatatacctaatgctagatgacacgttagtgggtgcagcgcaccagcatggcacatgtatacatatgtaactaacctgcacaatgtgcacatgtaccctaaaacttaaagtataatttaaaaaaaaaaacattaaaaaaaaaaaagaaaaataaataacacagtagatagatgagaaatatatgggaaacacagcaaagggttaatagtgttatcttacaggtagcagtagtggtggttgtggtactagttgtaaaagttaatatataatgaatacttagtaccactgttagataggctggacatggtggcttatgtctgtaataccagcactttgggaggctaaagtgagacgatcacttgagcccaggagttcaagtgcagcctgggcagtatagcaaaactctgtctctacaaaaaataaaaaaaattagctgggcgtggtagtgcatgcctgtagtcacagcttcttgagaggctcaggtgggagaatcccaagcctgggaggtcgaggctgcagtgagctgagatcacaacactgcaccccagcctggacaacaaacaagactctgtctcaaacacacacacacacacacgcacacacacaagatagcttctaatttaattacacaacaacctatgaggaggatagtattcttattgtctcattttataggtgtagaaactgagacacagagggtttaggtaacttgcacaagaccacagaatggggtagcctgggttcagccaagcaatctacttatctgtagagactgtgcwctttaacaataaataaatggtcaacggacctaaatatataattcaacaagagagaatatttaagtactgtcataatgaaatggaaagctatcaggcaaggtcccaaacaccagataatgggcaattcttaagttggatgaaggagatacatacaaagaattagaatgggccaaataactattaaccagcaggttcttggaactcagagcttagtgtaaactcctcgtgaattgggctgaaccacataggaactccttttgtctctctgaactaagactcagactaaaagcagtcccctttgccttcttgttcctagtctctttaccctatctagtcttggcctttgacatcttactgctttgtagtgagaagagacaaagaaaatttcatgatcttagagactatcgaaacagaaaaaattaaacccagtattttttccctaagayttgggatagattgcttaagataccagtcctaggccttcctaaaatggaagatgaggaactaacctggggyggtggtccaggcttggagtgacatgccatagagggttttgagacagaatagcaatccaaagagaaaaaggaacctttgagtactagcatcagagcaggaagaatatcttgggatactcagatcccctatctccccatttcaatggcccagttacatcagaggcctgattcatttcaaaaccttcctcagagcaaggggtaattgccaggtaccctttaaagccagaattaatacatataacccatatttaygctgtctcaagactaattagcatggtgttgcatgctagacaaataagttcaactccagaaaacatgtaaaaactaacagaagtttcaacttgaatatcttaagagaggcttaaagaaaaattaaactatgtgacactcattaaaatgtccccaaatcctctttacccatttccattacccagtgtcccattcattaaagcaactgctttcctagagcctagcttctctcagttccacccagactgtctctcaatagtctccccaccttctggaccttcttagttcacaagaagtctccatgccatttctaaggtaaatggagtttcttcagttctgcatagttcgatgcaacacagccttgaaagtttctgcagggaaatgcrgaaactatcttaggatgcaagatttagagaaagggtgtaaatatctttctactttggcacataaatatacagaaactgtttaacctcactagaactaaagaaatgcaaaaataacaaagtaccctttttttttattatactttaagttttaggatacatgtgcacattgtgcaggttagttacatatgtatacatgtgccatgctggtgtgctgcaaccactaactcgtcatctagcattaggtatatctcccaattctatccctcccccctccccccaccccaccacagtccccagagtgtgatattccccttccgtgtccatgtgatctcattgttcaattcccacctatgagtgagaatatgcggtgtttggtttttcgttcttgcgatagtttactgagaatgatgttttccaatttcatccatgtccctacaaaggacatgaactcatcattttttatggctgcatagtattccatggtgtatatgtgcmacattttcttaatccagtctatcattgttggacatttgggttggttccaagtctttgctattgtgaataatgccacaataaacatacgtgtgcatgtgtctttatagcagcatgatttatagtcctttgggtatatacccagtaatgggatggctgggtcaaatggtatttccagttctagatcgctgaggaatcgccacactgacatccacaatggttgaactagtttacagtcccaccaacagtgtaaaagtgttcctatttctccacatcctctccagcacctgttgtttcctgactttttaatgattgccattctaactggtgtgagatggtatctcattgtggttttgatttgcatttctctgatggccagtgatgatgagcattttttcatgtgttttttggctgcataaatgtcttcttttgagaagtgtctgttcatgtccttcacccactttttgatggggttgtttgtttttttcttgtaaatttgtttgagttcattgtagattctggatattagccctttgtcagatgagtaggttgcgaaaattttctcccattttgtaggttgcctgttcactctgatggtagtttcttttgctgtgcagaagctctttagtttaattagatcccatttgtcaattttgtcttttgttgccgttgcttttggtgttttagacatgaagtccttgcchatgcctatgtcctgaatggtaatgcctaggttttcttctagggtttttatggttttaggtctaatgtttaagtctttaatccatcttgaattgatttttgtataaggtgtgaggaagggatccagtttcagctttctacatatggctagccagttttcccagcaccatttattaaatagggaatcctttccccattgcttgtttttgtcaggtttgtcaaagatcagatagttgtagatatgcggcgttatttctgagggctctgttctgttccattgatctatatctctgttttggtaccagtaccatgctgttttggttactgtagccttgtagtatagtttgaagtcaggtagtgtgataaagtaccctttttttaaattgtccattaaattaacgacaaacaggtttttatgtgaacacccaataaaaagtaaggatgtaatgtaacgaatattgttgtatattgaaggtactattgtaaattggcaaaatctcttatgaaaaacaattatgcaatgtgtgtggacaataatacaaatattctgccagttagcctcctagaactgcaacctaagaaaatagtgtaaaatataaaatagtttatgcattttattaagggtttcatgagaaagaaaactagaaataaatgcacaatagaagtcattgaatatactatgatgcatctactagattatattagtttgcctttgttgtaacttatatttctagtatataaatatgtgaaaacataccagaagagaatgtatcaaaacacattttgggtactaggatttggggtgatatttttctttagttctgtattataagttttcttctgtaattgtattacttttacgagaaaaatattaatttttaaagtcttcttggcagtggctcgcgcctgtattcccagcactttgggaggctgaggcgggcagatcacgaggtcaggagattgagaccatcctggccaacatggtgaaaccccgtctctactaaaaacacaaaaattagctgggtgtggtagcacgtgcctgttttcccagctacacaggaggctgaggcacgagaatcccttgaacccaggaggcagaggtcgcagtgaggttgcaccactgcactccagcctggcgacagagtgagactttgtcaaaaaaaaaaaaaaaaaatcttctctgagtgcagaaggtaaaatgagagtatatgagtgaaatcaatggctttttataaaaaatattagtctgagtcctgaataaaaatcaggataaattgtcactggctgagaagtcctgttcaatcatgttgcatgccagagtgatgtttttgtgacttttgtcttccttttaggttcacatgatgctcttatagttggtaagttttatgaagtgtttgctgaggaattctgtcatctttaacagtaagtacctacttataatgaatgcaatgtagaaagagagatcaaaatatcttgagttataaattcaaatagaaagaaaattatgatgagtttaggccaggatatggtgaaactggcatcgtcatatgccaggttattgagtaaccttcctcaaaagttctttactatctttgaaccactacaaatgcataatcgttcaacagtgtcaaaaagtatttatttgaatgtggtgggagaatgaaacttcttctttgggttataacctggagtatgcttccagatggtgattgtgcccatttgtacaaatagaaagctacaagaccagtcttccgagcccatgtctgtgatctgcctatgtaagaagaatagttttgtaatagagtttgcttccaagggaatctctatggcatagtattcttacatccctttttatacatctggacactgagacacggagggtttaggtaacttgcccaagaccacagaatggggtagcctgggtctaagcaggcaatctacctatcagtggagactgtgcactttaacaatcaataaatggacaaaaggacgtaaatatataattcaacaagagagaaaattccagtattgtcacagtgaaatgcctgtgtgttaagccttaggcgagagacatgggcagggccatggagagccagtggccagctgtcccatcgcacttctcacttacttgtggaaaggctgatggtggactaaaggttacaaaagaggtcagctcaccccttaactataataaccctgtgggagtgagactaatgctatagaaacccagagtaaagcagaatgtatagttacatcttttaaaaaaaaaagcattggcaatctgtagtgggactggatactaagatagaatttaaaacctgtgagttatattttccacgcatttaattaccttgttttactgcctaggcactttacttggtacgatcatctttattttaatcatcattttcctctattggataattttcaagcacagaaaaaggtaagtatagccatattatcccaagaaatgtaaactgtacttaccccctcttggaagtcaaaagaaagtaaaagacaaacaaacccattgctacataaacagatgtggtaattcttataaagaaggtccttgacacacagtatagacaaagaggtattcacactaaaggaagtatataggatactaagaacaattaaaaaataataataataacaaaaaaccagcattttggccaggtacagtgactcatgcctgtaaattcagcactttgggaggccaaggtgggcagattactagaggccaggagttcgagaccagcctgggcaacatggtaaaaccccgtctctactaaacatacaaaaaattagccgggcgaggtggcacacgcctgtaatgtcagctgcttgggaggctgaagcacaagaattgcttgaacccaggaggcagaggttgtagtaagctgagattgagctgttgcactccagcctgggcgacagagtgagactacatctcaaaacacacacacacacgcacacacacacaaacacatagcattttaagcaagaattgagttttacagaaagagaaagtaggcagaaggggtttttaaaaagttgttcatgaggctgtttgatatcctagttttgctaagacattgcagatactgacctctaagcccagatcctatcatagcactagaagttagattgggtcacttatggcacacataggctgccagtggggaagaactgagactttccattgggtattttaatatatgaacaaatattttgtaattacaattaactttttttttttttgagacagagtcttgctctgtcacccagcctagagtgcagtggtgcgatcttggctcaatgaaacctctgcctcccgggttcaagggattctcctgcctcagcctcccgagtagctgggactacaggcctgtgccactacgccaggttaatttttgtatttttagtagagacagttttgccatgttggccaggctggtctcaaactcctggcctcaagtgatccacccgccttggcctcccaaagtgctgggattgcaggcatgagccaccatgccaggctaccattaactttttacacttgaaaaaaaattccaaaaattaagatctgagtaaagaaatgtctttgacagggaagagaacatacgcagcttttgtactggttgactgaaatataacaacatcaatgaggccagaatcaataatatcaatgttataaggttgatgagcaaattctatatccataaaaaactgagggccaggctcggtggctcacgcctgtaatcccagcattttgggaagctgaggtgggcagatcatgaggtcagaagttcgagaccagcctggccaacacagtgaaacccccatctctactaaaaatacaaaaagttagctgggcatggtggcgtgtgcctgtagtcccagctactcgggaggctgaagcaggagaatcgcttgaacctagaaggcggaggttgtggtgagctgagatcgcaacactgcactccagtctgggcaacagagcagactctgtctaaaaaataaaaataaaaaaactgaatttgcaacttttaagtgaacagttttctacaggaaatattctaaacaagtacagtttcctacaatgagctttacagcaatcgaagttttcgtatttcacagagatttcaatacactttttaaaaagtagtttgtcatagtagatcttgctgtaaacaacctagtcaggaactcaatttcatgggaaaatagtgaattggttgacatttaaatttaaatcattatccttcctaactaatgttctctatatcgtatggcttgacatatagatgttctttgctcttttctattacaaaaagaaaagataagtagctgggcactttaccttaacaaagtacttgtgtcaatacatttttctcttaaagtttcttgttaggtaccactataatttgtgagttatttttattttttttttgagacgagtctcgctctgtcatccaggctggagtgcagtggtgcatctcggctcactgcaagctccgcctcccgggttcacgccattctcctgcctcagcctcccacacagctgggactacaggcgcccgccaccacacctggctaattttttgtatttttttagtagagacggggtttcaccgtgttagccaggatggtctgatctcctgaccttgtgatccacccgcctcggcctcccaaagtgctgggattacaggcgtgagccaccgtgcccagcctatgacttaattttttttttttaatttactaagtctgaattaaagaagttggggcttctaattttctgtatctataccagtctctagttgaaactacacaagggaaatgattatctcttccttttgaaaatattcaagatactttaatatgttgaagatatttgagtatctccacccttctaactatgtcattcttcattccttatggcacattccttgttaatcaactagagggtcagattcccaagcctaactattgatttgtttcacctacataatttaagatcatttcctcatattaatcatcttcaggcataaacatgactcaataaccatttcataaaattatttctttagaaatgattatcttgtatagtttaagcaacctcagagcatataccatttcttcacattttccatctcgtaaaacctgcctactttttcatattcttttaaagtgtaatgtccatggcacaaccattctctctctgaccagtggctaccagaaatgtggcagaaagaaagatcatgatcctcgttagacttaaaggtcagggaggtaaacctcccaaacatctatgtaacccacactaaaacctattctatatgtgtaatccaggaaaatttttaaacattttctaaacttttatttttgacctgtttcacttcttgggattgtaactgtctgacgtgttcttcctgcctgtcatacagacaaaaccaattccctgagatcatggtatattgcagtaaagaaagagatgaattaacacaaggccagtcacgtggaagaactggagttatcactcaactcagtctccccaagaacacaggggctagggtttttatagatcatttggtaggaagggagctagggaatgggtactactgattggttggggatgggggtgtgggaaatgttcctcatgtgctgtgtccacctctagttgggggccacaggaccagttgagtcatgagtcacaggtccaggtagagtcagtcagttgccaaatgcaaaaatctgaaaaacatctcagaagaccaatcttacattctacaatagtgatgttacctataggagcaattagggaagtcacaaatcttgtgacctctggccacctgactcctgagcagtaatgaattataagaactatgcctatattttagcagagttcaggtccctctcctaatcctaatcttttggcctttcattagctttcaggccctgagcaaggagggagctagttttaggaagagactgttattatccttgctccaaagttaaattataaactaaattcctttcatggttagcttggcctacacccaggaatgagcaaagccggcccacctgtgaggctggaagcaagatgaagtcagtcacgttagatttctttcactctcagaatctttgcaaaggtggtttcaggatagtgagtgcatttctctaacaaaacaccattgattttcatgttagaaataacatatagctaaaattggaaaaaagaagtaataaacttaaataatcagaaggcagaggtcccttcttttggaaggagttgggctaattaatcatgcagtcatacctccttgagtgggtgtggccaataagctaagtcattgtggctatgtgaggagggccaattattccttatctggagctcaagctttcctcacagaaagagaagggcataaagggcctcatggcaaagaagaaggaagtcatgtgggaaacacagaatatgagtggagagtatcgtagtggtcatcaagtaagaagagccgtttatcctggagctaaaaaagactgacagatatagaatagtgtagaacaagatggcctgctctatgggagagccacaatcacaccaggactagacagtagcaggctgatgtatatctcaaacactggagacaattcagaaactgcataaacagtctgaagacttactaagaaactaaaatgaggctgggcgcggtggctcaggcctgtaatccctgcatttagggaggcctaggcgggtggaccacctgaggtccggagttggagaccagcctggactacatgataaaaccccatctctactaaaaatacaaaaaattagccaggcatggtggcgggcacatgtaatcccagctcctcaggaggctgaggcaggagaatcacatgaaccagggaggcggggttgcagtgagccaagatcgtgccactgcattccagcctggacaacaaaagcaaaattccctctcaaaaaaaaaaaaaaaaaaaaaaaagaaagaaagaaagaaaaaagaaactaaaataagacagaaatagaagtaattcacacacagaaatcatctcaccttctttaaaatgctcctcaaggaggcctactttaacgatcctagtaaagatggtatgactcgtatgacccccacccccacattcccaatctttcttatcctgctttatttttttgtatacttatcgtttattataattaattaaataattaagtttcttgtttattgtctctctccctccatgaagtcggggatttttgtcctgtcttcaccaatggatacataacaaatctaaactgtccccggaacaaagagagtctcaataaatacttatcaaatgaatgagtgagctaaacactactaagagtgttaccacaaggggaaatttctgctctaattaattctctaccaagttaaacagtgcatctttaacttgtcctaagcttactccaggtttcaaggctgctccttgtactaatataccaactgtctcagtctgttggtatagatacttgggcagttataacagaaactccatagactgggtggattcaataagcatttaagctgggtgcagtggtactcacctatagtcccagctactcgggaggctgagggaggagtactgcttgagcccatgagtataaggccagcctgggcaatatggcaagaccccgtccctaaaaaacattatttcatttctaaaaaccaagcatttatttctcatagttctggtgggtagagcgtccaagatcaaggcaactgcaaattcagtgtgtggtgggactcactttctagttaatagacttcaatcttttctttgtgtcctcacctcagagaaaagcagtgagggagctcttgcgggtctcttttctaagggaactagtcccattcacaaggggtctttgagaagtaattagatactataaattttcaacatataaatttggaaggattcaaacattcagtccattgtacaaacactgaatttgataagcacatctgcttaaatgatatcacatgtgttgatttcatgtgcttttccacctttgtttctaaattccgttaacccatctctgaattcattcaaccaagactctctcccagacaactctagtccaaaataatgtctgtctttgaaactcacatttcctgactatactattttaaaaataaactgggaggagccaagatggccgaataggaacagctccagtctacagctcccagcgtgagcgacgcagaagacgggtgatttctgcatttccatctgaggtaccaggttcatcccactagggagtgccagacagtgggcgcaggtcagtgggtgcgcgcaccgtgcacgagccgaagcagggtgaggcattgcctcactcgggaagtgcaaggggtcagggagttccctttcctagtcaaagaaa

SEQ ID NO: 8887 - DNA, 138910 bp, Homo sapiens
aatcaagctcatttttagcacacttggttgcgttagttgtacttttcaattttcaatattatacaaggcatatattattcaaccttttcctgaacaagataatactaatatactgcttacggacagttaagtaatatatttcacactatttggtgacttttttttttaacctatgagacttactgaaatcagtacattatggtcacataatttaaagcttggctggcttttttttttttctttgctgataattcaaattctgtactttggcaagcaaaagaggtacaacatcaccttggagttttacaatttaataatgcatactttaaaattcatgataaatcatggaaccccactatactcactaattcaactattgatttctttttgagcaactgactttatgatttatccttaaaagtaaggaagtataccagaaggcaaaaggataaatccacccataaatactagagtctaagttattttcctgaaaaggtgaaaagggaatttctggtctttatcttttcccttatcaccttcaatcacacactttacactgaaattacttgtctctgtctcttcaacaatatactctgaaactttgtttaatatactttttgtctatttctgcatatgggagaccaatcttggattcccaccaaaaatggcctggttaccaaaatacttcttcattcagtagtttggtgtaagtgtttgggtgtatgtgtctatatgtgcattttaactccaaagaatgctaccttcagaaataaccaagatgcagtatgtatataataattcattgggccctttaagtctttgactcaaaaaaatctcccagaagctcctgcatagcccactactcatgaagaaccgctgggtatggagcacacctcacctgatggacagttgatttatgctcaccttaaacgctaattgagaagcagcacaaaagaggaactggaaaaaaactgaattttactcctcatctccgaagatgtgaatatttctaaaatttcagcttgcctcttgcttcttattggcaagtttccttggcttgtaaattttggacagcactatcaaggagctccatggactctctgagagtgacattgactttaaatgacttgggtttaatggttagaccataactgaaattcattttcgcaggctcatttgggttggccctgaaatcgcactggtgagccaggatggagatgaagagaaaaagctgcatcttagaaagttcttcgccaatgcaccgccttttgcccactgaaaaaatcatcactctgctggtcaggtccttgttgatgaggccatccttgtccaagaatcgagctggatcaaagttctccgggttaggccacttcactgggtcatgattcacagaccactggttgacaaaaaccacagtgtccttgggaatgtggtagcccaagacagaggtgttggcagtggtggcatgaggaatagtgacaggcacaaagctggagaagcgcatggcttcataaaggaaggccaggacatagggcaggttgggctggtcacccatacaaggcagacggtccctccccacgacctgatccaattctgcctgcactcgagtctgcacatcaggatacctgtttggtgtttaatgtggagagagaaaagcaagtgagcaaaattcttatttcatctagaaagcacattataatttattttaattccactttttcttaaataggctatctagctcagtgactaaattaatatttctgggaaaaaaaatctaaaacagcttcctaatttctcactaaattacaagatggactttaagaattatatttcctgtaataggccttgcatgactaatgctgtctttcccattataagtcaaaaaactcttaagttttcccagcctcaaaaagcacaatagtagataaggctgacttttccattgggtaccgcagggacagtgcctagggctcacaacactttttaggggcccatgaaaatatttttacgtcttttacaatcttcagacctaaaaaaactcacttttaggtagaagaaaatattttcatacatcattttaatgcattcatctttatatcagggtagtcatgaaatttaatttttaatttttttatagtataaggaatctacaaaggcaaaagcacccagggcccacgaaagttacaatgtgaaagtaaattttttttctccctcatttccctggacaattccaacagacatgctgttctcattttatacaaagataattggtgtcctgatggataaagctacatactgtattttttaaatttgaaagcaaatacccaatgttcataaaattatggtacaaactgtagtacttattcactgttgatgatacaaactgatacaatctttttaaaaaacaaaatcttaatacgaggcaagagacatgaaggtaacctcttcccgcctcattttaaacccagtaatccatgcctagaaatgtattttcagaaaataatttaagagatacaaaaatatgtaaccacaacaggacctaaaattctaaaaattagccaggcatggtggtacacgcctgtagccccagctacctgccagacagcggcgggagaactgcttgagcccaggagtttgggaccagcctgggtaaggtagtgagaccctgtctctaaggtaagtaaatatataaaattaaaataaaaattttaaaaatgcaatcaaggccaatgaccaacattaaagttcaataaatgattatatataactatacattatcatagcaaaatactatatagccatcaaaaattaccaaaataaatattaaaagattagaaatgtccactaccttgagtcaaagtgttagaagtcaaaaaacaagtaactgattgtttgcaactccgaaaaaaaatgtatacacgtatgtgatgaagtggagttatttttagaatcgcttcttcaacattatattgcaggagtctgccaacttttttcatagaaacatgtatggtggggagagccagagagtatctattttagactttgtggaccaaaccctctttgttgcactactctgctctgccttgtgttgtagagtgaacgcagccatcgacaatgtataaatgaatgggcatgactgcgtcaataaaacgtatatacaaaaacagatcgtgtaatttgccaagccctgtcatacgtcttttcactaaaaaggaaaaaaaagtatcagcatattgaattgaaagtgacctccaaattgttttatttctttttgccgcctaattggagtactcggagaactattgtggttctaatgaaaaacaaaggccgtttcaaaagttaaaatgcctatctgcggatgcacaaaaacctatggaacctattccgggatttccttttccctgatctctggttgacttttctttattcgatttctgcctctccctcacccaccatgggtgtttctatgattttaatactaaaaagccattttaagtatacagaaacttttaatttgtgaaggtagctgtacagtatctaaggaaatatagattgcagtggattttaataaggaaagagtcattctctgccttccaaacacctttctgtggcgcctgcagattcagcatctccaactgctcacttgtgctccaagaaatgacacaaaaccaggatttctggtctcttcggcaatcaaaatttgccttgcgaaacatttgcccctagggatagtgtttccacagtaaatactacaggccgcccagttaaatatggatttcagatcaacaagggctaatcttttagtgtgagtattcccgtgtaaaacttacttttcttttgccaaatctggcaacccgacaccagggacctgttgaatccgtgcttagtagagaccaacgtgggcatcagggggtccgctaactgagccaagcgcaggggccagaaacgtctgcaggcgcctcctggatatcccatctgcctttctgaatgctactctgctttcgtaaaagtgactgcttcttgtcttctaccccggcatttctcaaactcctagcgcggaggttttataaacctagcgctgcccgctagttgtggccgccttctgaaagtttctgtgcgggttacctgtcggctggcccggcctccatgggcttccttggcctggaacaaagccctgacgggcggcccgcttttagcgccagggctgggcggcctcggatgcacgccgaggactagcctaggagaggctgctgtgtttaacatatttatgacattaccttttctttcggaactattccagttctgattgtaatgcgccagggagagagatatcagggctcatctccaagcatttaaaaactcttgtttttccggggggtggaggggtctttgcaaatgtgttctcactcgcaagcaggggaggggacgatagagacaagataggagaccggaggggtcggggcaccgctgggtggggcgcgtgcgcgtgtcgcagccctcactgtgagtccctttaccgacgcgatcttggttttgaggggtggggacctggagcgaaaccccaaacccggggccctgcttgcaaactcagcatattctgtctctactccgcctttttcagaggagaaaagacctggcccacgcctcccagaggctttacctggtgaagaggaggagcagccactgcagcgcggtggacagggtgtcctggctggcgccgaagatgtcagtgatagtggccggtacgttctccaaatccagccgcgcgccaccaccgtgcgagtccccggccgccttcttttccgcagagaggataaaggcgtccatcatgtcgcggggggcggccccgggccgaaggctttcgcagtgcctcaagaacttgtccaggatgaagttgctgaagttgcggttgagctgctcgaattcgcggaaaacggtgcgcaccgggttggggaagtactgcagccagggcatcacgtccaccaggctgcccgcgcccaccgtgcgcccgaactcttcgttgtggctgagcagctcacggaactcggggtcgtcgtggctgtagcggcagccgaaacacacggcactcatgacgttggccacggccacgacggtcagcggcctcgggtcgaggaaggcgccgtccgcgctgccgcgcaccagcagcgccaccagctcgcgcgcctcgctcagcacgtggccctcgaggacttggcggctgcgcggctggcgcgtgaagaagttgcgcatcatgctgtgggctgcgcgccgctgcaccttccagtgctccgagtagtggccgaaagccatgctgcggccgccggacaccacacggaaggaggcgaaggccggccggtcggcgaaggccgagccctgctgcaccagggcctggtggatggcgcgctcgccattcagcaccactatggggcagctgcccaggcggatctggaaaacgtcgccgtagcgccgcgccaggcgagcgaacgagaggtgagccgcctggcccaccgccgccgcgtttccgatcagtggccacgcaaacgggcccgggggcgcggaccggagctgccgcctccgttgcctcagcagccgctggcccacatgcacagtggccagcaccgacaggagtagcaggagcgtggtctgctggatggacagcgggtttagcggccaagggtcgttcgggctgaggctggtgcccatgctggggacagagaggagaaggcgtgacactcaggggtgcagagacaggagcgggcgccccacgcccctaccccagcctctggggactgagtgccgttgggtggagaggtcggagctgactctctggagaaatggccgaagacgccccttcccatccccaacccactctcccttggagaagagaaggggcgtgtttccacctcgctgtaacccagcgccaaacccttcccctccccgcaaggcgcgtaacggttcctgcaatctggggacaacgctgcgggcatcgaggcggtggcgcttgatttcctttaaagtacctaccacgccacccgctacctgtaataatccatctgaagaggtcgccgggcagcgcctcggcagacagactgacctgcggggaggtgcggtttccagtggcgcgggacagccggctccgagaaggaactgggacctttgcctagggcaagacgtcaacaggaacccgcaggcccggcctggacacctgctgccctcactggaagctttaactcccactcgagtctcttggcgtcgtcagtgccaggagcgcttggattgggatggggacggagaagggtgcctcgctcgccgagccccgctgcccttggggacctggcaaagtcgaggtttcctcacagcgttgagattgagactgggggtcggtgagtggcgtcaattcccatgcccttgcggctctcacaactggagtcgcagaagcgctcgctcccactcccactccagagtcaaagcgcgccatcccgctcctccgggttttaaggactgggtagaaggagggcagcgcgacctggcagggcggggcctgcggggggcggggcgcgccgcacaccaggccgctttgacccggactcccgtccaggcgcaccggccggcctcggagctctaccagcaggctttcatgggagcggaggtgcccacgtttccattgtgcggtaaccgcgcttcatcacagccacctccaatcraggccgcacggtgtccccagaaccacgctcggtacaacctgccccggccgctgckctcgacttgggagcgcgccycgccccgagcgcacgacctcccttccctctccgcgrcttgagcttgcttcccggaaagccagtgtagtggcagcggtttgcctcacagcgcccctggttggttgtttaaattttatcttaggttctcgcaaacaaattgccacctcagtggaggctctttggcatgctaaattttttccagttcttgcggcgagatcaggaatccctaaaagtagccgctcccccgccccggggccccgacagtgcttgggcacacaaaggctcctggggcgcagctggccctgagatttcccgcgtagaggccactccaggtggcgccgcccgctggtgggcgcggggccgcccaggctgcgatggaagccgttggcgcagggcggggagccaagctggggcgactgggggggcctgggggagctagcggggcgggacccgagcggggcggagagtggcaggaggaggcgaatctccgcgcyccggcgaactttatcgggttgaagtttctsstgtcgcctcccctttgcgtgcggagctgggctttgcgtgcgccgcttctggaaagtcggctccagtcatatccctgggcgctgcctgcggccgctcctcccgcgcttctcacggcacctgacacgcggaggcggcggccgagggtggggtgccggccaccaccacccttggcgtggggtgccggccgccaccaccctcggctgcgcacgcacagtcgcgcctgccaggccagcgaggcggacgcttgggccaccacccgcaggccgagcccgggcgcgtatcgccacctcsstgcgcaccggcggctctgtggtcttcctgggcgcgcttgcggtcgcgaagggggccctccctttataagggaagccggaggcgctygggcgggggtggcttcccccgcctggcgcgccctttcctacatgctgatgcataggattttcaagacagctaagagaacaaggacttcacgaggcggggggaagggcgaactcgagggaagaggtgggatgtatctggttaaccaggtaggaattgtactggcttcatcaaaggataaatataaaagtgataggttcaccagggacaaccctgcactttgagctccactcgcgctgcgaatctcgtgctattattgacctgtttacagatgaataaactagggttcagagaggttgcgtgacttaacccaggtcgcgcagccatcaagaagtggagccagggcttgaagccaccaagtcccactccagatccttcacataagtttacacggaagaaaattgcagataagaggcccaaatgccttctttcctgcctcccttaaaaaaaaaaatgcacgtggggctaggcgcagtggctcacgcctgtaatcccagcactttgggaggcttaagcgggcggatcacttgaggtcaggagttcgagaccagcctggccaacatggcgaaaccccatctactaaaaatacaaaagttagccggacgtggtggtgcacacctgtaatcccagctactcggggatcaggggggaaggcagcagaattggttgaacgtgggaggcagaggttgcagtgagcagagattgcaccactgcactacagcctgggcagcagagtttaagtgagactctgtctcaaaaaaaaaaaaaaaaaaaaaatcagctggaagaactttttaattattgtttttgttttcataattgagaattctgagaatagcagagaagaaatagtatgctaaccctttgcaattaaattgcttatgagggaggccaggggagtgtgcctcatagctgaccctggaatgactgattacattgtaaagaaacacaaaggagtgtctgaaragaatctgacttcttgagagattgaaaccagcaatcaatttgctgacctgataaaraaatgtcttttcgtgatggctttttttatttttatttttatttatttattttttttgagatggagtctcactctgtcacctgggctgcagtgcaatggcgtgatctcggctcactgcaacctccgcctgccaggttctcctggctcagcctcccaagtagctgggattacaggtgcgcaccaccacacccggctaatttttgtatttttctagtagagatggggtttcaccatgctggccaggctggtctcaaactcctgacctcaggtgatccaccagcctgggcctcccaaagtgctgggattacaggcatgagccaccgtgcccggcctgtgatgccttttattcggtatcttttgaagagttttctggaaatgatttcacacaccatgatggggaacttagatagtgatggagttttagtttttgagcagttgcattggtttaataataagcgttggtttcccagaggtgagttggcctacacagcctttgaaatgagtttcatagcaaccttcccatgtccagctttagcaagatccttgcctaataattcaagactctggtgcatgcatcaatctctcatagactttaatttagtagacgggaattatctatgagctaatgccaatcctgagctgttgacattcctgaaagcctttatcacaatacctctgccagaatgagagcagatggaagttgcctttaagtaaattcctatttttaaaaagtataaaacgaggttgttcctaagaccgcctgtccaactcctcaataatgccatctagtttttagatcaactagatgcatgctttcctgccatcgcagatagatcagatatatcctccaagctgtagttccttgggctcagctctttttctaggacatgactcaaaaatcagaggaastaggttggtaagtgctgtcagaaagataagcccttatcrgttatggcaaaccaaaatgactggctatggtaacactttttgcagagaatcttcaagcctggagttcttagggctttatggtgcaaacttcattgaatgccccatccggtaccctgataaggacttcggataaatccagagcagcctgttggcaccccgacccaactcaaggcagagccctgcctctagtgagaatctacgcaggctctttaattatcatcacaacttctcaaccaaagcagggacctaaggcccaggaatctcctttcaatcaacacagaatatgggcattctgccctcccaaatctcaaacttgaattgtttgttgcaaataactttcaaaaagaacagctaagctagagggatagtttaaagtagagagaggtttaaaatatcttatmttgtattgactcgaaggaacaacttaagcttgtttaagcagaacaggaatgcactggcccatgtgcagagaaggataaccgtgatgcttcacaggatacaaggacccaggccgctctaccggctctctgcctatgctggtctttgcttgggctttctctctttgcatggcaaggaagcagcttaaaattaacaaaacaaagagaaagagaacagctctcttccagggtcctagaaggactccagggggccaggctggcatcaggtttttaccctgtgggcaagggcttgttctgtcatcagaaaaaaagagatggcagaacatgctaggaagccaaagagctgacccagtccactccatgtatacatgtctgcccactggtttctttgggttggaggataacctaaggaaacccaaagccattattgttattattattttaaatcagcagatayatgcattgcccttagagccagtagcccagaaagctctgcccttctgctgtcaggctggaactcagttttcttcatggtcttcctctctagtgtgacccctaagtcagtttaatgggtagccactgtgcttttccagtcatctccaaacacacatacccacatgcactgaggagagtggaggagaataagccatctctggyaggctcttgacatttgggtgggcaggattcagtcatcaggcacatgctggtaggcaagaggagcagaaataaggagacacaccaagtggctgagggtgcgatagagggaggaactgtaggataatgcacaccaggggctggaccatgaaaggaatcttaggaattgataccaaaaccctgtgcctcacctgaaatgctccacttccttcctcctggcaatacacaggcagagaaccacagagctaatagaaaggtattttatctaatctcagaagccatcatttgtaggatgcacccttatttttatgtactaacataaagaaaggaagctaccaattataattgcatcatcgactctaagatacatccagatttcggagatgtaaaatggaaagttgagggtatgatttggagctgacaaagcattatacatttcatgcgcgtccgtgtgaagagaccaccaaacaggctttgtgtgagcaataaagcttttaatcacctgggtgcaggtgggctgagtctgaaaagaaagtcagccaagggagacaggggtggggcggttttataggatttgggaaggtaaaggaaaaaggggggttgttctctggcgggcaggagtgggggtcacaaggtactcaatgggggagcttttgagccaggatgagccaggagaaggaatttcacaagaaaatgtcatcagttaaggcaggaacaggccattttcacttcttttgtggtggaatgtcatcagttaaggcaggaaccggcgatctggatgtgtacgtgcaggtcacaggggatatgatggctttgcttgggctcagagggctgacattcctgtcttcttatattaataagaaaaataaaactaaatagtggtaaagttttgggacagcgaaaatttttgggggtggtatggagagataatgggcgatgtttctcagggctgcttcagcgggattaggggcggtgtgggaacctagagtgggagagattaagctgaaggaagattttgtggtaaggggtgatattgtggggttgttagaaggaacatttgtcatttagaattattggtgatggcctggatacagttttgtatgaattgaaaaactaaatggaataagagaaggagaaaaacaggtataaaaggtctaagaattgggacaactcaggacatctgattagagagtgcctaaggagattcagcacagtcctgccagcaaagattatttatttacttcaagagttaagagtggcagtttggggatagcaccaggagatatcagctgtgatggcttggagaaacagcgtaaaccggcagtgtaaataagagcagggcgtgtatgastrgttgagaacggtgaataggagtatgactagacagaagataatagggatgataagtttttttggggcacagtctaagttggtctggtgtctggaatgagactggggcctaataaaaaggagcgtctatacaggagctcaaatgggctgtaccttgtagcattctgaggacaggtctgacttctgagaaaggaaagtcgtaaaagtattgtccagtcctttttaagttggtrgctgagcttggtgaggtgtgtttttaaaagacctttagtccgttctacttttcctgaagacggaggaccataagggatataaagrtttcactgaatactaagagcctgaaaawctgcttggctgatttgactaataaaggctggtctgttatcagactgtatagaggtgggaaggctaaactgaggaattatgtctgacagaagggaagaaatgactgcggtggccttctcagaccctataggaaaggcctctacctatccagtgaaagtgtctatttagactaagaggtattttagtttcctgacttgggacatgttgagtaaagctaatttgccagtcctgggtgggggcaaatcctcaagcttgatgtgtagggaaggaaggggcctgaataatccctgaggagtagtagaatagcagatggaacactgagaagttatttccttgaggatagatttccatgatagaaaggaaatgagaggttctaagaggcgggctagtggcttgtactatagcatagcctgcctttgctggtgtgtggcgattaggcctggtggaactgccrtcaataaatcaagcgtgatcagggtgaggaacaggaaagaaggaaatatggggaaatggggtgaatgtcaggtggatcagagagatacagtcatgggggtcaggtgtggtatcaggaataatgtgggaggccggattgaagtccgggccaggaacaatagtaattgtgggacttaacaaagactgagtacagctgaaggagcyggggagcagaaagtatatgcgtcaggtrtgaggaagaaaatagattttggaagttatgagaaatgtagagagtgagttgagcatagtttgtgatttttagggcctctaaaagtattagggcggcagcagccgctgcatgsagacatgagggctaggctaaaacagtaaggtcaagttgtttgcataggaaggctacagggtgcggtcctggctcttgtgtaagaattctgaccgcactaaccatgcctaggaaggaaaggcgttgttgttttgtaagggattgaggtttgggagattaatcggacacgatcagcagggaragcacgtgtgtttttatgagaattatgctgagataggtaacagatgaggatgaaatttgggcttgactgaagtaatgggggctgtctgtgaagccttgcggcagtacagcccaggtaatttgctgagcctaatgggtgtcagggtcagtccaagtgaaagcaaagagaggctgggatgaagggtgcaaaggaatagtaaagaaagcatgtttgagatccaraacagaataatggattgtggagggaggtattgaggataggagagtatatgggtttggcaccatggggtggataggcaaaacaatttggttgataaggcatagatcctgaactaacttgtaaggcttgcytggttttaggacaggtaaaatgggggaatggtaaggagagtttataggctttaaaaggccatgctgtagcaggcaagtgataacaggctttaaccctttcaaagcatgctgtgggatgggatattggcattaatcggggtaaaggtggttaggttttaatgagatggtaagggatgcatgatcggtcaccaaggagggagtagaggtatcttatatttgtgggttaaggtgggggaatataagaggaggacgcaaaggaggctttggactgggaagaagggcagcaatgagatgtagctgtaatccaggaatagtcagggaagcagataatttagttaaagtggctcgccctaataagggaactgggcaggtgtggataactaaaatgagtgcttaaaagagtattgtctaagttgccaccagagttggggagttttaagaggtttagaagcctggctgtcaatacccacaacagttatggaggcaagggaaacaggcccttgaaaagaaggtaatgtagagtgggtagcctccgtattgattaagaaggggacggacttactttccactgtgagagttacgygaagctcggcgtctgtgatggtctagggggcttccaaggcagtcgggcagcatcagtcttcagccgctaagccaagaagatctgggaagcagtcagagagccttgggccagagttccaggggctctgggagtggctgccaggtgagttggacagtccgatttccagtggggtcccacacagatgggacayggcttaggaggaatcctgggctgcaggcattccttggcctggtggccagatttctagcacttgtagcaagctcctaggggaggaggttctggaggaacgcctggccgctgcrgttcaggcgtttggaagttcttgtgtgctggagatgtggctggggtttgtctcacagtggaggcaaggaattgcaacttttttctattattgtacaccttgaaggcgaggttaattaaatcctgttgtggggtttgagtgccagattctaatttttggagttttatttaatgtcgggagcagattgggtaataaaatgtatattgagaataagacggccttttgaccttttagggtctagggctgtaaagcgtctcagggctgctgccaaaggagtcacgaactgggctgggtttttatgtttgatgaaaacgctatctgatttgggataaagaaaaaggagcattaaccttgactgtgcctttagctccagccacctttttaagagtcaattgctgggcaggtgggggagggctagtcacgaaacgaaactgtaaggcagaccaggtgtgaggaggggaggtgataaaaggattatagggtggaggagcggaggctgaggaagaattgggacctagckgggcctggcgaggagcagcctggggaggtggggagaggtcagatgggtccgtagaaaaggaagattagaaagcctcagcgacgcttggggttgggactgaggggacaggtgggagggaaagaaggaagatttgggatgagttgcattgggaacagagactagagagggaccgatgtgtaaaagaatgcctggatgtcaggcacctcagaccatttgcccattttacaacaagaattatttagatcttgtaggatggaaaaattgaaagtgccgttttccggctatttggaactactgttgagtttgtattggggtcaagcggcattgcagaagaaaataagatgcttagattttaatttaggtgagagttgaagaggttttaagtttttgaggacacaggctaagggagaagaaggaggaatggagggtggaaagttgcccatagtgaaggaagcaagcctagagaaaagagagagtagagacatggagggaaggggtttgggggttcttaccttccagaaaagcgggaaaggggttggggcacggagaagaggttggggcacggaaataagggatgggggcacagagatwagaggttggggtgtggaaataagggattggggcacagagatataagaggttggggcgcggaaataagagattgggcgcagagataagaggtcggggcacggaaataagggattggggtgcagagatacgaggttggggtacttgcccctcctctagaaaagcaggacttgccgctcagggtgaaggagaaggggttggggatttcttgccccccagaaaggaggagaaggggtagagacacggagagaaggggttggggtacttgccccttccccagaaaagcaggacttgccgctaagggtgaaggaccaaggcaggcgtccctgcatggtctgacacctctgaaacctgggtgaataatcattgcagtccctgcaatgattaaacaccaagggaaggctgccttcccagtccctgaccggcgccggagttttgggtccacggataaaacgtgtctcctttgtctctaccagaaaatgaaaggaattgaaattgagagaagggagagattgaagagtggaaaggagaaagtggttgaaggacagtgagagaggttggagaagagagtaagaagaggccgcttacccgatttaaaattggtgagatgttccttgggctggtcggtctgaggacctgaggtcgtaggtggatctttctcatggagcaaagaacaggaggacaggggattgccctcccaagggaggtcccccgatccgactcatggcaccaaatttcatgcatgtccgtgtgaagagaccatcaaacaggctttgtgtgagcaataaagcttttaatcacstgggtgcaggcgggctgagtccaaaaagagagtcagccaagggagacaggtggggccgttttatatgatttgggtaggtaaaggaaaaaggggggttgttctctggcaggcaggagtgggagtcacaaggtactcagtgggggagcttttgagccaggatgagccaggagaaggaatttcacaagacaatgtcatcagttaaggcaggaacaggccattttcacttsttttgtggtggaatgtcatcagttaaggcaggaaccggcgatctggatgtgtrcgtgcaggtcacaggggatatgatggcttwgcttgggctcaggggcctaacaatacaggctgacaaggattctttctttgtattaagcactttytagatttcttggagtggttagcaccawgggtattggctaccaatcctcatttctattaatattatttcatgtagacaaatgtagacaattgatgttttctcaatcctatgtaaagttggtgagaaggtgatttagaagattctgctatttttattgacctaaattaatctaagaaaagatagtcacttgctaagtagttgcagcttaaaacaagtttcctactcctgctccccttccaatctcrttgcccatgagctctgtctggtattagtgaaagtgacagaaatacatgtagtgaaagctacatgtattctagttcctcaccaaaatgcatatttagaggtaaaggggtgtaatgtctgccacttaccctcaaatggctcaaggaaaaaatagaggggtttggggagaaggagagggagagagaggagaatgagaaagtaagtgtggtcaatgttaattggagaatctgggtaaatgggagttctttgtgattccttgaaactcttctgtaattatatcaaaattaaaagttaaatataagaacataaaaaaagatcttcccaacattttgatcttacattgccttcttagcttctcttgagggtttcttgtaagcaaggacagtggaaagaaagtgggattagtctgctgttcagggtcctgcatctgatgtgtcactcctggagttcaggactaataaaaagtttgtgctcaattgcagtctttctcctcagcactatggattataacctgtactttctgtgccgtccttgttctttgaatggcttgagtgtrtcttgtctcttttatcttaggstttcttcaattccttttgaaagcagaagaaatatgatataaggcagtgtcatgcccttagttctactgtgcccctgtgttaaggggcataatctactcagggttctatgtgcttcataaatgcagcaaatggtgctgtgctttaatggtttttcccagcatcattcccagttctttcctttggtttgcttccttctgcccttttccttccccttgcttcatccttctttcttctctctcattctgtctctcattttccctttctctgggtccactcctatcttcctcaccctcattccctcaagacctccactctcgtctcaggtgcccccttttctgttctgctgtctcccttcctctcttcattctctctcacacagaagagtaaagagtcagggcagaggggaaaagagtgagggaaataagaagggggagcagagagatacagcaactaagaaaaagaaaaagaaaaaaatacccagccctggggctaaaagatagtcayggtggtcagtcactttgtctgggctctcaactggtgtacttacctctcctgctcaacgtttgagcatgtgcctctgctgcttaatatttgtggggtgaagctcccaccgacttggcacagtgatgattccatacgaagggaagggacgccagggtctgtggttgtttttgtacgtttgttctctgagcttctactaccacctactctacttcctgaaatagacttttctctcctccttttccttctccttcttctttctttttttttcagagtcttgctctgttgcccaggctggagtgcagtggcaccatctcgactcactgtagcctccacctgccatgttcaagcgattcacctgcctcagcctccccagtagctgggactacaggggtgcaccaccatgcctggctaatttttgtatttttagtaaaggcagggtttcaccatgttggccaggctggtctcaaactcctgacatcaggtgatccacctgcctcggcctcccaaagtgctgggattacaaccatgagccactgcgcccagcctgaaatcaacttttctaacagtgaaagagggagcctactgtccacaactttggtcaatagggaaacactttacttccctaattctttgaccaaccatagaaaacctttaggcagatraaggatactagttttcctttttattttcattttctaaaaataaatatttaccaggttaccaagaaaatacataaagcaacaagtaaaacaccccaccaccaaaagaatgtacatttgggctcagctaagatcacaacatctagccatggacatgttgactggtacagcctccaggtttttggatggttagcatccagattctagtctttctttctctstctgtctgtctgtctgtctgtctgtctgtctgtctgtctstctctctctctctctctctctctctctcycyctctctccctctctctctctctccctctctctctctccattcacctcttagtttttagcattagatctgcattccctcacaggtttttttctctttccacaaatggaccaaaattccggttgaaaactctgggtgtatccagggtttgagaaaataattgatagttaaataacttaagtggttagtcctcccctgcatgatcccaacggagaacacaaaggctggatagttatacgtcagcttttttgaccattgactcccaacaggatttttcccttctactattgaagtgatcatttctcaactgttgtctgttctattgttggactgctttggttagaaagctgtagatgctagaaggttcttcccaatattaagaaaaattctggagtgaactttcttgccttctggtaaatctagagctattctttggagtgacataaagcaagactcattctcctttgctgtcacatgtttgaagatggaattgtgctgcttctgagccatccttccaccaattaaaaatgccccagttccttatctctgccttctggamaatgtgctttttcagtatgtccatctgagtatgggcctgaaactgaacatagtatcccaaatatgacattctgtctagcccaggggggtgtggttacttcccattagacatagtgttactttcaatgcaaacaaagtttttgccctgttttaatatatttgcatcccactattaaaacatctatattctactaagattgtgataagcaaaaatcttcatcctttaatataggacttggtagctggctgagtcttcagttgtacttgtattattgatttttcaaaaaaatactacatgtgagattttacatttatttctattaaatgcatcttgtggctttaggatggtgttctggcctacagaggccatgttgatactcccaggagcacagactaggacaggacaggaagactatccagggaaagcatggcccagtctggactacttctaggcaaaaatctttggactgcggtttatgttatatagttgcatcattatacatccagaatattatgcatattaaattatttttctattttggccagatatttattcttaaaacacacacacgtagtaacatagattcttgttgcaagagagtcaatcagtatataaaaatatgcagaaaaatgagaataaaatgagaaaactcacactcccaccccttcccagagtaaccatgggtaccatgtgccttctatttatgtacatgcatacggttgtacatatagakagatagatagatctacttcatgattttaaactactgcatggtatgaccatgacattattattgtcattactattattattgagacagggtcttgctctgtcacccaggctggaatgcagtggtgtgatcttggctcactgcaacctccacctcccaggctcaagcaatcctcctgcctcaggcttccaagtagctgggaccacaggctcgtggcagcatgcctggctaatttttgagtattttttagaggtggggttttgctatgttgtccaggcttgtctcgaactcctggactcaagccatcttcccacctcagcctccaaagtgctgggattataggcgtgagccactgcgcctggccaacattattttttcaaccatcaacggcgacttagatggtcatttrtgttgttctcaactctattattagagactccactgcagtgatttcacttttctgtgcaattctgaatccatttgcaaatgttcccccagtatcgattctcaatagaaatgcttgagccatagggatatatgcatatatgctacatcctcactgtcttctaaaaaggtttgccaattcccatctctatgaaccttggctttgtaccaagtagaatgtacctaaatacttttccttctataaaggatggttactttgacttagstttgccaacatggaacaaaacaaacaaaacaaaaattttacttgtctttcagacctatttcttctcttaaagaatacatatgcctgtgttcagattatctcctcttcctgacaaatgagggaaatccccagatgaaagctgataaaacattagacgggsgtrattccggacctccacatccctatggaacacatcacagaagccaggattggagagccaactccacacacctccatatcccctcttagatgaatggcaattctttacaggccgtgggcgcaggcccaaatgccttctgggcttgtctaatcctccagaggatatcaaaggcaatacagccagcatacccaatcattaggagtttggcttctgggaccrggcactcttgggtgtgagcaccagctstcttatttataagctgtaaccttggccatgttatttaacccttctgagcctgactttcctcacttgtacaagacaggtaatataccaaccacagagggtggttttgaggattaaatgagatattgattgtaagaaaacaaatagcatagttgatggcagagtgagcacccaataacagttagccattatcattattactactacttactaagtccttacttctgtccagtaaaatccaagacatggcaaggacttgaacctcrcaggaataaaaacatggcccacttggttcagcgtgacagctctcaggrtggcgtgccgttacccacctgcaaattcctaacagcccaaagtggcaccagtcacttcctccttgcgtttctcaggcagcacattgagtggctgctagcatcactccagagccagactgaatctgaatctggctctcctacttacaccggagtgacttccatgctagaaatcgcttctstgggtccagcttacacttaagtgaatggagatgtaaaatggagacgataccagtaccgattatgcagagttgyggtgaggactgaatgaactaatacatgtaaagcttttagaagggtgcctggcatgtggtgggtgctcaggcatcattagctgttatcattattctgtgggaggccatttgccgctgccttaagaaggctgatctcacagaaacatctgctgttggcagaagagctcagcaccaatagccaatttgtgtttccctccaactcccagatggcagctctgcagcactttctcctcatctaatttctcctcacccagacgcgctccacatcaggacccttaggtagtacagagacagttctttaggcagggggatgccatgttcccaaaagagcctgatgaggccatagtaggcctcttccaccaagctatgctttcggtcagtccctctgtgactgttacggatgctttgtagccctgtggcaatgaggctccaggacaacactcatgcaattccctgctgaggagagttcagaaaactccatgctgtgcagtgcaattgggaggaaactcaagggagtgctgtcgtgggacctcccggtggtgatttgtacaaatgamgcaacgctatccagcttcccagaaaacaccgcctttttttcttacattacagctctgagtcaaagtgtactgtggcctcagacctggggcatacagcycatttgacagccacaatgagggaaacagcctacttctggagcctgtaccagaaggcagaacgggagactcccagctctcccttactaaaggccagggaggaaattgtctcgaatgctctccagtccaaaatggaaagttagattcaatggtctgtactcttgggctgastaacctccgtttttccttttcccattgtgctgagtcagccacggggggtgggttgtgcattttaagggtttgaatgcagaaggaaggaaggcttcccagtttctgagccttgagaaggtggcactgtggcctccaaccagcagccatgcccccaggcacctcattctcctacactatttcagggactttctggtgcaataaggatgtgactgagccctgagcccccaggttaccagccacaccccagtggaatcccgggagctacggggtaaaatggaatcctcttccacagcaagtgcacagaaggcactcagggctggtgggaacctccatttctgccctcatttactctggactctgaacctaatacctgaggcttcctgcagcaaatcagagaggtgaagagcaacttacacgtatctttttttttttttttttttgagacagggtctctctatgttgcccaggctggtcttgaactcctgggttcaagggatcctcctgcctcagcctcctgagtaacacatatcactcaacaaggaataaacaccacaacaattttgagtaccacagtcggagcactgtgtcctgctaaatgtgaggagcattctcctctctgatgttatcatcataaggccagggcctgtggcttaagctcctccrttcccttagagtctcccacaccacacaacaagtttggagacagagaaagtagctaatatttccccctaagtgccaggcactgttttctattttttacattgacagtttcatttatttctcccaatcatcctaaaaatattggtatatttagcctgctttatatacaaagggattaaggctcagagacagtaaactatttgccaaatgtcacagaggttgcaagtgagaggggtcaggatttgaattcaggtctgcaggcaccaaagcccatctataccacaccagtacacatttgttgactcactgcgtatcatcctaagtcttacagaagccccacccctctaactacagtaactgtagaggtctctagtactgttatgcctattagggacctgggccaccccactgccttctcctgccctgtgagctgactccctccaggagcccaagaccacaacaagcaaagccatcttgttgccagagcctgatgcaactcacaccctcttcctcccctccccttgcagaatatccttggtatctgcccagcaatttaatctccacaatttacaatcaaatcttgggatggcttagaaaatcttcctttaacacagtggctggaacatgcagagagttggcatgcagcctccacatgggcttcatgactagatctgctacactcaaacccattatattgaaattaccataaaattcacactattccaatcctcagaaatgatggttttatttagaagtaagtgagcaaaagcaatgatttcataggccccagtgccaaaatcttagctcaatgtttctcaaatgttttgttttcagaacctcttcaaagtcttaaaaaatattgtagagtccaaagaactattgtttagctaagtatctatcaatatttataattctagaaattaaagctgaaaaacttataaaatatttgttagttcattaaaaataataaacctaatacatgttaacataaataacattttatggaaaataactagtttccaaaattacaaatatttagtcagagtgggcagttttaaaaaatattgttacaaatctctttaatttatgacttaacagaagatagcaggtgactcacatctgtttctgcagaaagaccccccagtaaatttgtaagagaatgagagttagaaatgcaaataatgttttattcccacagctgtaaccttgtgggtttcctggaaagggtctcaggggccatcccgacggggtgcctggaccacactttgagaaccattgtctaaacttaagagtgtgttttttgggccgggcgcggtggctcacgcctgtaatcccagcactttgggaggccgaggcgggtggatcacgaggtcaggagatcgagaccatcttggctaacacrgtgaaaccccgtctctactaaaaaatacaaaaaattagcctggtgttgtggcgggcgcctgtaatcccagctactcaggaggctgaggcaggagaatggcgtgaaccccggaggcggagcttgcagtgagccgagagagcgccactgcagtccggcctgggcgaaagagcsagactccgtctcaaaaaaaaaaaaaaagtgtgttttttgtttttgtgtgtgtgtgtgtgtgtgtgtgtgaatgtctcttcatccaagaaaaatctaaatgggctattgtcttggcgtaggaagtaggtgagggtgcggtggatttcagaaaaaataatgtcccagttactgattttaagagaatagccctgagacaagtgtgggcgcattgaaacaccactgcaaccctctaaactattgcagagttgccaccaccaggtgtctggctagaaagatgtcatcttcccaagacagctacctgcccagatgatgtaccttagccccaggaaggaggaggaagaagaggcagrcagaatgatgcccaaacccctgcggcccggagacgaggtrgtgcctgagtcaggaagctgggagagcccagctcagtggaagaggcatgtggatcctggttaggtgtgaagccaggagggcttcttagccacagcctgaaatcgaagcccaggatcgagccacagtctgaawtttttggatcgcagctctgccarttaaaccaatggtaacaataataatgtactgtcatatatgtaagaactgccatatatggagcattttgagccaggcaatgtgccaagcacttgacagaaatcatttcattaatcccacacagccaaccctttgagataaccattgccctcatcccttttttacagacaaataaagcaaggcaggaagagttggaattatcaatcaaggtcacacacactatgttggttgagctgaaatttgaattcagttccgccgggctgcaaaaactctctgctgcttcccagctgcaccagctaggcaaactcctgccagaggaaatctcacagttggagtgcagtaggcatagatttctcctacttaactggggggasgctgtagtcacagcgaagggaatattattgtgtcccatgggaagaaacatgaagacggagtggacgcttcattcctactccaatcagccatctggagggttcagggctgaactgtagtgggggcatcacaaaacttagggaggtgaggagcctcccttagggaggtgacagcctgagtacatggcccccaagctttcagatcccttcctgcacccctccccacctagctctgcacttggcattgttgctactagccaggaagtctgagatctgcgcaaaccccgcccttccccgccgcccccgtaagcactaccgtcccttcaaagttcagacgtggggtcctttggagccctgctccctagagggtcgcctggcacatggccacctccacatcccgccccttctgagctcagcctcccagaggtgtgaacttcttacaaacacacactatcacccaattccctggaaaaacaaacaggacaattgtgtgaaaattccattctaaggcatcctcccttctctgtaaccagaggctccaaggagttcagcatagcacgagcttttaatttgcgtgcagacaagcacaaaaggcacaaccggatatacctgttatttcccaatgacctgagagcccgaagtttatgttaagccttgggttatggcacagcttgcacgcaaggcyctgcagctcctgcaggcaattgagaggtggtggtgtacaggacagaggaacaactctgaagtgacagcacataatttaattccccctaagctttccaagcatgcagactgttccttttttgtcagcgtataacctaagtgatttgttctactcaggcaagaaatgtctaatttaaaccacattgcagctaagcccttagtgaagaaggagaactccttgaggcttagccgtgcgtggttaggctggtggtagctgaggcaaagcagacctctttcagcccctgtatttcttactcaggtcatgactggagatacgtgggttggggggctctaatcaccacactcactcttctgtctcacactkcatccctcgtgaatgggtttagttttagtaagaatgtttacaggagagtgttggctacatgtccccaacatcccgggtttgagtcccatctgagccaccaggagttgggtgacttcagggaaacctcttaaactctaaccattgttttttcttctctgagaaacaggacaaatcggtagtgggggtgcacagattggcacattttcgtggcaagcgatctggcttaggaagcaagagatctgtgctccagcctagctttgttcccaactagcagtggatttgcagcaaggaacttttctctgggcctcaatttcctcatctgtaaaataagcaggctggatgaaatggtctttgaagttccttcagctataaaatactatgtatgtcttaaatcacttggagtttgacaaaataatagttataataattttaattattattgtgatttcttcctacaatcccaaagatttcactagccatgcaaatcttttaaaattcttctttaaaagtacttttcttggccttactgacatgaagcaaagaaggattctaggcccccagatggtaggatttggggtagacattctgtgtctgtctcattccccatggaattatcaaatttcccccctagccacgccagactgctaaatggtctctaagtatagcctacatttcaaggctgtttcctcagccaaaaatgccccttctccttgtctgctgtgaaactcccttccttttaccctcctctttccattatgggacagttttctcttctgggctcccttgagcacttcacactattattccattgacttcatgctgttatttttggttttgtattcaatatatctttgctcaactagaccctcaggaactctgtcatctgtaccacccagcctctccttcccagccttccccagcacctggtacacattcatggaagaattaacttttgaaccctgtggatttcatcacaataggataagaatgctgcatgggtttaggatagacgttcacaatctgagatgagcagtgctagccccagtccccaaaggaaacctagttagggtggtgattagagacattttgaacaattacttcaggaaaggatcaaattcattgaaaagctgcttatcttagtgaaaatgttgtaactgtggaaagacataaaagacaaaatgttcataactgtatccttggaagtgcctttctttaaagaataggaatcatctcaccaaagtatttgaagaagaatgtgtgtggttgtttgcatgtagctgcctatacttaagaatgttacatatttcatttctcccaggatcactcagcctaagagaagaattcgaggttacttttagggaggaaaggacacttacactgggaattcaatcgatggtagttaagcgtcctttttctttaataattgggataagtatgacacatacaactttacatagcatgctcggggagtgaggagagaagctagagaagactgagatgagtgaaatgcaggcttgattgagaaactaagcagaatttctactaacagtgagsattgagggagaagcgttcctgtaatggaggggaaatgaataaaacctcgactcccagctcgacagggacctttcttctcctagccagctggaatgcaagctttaaaaaaaaaggaagtgtggggagggctattttttttaataagaygtctcagaaatgatcatgaacacagtaaagctggttttcaaaaaaggaaagtgagaaaagtagtgacaacttgaagctggtagttgaggaagaaggagaacttctgaacccatgaagagagtatacccggtttgggtgggcaggactccaaagcctttaggatcgatggaccagaacagagaaatgaaaatgcaacaagaacagctgtggggaaaaggcagaaggkgggtaggaagcgaagagggtgtgtacttttcctttctgatctgagaaagggaaattttgtgctgggaagagttacgcgggaggaggaaggaaaggcgccaggaatgcctggaaggtatatgatgtctgaccttatgatctcttgcaacaatttctacaccgattgtgtcccttcacctctgctctaaaaatgtggttaggtaaatatctgttttattaacattgtgagaaattagcctcgtttacagaattccacaaaacaacttgcaataatgagaggctgctaggatgtaggtgatactaggagaagcaatgccttgtctgaacccccagggctctggaggcaccgctttgggtttaaaatctttccttagtgaccttgaacgtaatgaaataggagagaacgttgatcttagagtagtaatagcacaaaccacagccttaatgcccagcaggcttagttcgctggaataattagcctaggaaatgcatgacttaagatgtccccacagtggcccccacaaagtctgaaggggaaacaaagagaaagccagagagcctttcatagaagggaaccaactgcgtttacatgcaaaagatccatctcctgtggctacctaagagcagtgactctctgggggtggaataatttatacatgtgtaaaaacatttatttttctacatatttacttsaagcatgtgttaaaatatctgcaaacaactccagaccccctccccatcttatttttatcctaaaggcagtgttacatggatatccaaatgtttagagaggacaatcttaaatatacaaaagaatgataaataaataaataaataaataaataaataaawaaawaaaagatttcctaatttgtcaccacttgcatgctggaaaccgacagcgctaacttgggtaatatccttttaactctgattgaattatatgttaattccttgcggtggtcttagatttcagacgctattagcaaattatggaggaaaagcaagatcrtatgattcatgaaytatcacagcagcaacagtttctaatttccacccatcctctgtgtcatgtgatatgtttcagaaactcacttaaaattgagaaaataagccattcctaattgtacttaagtaaggaaatagctcatttatgaatctaagaagattaaagaatatggctttagtgtgtttgtttagaatctatgccaaaatttttttccgaagcataaatctggttttttttcttttccttaaaaaaaactttaataaagccaaagaaagaaagaaaggaaagaaagaaagaaagagggctccacatgcagtttcagcactaagggatcctgacaagtaattcacctctgctttgaatgtgggatttttgcactctatgatatatacctttggagtggttttgttttctttgtggttttttttttgtttgttttttgttttttgttytttttgtgtgagacagtggatttttttatccatcattgcattattggagttttatgtgatttaatgtataaaaagtgaggctattctccaactagttgtttgggtttctgtaaagttcaatttccacagtttacctcaagaggtcttttaaaaatgaaatttcaagcatgttgcttgatattctttaacatgttctcaattaatttgcaataaagtccagcccccttcctattgcacactattgtacccttcctgcctttttcatgcactgctctccacccaccctggcttcccggctttgcctccaacgtcagagtgatttctgggcttgcttttttktttttyttttgcctggaaacttcttctctgaagaactttcaaatggctgccttcttcatgtatctcctctcggagcatcattccctgaccttcctttctagggctctgaatccaccccattgctgtctatccagtcagtctctcttttctagctggcatccatcacaagcaatctgcttatcttgtttttggtgagtttatatctgtttctaccactggattataaatacttccaggatagagatctagtttatatcactcaccattctcttcccttagtgcctggtatgtagtaggtgttcaataaatgtgtactgaaagaatggatgagtgatatgatattgatctgtacctatttttttctttttagtctatctttgttgagttttggtattgattttatgtgtcagtacctgagaaggagagaagtccttgagttgtttcgtaaatgtggctcaagtgagatgctgaacagtgccagcyatgtggactctgccacagtgaaggaggaaggtagagaaaatgggttccagtgtgtgtgtatgtgggggtgggaggggtgtgttgatttaggggtgtacagaaaatggtggtgtgcttcatgmcttttttttttaaagaatgaaaccaggacatcaactgagcatataagaggggaaagtggtgcagtagggttaaggcataatgaaaagatttagaattatcctaaaagagtaggaaagcaaaccacgtagagatgtataatagaattccagtgttgagtttccattttatcatcatgaatttgaagtgagacagctggaatttgggatttccctaacacttgagctgggaaggtaaattgttaatcacttttatggagccagtgtcctttgaccaagcaatcctagtctaggaatttatcctaaagacaattggacaagtttgagaaaatgcatatacaaagtcgtttaacaaaatattttattataattgacaacaaataaatggaaagtacctaaatattcagcaatatgggattggataaattctgaaacatacaatgggatattttgcagctattaaagactgtctgtctatattcattgatatgatgaataggtatgatgagttattgagtgaaaaaaatgcagttttcaaactagcacatagtgtaaaacccttttttaaaagtcgtttacactcatgtattttagcataaagaaagacatggaaggatgttcaccaaaatgttaaatcttctcaccctcttctatgtatctttttgaattgggtgaaatgttctataatgagtatttgaaaacagaataaacagaaaaaaaaagatttaattagatcccatttgtcagtttttgcttttgttattgttgtttttggtgtctttgtcatgaaatctttgctagttcctatgtacagaatggtattgcctaggttgtcttccagggtttttataatyttgggttttacatttaagtttttaattcatcttgagttgatttttgtatatggtgtatatgtagtcttctacatatggctagcgagttatcccagcaccatttattgaataaggagtcctttccccattgctggtttttgtcagttttgtcgaagatcagatggttataggcgtgcaggcttatttctgggctctttatcctgtttcattggtctgtgtgtctctttgtaccagtaccaggtggytgtggttactgtagccctgtagtatagtttgacgtgatgcttccagctttgttctttttgcatacaattgccttggctatgtaggctcttttttgattccatwtaaattttaaaatagtttttctttccagttctgtgaagaatatcattgatagtttgataggaatagcactgactctgtaaattgctttggacagtatggccattttaatgatattgattcttcctatccatgagcatggaatgtttttccatttgtttgtgtcatctctgattcctttgagcagtgttttgtaattctcattgtagagatctttcacctccctggttagctgtattcctaggtgttttattcttttgtggcaattgtgaatgaaattgcattcctgatttggctctcagcttggctgttgctgatgtatagaaatgccagtgatttttgtacattsattttatatcatgaaactttgctgaagttgtttatcagctgggatctaatgaaacttaagagcttctgcacagcaaaagaaaytaccaacagagtaaacaacaatgatctacagtatgggagaaaatatttgcaaactatacatctgataaagatctaatattcagcatctataaggaatttaaatttacaagaaaaaagcaaccccattaaaaagtgggcaaaggacatgaacagacacttttcaaaagaagacatacatgtggccaacaagtgtataaaaaaagctcaatatcactgatcattagagaaatgaaaatcaaaaccacaacgagatactatctcacaccagtcaaaatagctactattaaaaagtcaaaaaataacagatgctggtgtggttgtggagaaaagggaattcttatacactgttagtgggagtgtaaattagttcaaccattgtggaaagcagtatggcagttccttaaagagctaaaaacaaaactaccattcgacccagcaatctcattactgggtatatacccaaaggaatataaattcttctactataaagacacatgcacacatatgtttattgcagcactattcataatagcaaagacatggaatcaacctaaatgcccatcagtggcagatcagataaagaaaatgtgatacatatataccatggaatactatgctgccttaaaaaaaaccagatcatgtgctttgcagaaatatgaatggagctgggggccactatccttagtaaattcacgcagaaacagaaaaccaaatacctcatgttctcacttataaggaggagctaaatgatgagaacayacggacacaaagaggggagcaacagacattgggacctatttgagggtggagtgtggcaggaaggcgaggatcagaagaaataacttttgggtactaggcttagtacttgggtgatgaaataatctgtacagcaaacccccatgacacaagtttacctaggtaacaaacttatacatatactcctgaaccgaaaataaaagttaaaagaaaaaagaaagacccatctgtatagkgctctctctctctttctcttacttggtttattctcttccttatccattgcatgcattaaccctttagaacttccggtgttctggggaccctgaaagatcagctagcaggattattgcggggctcagtgcagtgatgcagaggcctccaccagcaatcctgaagttgaaagagaatatccacctcccttatgcataagggatagatttgggggtggcattgaaggtctttctctcattttgctggcagctgtagcaatgcattgattagcaggagaggttttctctctaatgagccagaaactaacacttgtggagttcctgctatacaccagcactgtgcagggtgctttacatttaaaaaataaatctgggccgggcgcagtggctcaagcctgtaatcccagcactttcggaggccgaggcgggaggatcacaaggtcaggagatcgagaccatcctgtttaacatggtgaaaccccatctctactaaaaatacaaaaattagctgggcatagtggcaggtgcctgtagtcccagctactcggcaggctgaggcaggagaatggcgtgaacccgggaggcagagcttgcagtgagccragattgygccactgcactctggcctgggcaacagagygagactccatctcaaaaaaataaaaaaataataaaataaaaataaaaaataaatctgtttaatcttcacaataattctacaacgaaaaaattgttatctccattttatagctgagaaaaaaatgaggcacaatgaaacaaaagcacttgcatagcacacaatataggaaggagtggagtgagaatctaaagtcaagtttacagcatgctgttttcaaggcaaaactacttttgatttaaaatcatattcttttctctccccaatctcctccagctagcgtttcatccgtgtggatttgtcaggagacaaggaaaatcaaatttccagcaatgcgtatctagtgtttaacaatcacatcattacacatgaaaaaaatttgaagcttgtcagatcaccattgtatgaaatatttcccacttgggaccatacagctctgtatttttctgatcagttacaatttttaggatctagtctttatcccagagacccagatctgtgtattctgtattcttttgtaccctgtgttattgcttcaccaagagtatactccaggtgatttttttgtgtgtccttaattttgtcattttgtggtcattaataacatcagttaacaataatattattawactgtccactacaatgtgcgtttgtgagcactggcaacaatttagcagaacagaatgagttagattcccaattgtggtagatcacgtgtagtagcgaacagagcacagaaactccggatcytaattcttgatttcctggcagtgataccttcccattccattacataaggtataagtggcagaagatcagggagaaccayagggctgtaagatattttataagttgttaaataaggggacactgctttatttggggcatgtcactcaatctcttcaacattgtgttaggtaggtatcatgaactaaattgtggccacccaaaactcatacctcgaaccccgggtacctcagaacataattgtatttggatatggagtctttaaagaggtaattaagttaaaatgaggttgttagagagggctgtaatctaatatgactggtatccttataagaagattgaaaacacagatgtgcacagagcaaagaccacgtgaagacacaaagaaaacagccatctgcaactcaagaagagagtcccagagcacattgtgatctctgacttctggcctccagaattgtgagacaatgaatttatatcgtttaagccaccagtctgttgtactttgttatggcagcctgaatgggccaatacagtgaggttccctggaagactttcagatggggacttgcatgcaagaagtttaacagggagagctctcaagagcaacccccggagggagagagggaggaaaggaaaattgggcagagagagaagctgacctctgatgcagctgctacaaggttctcagctgatcctagggttctcagctgatcctacagggtgttctggagctgggatggccccgtagagttgcctggaatcaaggcagggcccagggagggagataaccttggcaaaggcagcttccttcagcgggggaattcccagtgagggactcaattgtggctgtttgcagtgggcactggacagctggggagtgagtttctccgccctgacgaggggtctgggtgacatctcacagcatccatcgcagacctgcagctcctagtctgcagaccaggataagcacaatgcctgtggtgcatttccccgcaggcggctgtgaggagctaatgagataatggatatgaaaatgctctgcaaactgtgaagactatcaatatgctgttatgcatcattctctgttatttgttgctatcctgtcctttcaccttccccaggccggaatgatcacattttctctttccctagctttattcctgggtcactagcacagggaaaaaataagaagaaaaatcagagtggaattctaaaaaacaaaggtcctgtgcttttctgcctaaaatatgtacaatcctcagttggcactgtcaggaatggggaccgccctcatggagaagtggyacttccactcctarccagcctctgtgtgagctggactctaaggtcaggagaatgaggaggccgtgaaggtcttggccgtctctttttcccctcatctctactgagacatagatcragacagggacccataaatcaccttggagttaaatcaggggaaaaaagaaaagccctctcaggcaacagcatttcacagcagcaacaggaagttgtagggaaaagagaaaagtcaaaactcaagtgaaaatctgagtcatggttcagagaggccacaaatacctttcttatggagagtcagaagagggaacacagagaaaactgagaggttttttttttgtttgtttgttttgaactttttaaaggagaatttgtttttaatcctgtgaagctagtaaacatctctttaaagaatgtgtgtggtcacacaagttgaagggctagaaaattacctcctcacagcccagatggttttaagtgggaacagataggaaggagcgtgagttaaagctcccacccacactacaggaccctgctgttccagccgctttcctctgccactagctcaggaagagcgagggctgcctctcagacacagggagttcctgcaggctgacttcaggcactccagaatgaggtgtccgtattttcctaagtgctgagggtcaccctacctcctcctcttttattaagattctctgaaccactcagagaatacacaagttaaaaataaattacttcggcagatagtgagggtacagaagtcctcggtaaggttttccttttaatgaaaaccagccccaaatacttttcctttctaacaaagagcagcctgtgaaatcaagctacagacatagatgccascagaggaatactacctgggactaggcatgttcaaaatggcggttccatcttctcttccttttttttttttttttttttttttttttggttagttwgtttgtttttgttgttgttgctgttgtttgagacggagtctcgctctgtcgcccaggctggagtgcaatggcatggtggaggctcattgcaacctccacctcccaggttcaagcgattctcctgcctcagcctcccaagtagctgggattacaggaatgcaccaccgtgcccagttaattttgtattttagtagagacggggcttcaccatgttggtcaggctggtcttgaactcctgacctcgtgatccgcctgcttcggcctcccaaagtgctgagattacaggtgtgagccaccgcgcccagcccatcttccttttctcagtgccagccacgtgtacattaaggaacagacaacatggcgcgggtcaagtggaaagctcttttgcatagtaagatgagggtgaggtagccagccttcctcctgctatgtaaacatcacacctaatcgaactgatctgtgggccctatgtaaatcagacaccgcctcttcaaacctgcctaaaaatttggagaattccgccccagcaagtctttccctttcagaagccccgctctctcgctakagagaaagctgttctcctttctctttcttctgcctattaaacctgcgctcctaaaggcctcctttgtgtccctgtcctaaattttcttggcgccaggtaacgaaccctgggtatttaccccagacaacgaagccgcttcagaatgacaaaacaacagacatggggacttctggcaaacaataaaccacaaatgaacagagagagattagaaaataaatctaatcacagcagaggaggaggggagaaaatagcttctcttcccagaaacacaggagagacagaaagcaggctgccctgttctgcgcctgctccattctccagtaacataccgtcctggtgtagtgagacttttcgcattatagggcccaactagagatccagtcatttttacttacgctgtgagccaagattctgagtaaatgggtttatcttgattgcagttaaagtatctggttgggcacatcctaacatgaatattataccaacaataaaaatcgtggaaatgtggggaaatgtccacgatatgttcataacttaaagtaggttagcagtgcattgtcaacgtaaataaaacagtatattgagtgtgattccaatattgaaaaacaaaataaagagcactaaatctgccaagttcaaagaccagagtgccagatgcaaaatgtttaatgtttctttctgtgatgggattatttttttctttatatttttctgtatttcctgatttttttctacaataatcatgtttctactgtaatctgagatataaaacattagaaaatttggtcagatgagttgttccaggattgtgattatttctccacaaacagatgctcctcaactgataatgggattttgttcctataagcccatcataagttgaaaataccgtatgtcaaaaatgcacttcatacacctgacctactgaacatcatagcttagcctcgcctaccttaaacatgctcagaacacttagattagcctacagttgagcaaaatcatcttatgtaatttattgrctaccataccgaaagtgaaaatcgaatggttgtgttgttcgttgaagtatggtttctacaaatacatattgcctttrtgccatcataaagtcaagaaattgttaagtcaaatcatgagtgaggkatcatctgtacattcatacacacacggtatgaatacatgggggtgtgtgtgtgcatgtgtctatgcatgtaaatgtgtgtttcaaagctctggggtccttcttccttcccagctaggagccccttttcctctgctgagctctcgaatcttgcataattgctcaccacatttctgaaaagacaatctcttggtacagcacccccagccttctaccaagggattccagcagatgttcactcccagctcagcttggatagggccaccaaggagcctgcctttggtctccacagtcacttcctgaagtaagattgaagagggtgggagcaccatggtttgttgacctccagctctgcttgtatctcctttggcagaaggggtcccaggtggtgcctacattctagattttagagaggacaccacctccagagagctgaacccaaaaactgatgagctccaaagacgtgaaaaaggacagaccctgccagacgagcacccttaggttgttggcacggaactgagggaggaaactgggactacccgcctgatgttgcagcttttttattctcccctcgtcactgtgagaggtctggacttcttctgacataaacagcctcctttcatcaaaggatcgtgccatcctttctattttctaagcattaaaaggcagtttaagcagatcagtgaattaggcaaaygtttatattctcccttgcccttttctttttgcatctggtagaatttctcctgttctattgttgatctctttgtaaaagcccgtacattcttagctgccagggcatgtctttggaagcattaccacatacctgtgaatgattaataagctgtgtttggttaataagcaacattcagctctcatattaatcacagatttttaaagttagacacagctggtgacaatttagtgacacagggtcagcttagcttttcttgagcattagctgggaggagaggctgaacgctgccagatgtcaccaaccaaaaaaaaaaaaacctaactgggtcctcagagaggacctgggggatgcaagtgcacacacacacaagagcaagagatccctgttcttttcaagaactccttttctggaggactgtcacctccagagaccccatgcttcctcctcatggttataactttccccaactcttcaagtgtctagagaaagcacattttctgaaccaaaaatcagggtttattgattggccatgagtctcaaattaagaatgccctggaaaaactggagaaaatattgaggcattagcggcattctgcataggctatatttgttcagccacattgaataacttactctatgcttagtacctccagagagtggggttacaaagaagaataccccctgtctagtgggccttcactggtgtgtgaggctcctctgggcaggaactcaattctgacttgtgcaggttgcaagtggagggtcggccgtgctcagctgggctgatggtttcccctattcgagcccttcctggcacagtgtgtctcctctgatttctcgttcccagagcctttcctcaagtagggattgcagttcttgctctcagttccttcagctagagaagcgaggtcctttcactggccctcttcagatcctgttcttgagctcagtccaacaggacacctggcttctctgttcacataggatcttctttgggccaggccaaactttcctcttccatctctcaaattggcccttccctctctcaagaactggctacttctcacggccctcttcttcatctcttcattactcccagtctgacagtggctttgcaaaaatctttcacatttctcctcaccatggtctctctatcgtaaatgaagatccagaaacgtcttaatttatctttaatggataatatagagggtgattcctgtcttcaatcaaagagaaagaggtataaggacaatacacccaggccatttcacctacaaatgctgaccttacaaaagaccagtgggtggggacaggtgagtgaaggtcctaacccagggcttctctgtgctgggaagtcacagtttttcttttcttttcttttcttttcttttcttttcttttcttttcttttatgtgcagaaaatgcaggtttgttacgtaggtaaacatgtgccgtggtggtttgctgcacctatctacctgtcatctaggttttaagccccgcatgcattaggtattttttctaatgctctcccttcccttggcccccacttcccgactggccccagtgtgtgatgttcccctccctgtgtccatgtgttctcattgttcaactccaacttataagtgagaacatgaagtgtttggttttctgttcctgtgktagtttgctgagaatgatggcttccggtttcatccatgtccctgcaaagaacacgaattcttttttatggctgcatagtattccatgatgtatatatggcacattttctttatgcagtctatcattgatggctatttgggtcggttccaagtctttgctattgtaaatagtgctgcaacaaacatacatgtccttgtgtcattatagtagaatgatttataatcctttgggtatatacccattaatgggattgctgggtcaaatggtatttctgattttagatccttaaggaattgccacactgtcttccacaayagaactaatttacactcccaccaacagtgtaaaagcgttcctatttctccacagcctcgccagcatctgttgtttcctgactttttaataatcaccattctaactaacgtgagatggtgtctcattgtggttttgatttgcatttctctaatgaccagtgatgatgagctttttttcatatgtttgttggccacataaatgtcttcttttgagaagtgtctgttcatatcctttgcccactttttgatggggttgtttttttcttgtaaatttgtttaagttccttgtggattctggatattagctctttgtcagatggatagattgcaaacattttcccccattctgtaggttgcctgttcattctgatgatagtttcttttgctgtgcagaagctctttagtttgattagatcccatttgtcaattttggcttttgttgcaattgcttttggtgttttagtcatgaagtctttgcccatgcctatgtcctaagtggtattgccttggttttcctctagggcttttatggttttgggttttacatttaagactttaatccatcttgagttaatttttgtataaggagggggtccagttygttttctgcatatggctagccagttttcccagcaccgtttattaaatagggagtcctttccccactgcttgtttttgtcaagtttgttgaatagcagatggttgtagatgtgtggtgttatttctgaggtctctgttctgttctattggtctatatatctgttttggtatcagtaccatgctgttttggttactgtagccttgtagtatagtttgaagtcaggtagcatgatgcctccatctttaatctttttgcttagaactgtcttggctatacaggctcctttttggttccatatgaaatttaaagtagttttttctaattctgtaaagaaagtcactggtagcttgatgagaatagcattgaatctataaattactttggccattttcatgatattgattcttcctatccatgagcatggaatgtttttccatttgtttatgtcctctcttattcccttgaacagtggtttatagttctccttgaagaggtccttcacatcccttgtaagttgtattcctaggtattttattatctttgtagcaattgtgaatgagattcactcatgatttggctctctgcttgtctattgctggtgtataggaatgcttgggatttttgcacattgattttgtatcctgaggaagtcatagtttttctatgtgcagttccaaagcccctgaagaatgattaaagagcaaattactttctcttttgaagattaaaaagagactcctttttagcaagatcagagttaacaaattactggccccatgccctttcctacccatgtggagtcctcgccttgcatcaaaaagggaagctaacctgcaacaagggagcagccactgccaggaagaaatgcctttgtgccttccctcttcttgccctgctgccttcttcccaagtcagcactcctctcttccctttccacatgcttcctctttcccctcttaggaaaaaaatataatattggatcggctgtgtgtcaagcatctgaggttctaaccatagctccattactaccagtccgtgtgacttggggaatgctgcttaccttctttgagacccagtttcttcattacaagataaagagcttgctaggtgagctctgtgacttctttctacttaaacattttgtgattctgcgttcttagactttgtaataattctctcttaaggtatttgtacattaagttttacatgtcattgtggaatgaacagatttatctctagttacagaatcccaaacttcagcagaaggtgcagggagaaccaaagaggtgagggataaagaaaggggctccgccaaaccatatctctcatcttgttcttgaattaccagccctctggcagtcaactttcttaactggcttccttctggagcccagatttgtttttccttgctctcttaatctctgttcactattttctatagaaattactttagagagaaaccctcttccaattgtatttaaatccaccccccaaatataatttattctcttatgaagctttgaaatggaaamttttccccagaagtaaccaggcattgtgcaaagtcgcatccattttgaacaccaaagcagctgtaacaaataagagatgacaaatgccattgtgtaatttagttcttcatatcagtttgtcattctgactcctttctatttaactggatgctttgtcagactttgtaatctaaccatgtgaagggcagtgaataaaggattaacgaaaccctttccagttttgcatgagcatttgatttttggctaacttcctagctctgttcccatggaaacctgataaaggaaagtacaagtgggccctgattggtaaatcctatctggattgggacaactataaataccagagaagaagccatattttcgagtttccctaagtgcagtgacccttgtaactggcatgaccttgagaagaccatgaaagttatggccatggagttcctccaagagatattagctgctgtgaaatacagggcctctcatatagtgtggcctccacaccccactgatgtgagtctcatttcttcacaactcagtccacatgggggccaaagagaatagcttctgcccactgtgtggatggctttgtggtctgctgcgaggtcccgcagaagaggaagtctggatgtgccctactgacatgctctgcctcctggcctatgaatcttctgggtcaactgctgtctagagtgggccttggcagtcttgtgagtttgcaggtttaatagagccttatgagacctcctggtgggtcttgtggatggaggttttcacttttactggtttgaatgagtgcatttgcctgtgaagctgtgagcatgagacaatgtccagtcttatggtttttactaattgccagtttttctttacaaattaaaaaataattttgtaatgaaaattggcaggtcccacttgagaatattatactaagtgaaataagccagtgacaaaaagacaaatacttttttccacttctctgaggcactcawattcatagacatgggaagtagaatactgtttgccaggggctgggagaggaggtaacggaaagttgccgtttaatggatgcagagttccacctttgcaagatggaaagagttctggagactggttggacaacaacatgaatgcacttaacactaccgattgtgcacttggtttaaaaactgcacatttgtaaaatggttaacgtggcaaactttatgttatatgtattttaccataatttaaaaattttttttaattgacagtttcctctaaatatcacacttaaatcatgttttcaatacacagactaattctaagtgtttccaaatttccttctaagtaatataggaagattttgtgttacttttccaatttcatcctgcaaccacggttaaaaatcactactattcacttcttaccatttgatctgttgacagtttcagccatcagtcactgccggctcccacttcatttagttaccatgyccctcactaacacaagatcgccgtctaggggccaatcgtagaactacaggctacacagaggagaagggagccaggccacctttcccatgcatcccactccttgaacagaaagagcaactaaaaagggaggcaggagttctaagcaccatctttttttcaccagtacagtttccaagatcttgctgctatgaaaataaagatctcctaatatttatagtacttgaggttagaatagtcttctaggtagagtactaatatcttgctgataaagcttttgatgctgaatccttgrttattctcttaatataatatcttctgtgcgaataaggctaaaatgcttgcatacactcttgtactcacttaggaatgtaatagagcagtttgggagagtgactgaatgcttctgctttgggcaaatttgccacaaaatcatattatgcaatcacagggtcacagaacattagaacttaaagagctttagaggcccgtggtctctagcagatccctttgagagtctgataaaaattagaggtttacgtaccataaaatgctattttgcacaaagctttgaataccattttaaaatttcatcatagatgaagaattccagcttgaatcccaccccataatttggaagtgaagtttctgagaagcatcctgtgtgaagaagcagctaaacagaggggaatgggagtcagaactggatgttggaaagagatgtgatcccacagacagtgtaatgctgggttggaaccagccctggtcaaacccattcccccgagtgcacatgtgttccagggagaagcttgctggggaagagagcagcaatttgcccaccagaggcccagatctcctgggagaaatcagctgccatggaacaggagtttttcttcatgctagaaagggaaaagaacatgaataagtggcaatccagggacagccagaaggaacctggacaatggctcaccggctgagcagagatagagttgcactggkkggggggggcgggggtggggggcagttgacagcagcctggattgtgagcaaggagtacgaagaaataataattgaagtagcagaaggtagcaaggggtgcagaccaagagcacaggcactgcagagagaagtctggattatttgtgaggactttccctagggacttctagaaagaaatcactagtgaggtctaaaagaagactggacttccagtgtggtgataggaacattgctctttgagttcttactacaaatgaggaactttgatttgccaggaaacaaagggttcaaagaaccaattgtgatatattttggcttaaatcccccccactgaaatatgacaggagtcaaattggggtaccaggtaagtcttgtgaaggtgctgcctggggagtacccagctgtctggcactttcataatatctttctgaacctcagtttcctcatctacaaaatgggattaggacttgttgagcatcaaggttccttccgacttgaaaaatcttctgattctatgaccaaactggaaggcctgggttgggctctctcagttctgcagatttaaatgagtcatttctgaactgttggcwtaaggcctatccttttcactcaaatattcccttgaggcatcattttttttttttttttcaaaattgggaaagcgaaggatacaagaagttggaaggaaagcccatgaaagaaaaamacatttactataattaagaaagaaaattaaacagatgatgatcagaactgcggttataaattaaagttaactgattccaagagtgtacgccatcagaattcgccctcataactggaaatttagaggcagggcaagcttcaagtttgcctaattcagcagttccaatcccatttccttgggattctcagctctgcctcatctgtgttcagtttaattctcaggctggggataacatggctattgcaataatagggccaagcttgacaacatccagagggagagactctcttttcctatggctctctcttaaaggtggagaattttccagaagccccagcaaacttccccataaatcttattaaacctaattggtccatatgcctattcctgaacctctcactggcagggggatgagattatacttagacaatttaggcctaacctggaagtacaaagactgcaatggggaaggggtgaatatttgaaaaaaatcagggtttgttggaatgaagtgaagaatggctgctgggcagacagtcagcggtatcttgtcagaatcagctgttgaaatgcagtggggcgtatgaccatgctccccatttaacagatggagtagttaggcccaaggtcacacagttgggttagagctagggacaaagacctttctactcaaaacccgaggcttctctatgtacatttcaaaaggcttaaattttggcttatctttttacccagaaagtctacttctgggaattattataaggaaataatgaatgggaataaagagttagaaacaataatttttaacccagtatatttttgtgaaaaaaaaatgggaataatgtgaaagtctaatagtatgcagttagtgaaatcaataatgrtacatacatacaatggaatactatgcagccattacaattataccacagaagaaaaggcaatggcctggaaaaatatattgttcataatatattgttacataaaaagtaggctataaaactgttgtttaacaaaacagatctagaaagattaagagatgtatacagcaacattttacctgtagtttcctctgcatgatggaattgtagatgattttaatctcttagtttgtgcttcttttttccagatttctttggttgaggatatgtaacaaagaatatctttggtgagaacattgcaatcagaaaaaaatgtccgtgtaaccattttttaarattaattctattttcactaagaacactgattttcagacatagctataggtatcacagggttctatatggaatttctagaaatacagtggggagttcatggcaacagccttctcaagacctgtcttccatgcccacgaattcctaggataagaaacaacactcgggaggtttctaaagttcccgacctcaactgccctcagagaggggtcattatatccagggcaatgttagtgagccacagtatgtgcgttgggaaccatgtagagaacaggaaactacagatgctttttaagacacttatgagaattgttctttctamagtttaaagtgcctggcacatatttggtgcctaatactggctaaataaggagatgytggctgtgcgcagtggctcacgcctgtaattccaggactttgggaggccaaggcgggtggatcacgaggtcaggaggttgagaccatcctggctaacacggtgaaaccccgtctctactaaaaacacaaaaaaaattagccgggcgtggtggcgggcgcttgtagtcccagctactcggaaggctgaggcaggagaatggcgtgaacccgggaggtggagcttgcagtgagccgagatcgcgccactgcactgcagcctgggcgacagagtgagactctgtctcaaaaaagaaaaaaaaaaaagataaaattaccagaaaatattaaacaggtaagtatttacctgtttaaaagaaaaattactagaaaatattaaacagtgaaatgaccagtgtgtcctcagcacaacaccttctacaaattatattaggagtagcaaacaaggcagtggctcacacctgaaatcccaacactctgtctgggaggccgaggtgggtggatcacctgaagtcaggagttcgagaccagcctggacaacatggtgaaaccccgtctctactgaaactacaaaaataacctggacatggtggtgggcacctgtaatcccagctactcaggaggtgaggcaggagaatcacttgaacccaggaggcggaggttgcagygagccgagatcgcgccactgcactccagcgtgggcgacaagagcaaaactctgtctcaaaaaaaaaaaaaaaaaaaaaaaaaaaaggagtagaaaacagaatgactctcaggggcactccgctttttctggagttgttcctgggtctcctgaccacccaagtctgactgagttctcccacatttatcccagctgtcacggatgagaggcactttctcttctgctgaccttctrgctcctggtgatactgtctacwgcacagatggaaagtacccaggaaacagcataacaacaacaacaaaaaatcacattttttagcttcaaagcaaacaccaaagttaaaagcccaacgcctgaaggaatttaaggaccaaagttatttagggcagaagctaaaaggaggtggcctaccccctacccacggaccccaggcttcaaataggtgaaggttggaggctgccaggccctgagcaagcatcatcaaagaagagcacatccaagagtaccccagtgctcactctgctttgaagacaaacagccctcctaattagaaacagcttcattcacatgccagatgtccatgcttcccttccaattattttcagaaacatcataaagaaccattagcggcagtgcaaaatatcctgggttgttttttaaaagaatttgtccattcttatgagttcagtttgatatgaagaagattgcaatccgcctattcctaagaggtttttggagcaggagagggactcaagataaggatgtgtaaggatttgatcaccagaaatactaccacatatttggtttaagcataaagaacaagcatcttacaaaaatgttagccaaatgtctctttacatcacacacacacacacacacacacacacacacacacgattagtacaccctgagcatttatctaagaataacatgaacaatcaaaagtttttggaagcagaggatctagatcatgagttatagttctgaattctgtgttggtcagactacttcgaaatacattgtccacttcaggaaaccacatctggaaagggacattgaccaattcaagaaaccccagaaagtgggaagagcacaaccatggtggaccatagacttctttagggcagsgtctgtgccatgcctttgctcacccccactgccctggcacagtgctttatacatagaccatgccgtaagatatttgttgaataaatgagtaaataattcatatgtcatgcataattgttgaaggaagtacagttggttaactcagagaataaaaggtacagaggacatgacagctcatgtcacatacctaaaggggtaccacagagaatagggaaaagatgtattctctcttggtctttggatcagaatgaagactatttagtgaaagctacaggaaagcagctttgacccaggattattattattttgtgtatccaccataaataactgtgtgaggctcgggtacattctcacactcaaactttaatttgagcattagagggatatagaaagaaatttgggcttgtggccagattaataacttgttcaagaaatctttactgagatagtgccagaggatgctgagaagcagggtgaataagtaaccaaaaaggcagggtttcttcctttttgaagcttccggtctattcaggaatgcagacaagtcagcaggtaatcacggtgtgcacaggtgagatggactgtgataagggaagttcgggcgcctcctgcagtgggtgctccagcatcccagggggcttagatgaagcaaaaatgggggatgtgataggggtggaggatgatccagcatgcatatgagctctaaggcaggacagagtggcactttggagaaccctccaccgtccttaaaccagccccacttcccacttccagttctacccactcttggcttaggaaattttctcctctttttgccctgaaaattagccttggtggctgagttttgcttttcaggttctcattgctagtgcttattttgaygcttagtgaccatctcattcctactaytggcccgcagtagggaatcagacctttagtagacacggagctcttcaaatacagagtgaacttggggcatctgatcatgtgggtcaagatgaacactacagaatacaacygagagccacatgtgagtgaagctgtactcgagctgacaatactgacattcaaaaagcaacaggatgatgagaatgttctggaattagagggtagtgatagttacacaaccttgtgaatatactactgcacaccttaacatggtgaattttatggtacgtaaattacatctcaataacatttaaaaaaaaaaaaaaaagcagcagcagatggctgctggaggaggctgagcttaaatacccctggttacacttcctcctttccttgtatttactggaaggagaaggatttgtcctaagatgaatagttttttcatcttcagaaattcctgacaagctactaccctgtcaaggcatgaaaaatttcattagtgctgacttggtacacagtctattaattagtacctaaataattgcatgttgcctctgtgtcatgatttataattgtatgcatgctttgatctttctcatcacaggcagcactgagaagtgaaggaatatttgggaggatcagaagcttggtcctgattttgccatcaacaggaacttgatgacttcaagggagtccccaaaccctgggtttctgttttctcaactctaacatgaggggctagatgcatctggtttagttagtctccatgatggtttagttcgtctccatgatcctgtgaatttcagatgttgaaaatcttcggaaaagccctgaaagatgaacaggtaggagttattgtctatattttacccatgaggaaactaaggacctgggaatctagagggctcattagcttttgaaccagtactagcaatgagttcatctgaattctggtcccaaactcctagcatgagagaaatgtggacctttcattccaggagtttagcatgtaggaggtattcagctggtgagggattaaggcaagattacaggttcttgagaaacataagcgacagagacaagaacatcagaaagggccgctgtgactcgggtcgtggctgccgatggagctcgtaagtcaggagaggttgtttgctgagaagcttgcattccctagagcccaagtgggtgttgccaggaaaccctgagttttccaacttggcaatcagtgcacagctgagtttttataggaaattgcccagctctttggaaattgtatgtggtataaatatggttttgaaattctatatattagcttagcaaaaggcggaaatattttgaaacccatggatttgggagatctgccggcattgctattaaaattactttcagcagaattgtacaatatgacattatattgctcaaaatgactcaattttctaatctttgagacttcttaaaaagaaatgaaccccaagtagagtraaggtggactgcaaaaaacagcttagtctgaatgaaaaaaattcatccttggctctgcatctaagaaactggctgtgtgtcctcagacaattcacttaatgtctcagatcctcaacgtcttcaactgcaaataaaggggttagaggagatcatctttaaagcccaactcagctctaacatactatgattggataccatacacttgtccacattcttttctctagcacttggggatttctgctcttccagcctttacaaatacaacctttcactgtcacactcattcttccttgtccttaaaacagaaagcccaggcatagtctgatgccacttctgagggctatagcaggtggcatctagtgtctctatagtaactatttacactcctagggaaaattatctcacagaagcatagagagcctgaccttgtctataaagacagtaaggtayaawgattaaaagaataggctctaaagtcaggcagacctgggtaaatctgccacctactagagagcttgggcaagcaagttcaccatgcctggtacctagtgagtgctgtgggcctctattctggagggacagcagggccttacgaaaccagcatgagattgtaaatgccttgcaggctggattttcaagaggaaatgctaccccctttttctccaacatctctggcaaaattgctaacccaaaggtactaggcccagctagttatgaaggggatggaagtgatctctatccaagggaagaacatttgaattgatgtttaaaggagttgtttagattcttatgaaggaatagaggaakagtagaggcaaagacagagaaggggatggatgagaataaagaacaagaaaagaagcagtaggagacaaatgagaaggttaaagctgataatttttacttttatgataaaaggaatttctaagcaaattctaaccattttatcaagaagaaacaaattcactaacttatatttctgcttaaagaaatgcatgggcattttcttcgcatgtgcagtttgtttaaaaattaggcattgaatgctttttaaaaaatatctagatctattctggacatgcacattccaattgatagatagatcaaaatgtctgattttcttactggtaacttggcaccagttgccagtggcttcatatgaacctatcagctgctgtgggatggcagagcagttaagagtccaagactagtccacgcaggcctgyagctcccacattctgatgcatcaaagccacagcaagttcctaaaacataggctctggatccagatgcttttggttcaaattttcacttcattatttctcagatgtgtgacttatggcaattacttacttctctaaggctcactttccacatctgtaaaatagggctaatgatagtatttgcttcataagattggggattgaatgggataatgcacttagctcaatactcacccataaactttttttttttttttttttttttttttgagacagagtcttgctctgttgcccaggctggagtgcagtcgtgcgatcttggctcactgaaatctccacctcccaggttcaagcaattctcctgcctcggcctcccatgtagctgggatttcaggcacacaccaacaccccygactaatttttttgaatttttagtagagacaggattttaccatgttagtcaggctggtctcaaactcctggcctcaagtaatccgcccaccttggcctcccaaagggctgggattacaggcgtgagccaccactcccagccaacaatattcaattacatactcaattactatgttctttttctggtaactagaatgtaggatcttatgattggccccaagttcaaagatatgggcaagtaagtataatataagagtgtagatacagattttgtaggatatatgccatggcctctgtcccatatcagtttaatacctattttccaatgtaatgccctgaaatcccagaagaggaaaaaagaatttttttctaacaattagaaacatgataaaaaawactatcaaaggtatattcattcagccatgcaaattgtaaaaccatagcaatcattctatttgtttggtcacagtttaaaaaaggaaatttgctataagaaaaataaatacaaacaaacacaaaaagagttgaatgcyacctgcagaagaagcaccaatccaactattttaccctgcccacattcaccatgtttctcacaattgcctataaaaagtagtcaccatttattgtaccaggcagtgagctaagtgctttatggaccctgtctcgtttaactgtccccagagtcctatgagtaggtatgttagtgccatgcccatatcacggataaggagatatgccaggtcagagaggcgagttgggattcacacgcagcagacttgctccagggcctgtgttctcaacactgcatggtgccgcttctgatctggattgttaaatctcagcacccagcactcctggcttgggtagaagggaatgggcccagaggtgctgagaatggatctcatgtacacctagggtcgaagttggaacagagagtatgtggagagcctgggctaagactgaagccgccatgatgaaaaccaaactcaagcagtctygttttttaaaaccaatgggagtagtaaagtataaatgtaaatctcagttatcttatcatgccaccctataggtgtttccagtagttactttagagctatcaaagatacatctgaaataacggtactgtgtatatacttgagtcctcttccccagcttgacactcctaggagtcaggtgttctctgggccagatcatttgcccacaaacatagcaatatgcctagccttctcattatataaggtcccccattatatgggggaccttatataatttcatcatatggatgaaaaatgggattattttattatttgactcttctctctaggattcaaagtgcttttatttatagattttcatgatttaaccaattcacccaagaagtaggaagagggcagctttattattttcaaattgtggactgagaaactgagatatgcagaaagaaataaagctgctctgcaatttggaaaaccatctgtgatgctataaaaacgtctcactgtactctcaaccacataaatcactatttttattgccttctctctggatgagatgtggcttaatttgagagagctgtttatcatttggcaagctgaaagaacctaatttcaagtctccattctagtgggtggtaagaataaagggaatttgctttaagggaagaggaaatgataagaatgggaaggaaacggttagacctaaaaaaaatcgattttgaaaccctttggattatcatggatttaatttgccaagcatgggtgaggggtcacatggaatgggtttgaattctaagccaccattatgaccactcacttaatgtttcttcctaccactcccattctacagtgagcccatgattaagataacaacagcttaaatgagttagtgcatagtatggtttggctctgkgtccccacccaaatcccgtgttaaattgtaatcttgagtgttggacgtggggcttggtgagaggtgatttgatcatgagggtgatttctaatggtttagcaccatccccacagtgctgccttatgatagagttctcaggcgatctrgttgtttgaaagcatgtagcacttccrctgcccttctcctgctggccatgtgaaggtgtgcctgtttctcctttaccttctgccatgattgtaagtttcctgaggcctccccaaaagcagaagcctttacagcccacagaactgtgagctgattaaacatctttctttataaattacccagtctcaggtagtttttatagcaatgcaagaacagactaatgaagaaaattggtaccagagaagtgaggcattactacaaagatacctgaaaatgtggaagcagctttggaactggataatgggcagagggtggaacagtttggaaagctcagaagaagacaggaagatgaggaaatgtttggaatttcctagagacttgtttaatggttttgaccaaaatgctcatagtgatatgggcagagatggccaggctgatgaggtctcagatggagatgaggaacttattgagaactggagtaaaggtcactcttgctatgctttagcaaagagactggtggcattgtgctcctgctctagggatctgttgaactttgaccttgagagatgatttagggtatctggcagaagaaatttctaagcatcaaagtgctcaagrtgtggcctggctgcttccaaaagcctaactcatctgcataaacaaagaaatgacctgaaaagggaggcaaagcataaaagatagataggaaaatttgcagcctagccatgtggtagaaaagaaaaacccattttctggggagaaattcaagcccaatacagaaatttgcataagtaaagaggagccaaatattagcagtcaagacaatggggaaaatgcctatgaggcattccagagacctttggggcagcccctcccatcacaggcctggaggcctaggagggaaaaatggtttcatggggccaggcccagggccctgctgctttgtgcagccttggggcatggcaccctgcatcccacttgctccagctacagctgtggccaaaagggccccagatacttctcagactgctgctccagagagtgcaagccacaagccttggtggcttccatgtggtgttaagcctgcaagtacaaagaggatragagttgaggcttgggaacctccacctagatttcagaggatgtatggaaaggcctggatgtccaggcgggagtctcctgcaggggcagagccttcatggagaatatctagtagggcagtgcaaaggggaaatgtggggttggagcccccacacagagtccccactggggcactgcctagtggagctctgaaaagaaggtcatcctcctccagaccccagcttgcactgtgtacctggaaaatccacaggcactcacatcagtccatgaaagcagccacaggggatgtaccctgcagagctgcccaaggccttggaagcccaccccctccatcagcatggcctggatgtgagacacagagtcaagattattttggagctttaagatttaatgaccgtcctgctgggtttcggacttgcatggggcctgtagcccctgtgttgtggctgagttctcctttcyggaaatggagtatttacccaatgcctgtactcccattgtatcttggaagtagctaacttgtttttgattttacaggctcataggtggaagggacttgccttgtctccgattagactttggacttggacttttgagttaattctggaatgagttaagactttgggggactgttgagaagggatggttatattttacaatgtgagaggatatgagatttgggaggggccaagggtggaatggtatggtggggctttgtgtccctacccaaatctcatgttgaactgtgatcccgagtgctggagggagggtttggtgggaggtgattggatcacaggggtggtttttaatggtttagygccattcccccaatttcttaggaaatctgcttgtttgaaagtgtgtagcatctcctttgcccctctcctgctgctaatggcctgtttccccttcaccttgtgccacrattgtaagtttcctgaggcctcccccagaagcagamgcctgtacagcccacaggaaccatgagctgactaaccatcttttctttataaattacccagttctttatggcaaygtaagaatggaccaatagagcacatcactagggtagcacaaaggagagggcccagaagcagaggagagataaacagctcatttttttcatctttctcaatgtttcttgctcactctctgttgtttgcatccatttttcatttcatcccatttcctcttttttccctttcatttcctcattttgggacagcaagaggtcatgttcttgctgccaacagttacgacattttcagtagtcatgacagccacaaagccagggctggacttgtccagaagtctgatctgcagcaggagggagtctgtagtgtgcaggggctctccagctgtcacttagatcccaagctgccccttcacttttaattttgctgatggtggcttttgtcaaaggcaatttaaaatttagggctaggtagtctaatctgtcaatcttttcttttctttgtggtttccaggtttgtgtcttacttaggagggccttcccaatgctaaaattatatatataaacagatataccacaattgcctaaacagaaatttgggcaagctggcacatttgaaacagggctgtctcctaaaatttggaacgtgtggatagcgtgcatatgcttggactctaggacttactttctctggaaaaatccgtctagcttcctcactcactgcctctgcctcccagctccagcctagccatttcatcttatggtgggggagcactcagttgctagggccagaaacccactcagagtaacttaagtaaatggggattacttgcacagtgataacggaatactgtgaaacccagtttgaagaattgcacctggatcactgaagggctagagtctggagctgcccttcctcctccctttctctcagttatctttgtctctgctccatcctcccccttcgtcaagcatactctgttaccacatgaccttaaatgactgtctaactcagtccttgagcccacagaatcttgtgagtctagcactcacagataaaaaaacaccctcaggctttctgtgtyccaactccaagttctagataaagatgtctgattggttaaagtgggtcatgtttaaagtgggtctactcccaattcagttattggtggccagggccatgagccacatggttgccccttggggcagtgggcaaggtaaagttcacaagatgtggtggggaggaaatgaccactgtaactctgtggtccagttcccacacccatattgtgatttttgctccccttcaagtttgcccttgatgttgtctgtaactgaattctgttttctcccatggttagatttataccagatccaggaccttttagggagggctgtggtcctgtccccttggggaggctctgatctaagactgctccctcatggaaattaaggagaaggggaaagcctaggctacagatggagaaggatgagtcattccagcagccatggccaagggaactcytggagacgtagggactgtttatgtggccactcaccatcatgcaggcccccaatgggggtgaggcaaggaaggacatagaaagactgctcaagtgcatttctggttttgcttcctaccgcaaacgactcttgtcatatgactgggggagtgtggtggtggcaataagcagaaaaatttgagtctaagagttgctttctgaattctcttattagggtcaatgtagtctaaagaagttgacttttgaggaaataaatcttttctgttttctgcagccagactaaggatttagtggtgaatggtaggtgggaacatagtgggactctgactgctcatacggcctctgtgaggctcaattcttttatctctaaaagagagaactgtctacctggtaagagaagatcttttgggagcccactaaactctaacataatgttattatacagtaagttctcacttaatgtcatcgacagtttcttggaaactatagctttaagcaaaatgacatgtaacaaaagcrtttttttctcatcaacgttataacaaaacgttaaaggaagtgacattatttatgaacctgctgcatgttgttttgcttaaagttacagattccaagaacctatcgatgacattaagtgaggacttactgtactagtatcatttataacttataaaaatgacttaattaatataccacaaaatatgcagctttcatgttagagaccagataaatatgaatattttgttaaaatgtctctcttctctactttaccagtcttcaccaacctcctccctccagaatattcctcaagaatataaaatgcctcatcaacatgagacaacagcaggaagcacccattcgtagtaatcctctgtatggaggaggctgttacataaccacaaaggcacaaagctgcagttttgagaacatcttcccacgccagttctaagcattgacttcaactatggttgctaacacaagaatcggcactggtgacttttgagccatcaatcatcctttcctaacacatgaatcttttggaaaagtatgtgagattggagattacctgtgatggtttggatttagattttgcctccaggtttaggcaatggtaaataggcaggagtttaataggaactaaggttatttgakaattcctgggccactgcaaatagaaagtgttggcaattttgtcttttgggctgcctctgattgaaggcacaggcctgtttcatgaagttctgaaacatgaaccggctgtatctgcgtcaaagtcagtggtaaccaggttaatagcactgacaaccatgttctttttacaggaaacacaaacgtgaatcacttgttcttacttttcttttacagtggtctcaaatrgtcaagaccccctgctgggaggagcttctatcctgctctgtggaagaaatgggcatgccagatgcctggaagatcagaggctcacattccaggtgggtcaccctggttcttctcatcagaatcaactagagagatgggctccctctccatccctacccacgggcattggtcaggctgaaagcaaagaaagacaatccattgcccccaggagaactggtcttactctaaatcagtggcctgcaaactgtttatgtggatgtcyggatagtacattttttgcctgtgtgggccttccagtctgtcttagttactcaactctgtgatttttgagcaaccattrgacagtatgtaaatgaatgagcatggccccatctggccctccacccacaggccatagtttgctgactcctgcaagagtaaaaccctttatgaactagagagttscaggcttgaacatgggtccagaaaatatgggaaggcaaacctcacacatttgtggttgtgtgcctcctaagtgctttgtgtcactgttggcttccaattcctaggaagggccttgggcaccaaccgtatgttgacccagggagaaaaggacttttgggagtgagagtcagagaatgggtaccacgtacccttcagatccctcagctttcagattgacacagcaacagatcatagtctcctaaattctctggcttaaagcatggagccacacttatcctgccaggctgggkccccagttcttagatgaggctagcagtagccatgaggagtgggcatgtggctagtacaagagaaggaatgctaggtggcacttggtcagcaactttccaatatcatgtttcttaattgtatcaccaaatgtgtattatcgtcctgtcttttttttttttaattattatactttaagttttagggtacatgtgcacaacatgcaggtttgttacatatatacacatgtgccatgttggtgtgctgtacccattaactcgtcacttagcattaggtatatatcctaatgctatccctcccccctccccacaccccacaacagtccccsgtgtgtgatgttccccttcctgtgtccatgtgttctcattgttcaattcccacctatgagtgagaacatggggtgttcggttttctgtccttgcaatagtttgctgagaatgatggtttccagtttcatccatgtccctacaaaggacatgaactcattattttttagggctgcatagtattccatggtgtatatgtgccacattttcttaatccagtctatcattgttggacatttaggttggttctaagtctttgctattgtgaatagtgccactataaacatacgtgtgcatgtgtctttaaagcagcatgacttataatctttggctatatacccagtaatgggtcaaatggctgggtcaaatggtatttctagttctagatccctkaggaatcgccacactgacttscacaatggttgaactagtttacagtcccaccaacagtgtaaaagtgttcctatttctccacatcctctccagcacctgttgtttcctgactttttaatgattgccattctaactggtgtgagatggtgtctcattgtggttttgatttgcatttctctgatggccagtgatgatgagcattttttcatgtgtcttttggctgcataaatgtcttcttttgagaagtgtctgttcatatcctgtgcccactttttgatggggttgtttgtttttttcttataaatttgtttgagttcattgtagattctggaggttagccctttgtcagatgagtaggttgcgaaaattttctcccattctgtaggttgcttgttcactctgatggtagtttcttttgctgtgcagaagctctttagtttcattagatcccatttgtgaattttggcttttgttgtcattgcttttggtgttttagacatgaagtccttgcccatgcctatgtcctgaatggtattgcctaggttttcttctagggtttttatggttttaggtctaacatttaagtctttaatccatcttgaattaatttttgtataaggtgtaaggaagggatccagtttcagctttctacatatggctagccagttttcccagcaccatttattaagtaggggatcatttccccatttcttgtttttgtcaggtttgtcaaagatcagatggttgtagatatgcagcattatttctgagggctctgttctgttccattgatctatatctctggtttggtaccagtaccatgctgttttggtgactgtagccttgtagtatagtttgaagtcaggtagcgtgatgcctccagctttgttcttttggcttaggattgacttggcratgcgggctcttttttggttccatatgaactttaaagtagttttttccagttctgtgaagaaagtcattggtagcttgatgrggatggcattgaatctgtaaattactttgggcagtatggccattttcacgatattgattcttcctacccatgagcatggaatgttcttccatttgtttgtatcctcttttatttcattgagcagtggtttgtagttctccttgaagagatccttcacatcccttgtaagttggattcctaggtattttattctctttgaagcaattgtgaatgggagttcactcatgatttggctctctgtttgtttgtctgttattcgtgtataagaatgcttgtgatttttgtacattgattttgtatcctgagactttgctgaagttgcttatcagcttgaggagattttgggctgagacaatggggttttctagatatacaatcatgtcatctgcaaacagggacaatttgacttcctcttttcctaattgaataccctttatttccttctcctgcctaattkccctggccagaacttccaacactatgttgaataggagtggtgagagagggcatccctgtcttgtgccccttttcaaagggaatgcttccagtttttgcccattcagtatgatattggctgtgggtttgtcatagatagctcttattattttgagatacatcccatcaatacctaatttattgggagtttttagcatgaagggttgttgaattttgtcaaaggtcttttctgcatctattgagataatcatgtggtttttgtctttggttctgtttatatgttgaattacatttattgatttgcrtatgttgaaccagccttgcatcccagggatgaagcccacttgatcatggtagataagctttttgatgtgctgctggattaggtttgccagtattttattgaggatttttgcttcagtgttcatcaaggatattggtctaaagttctctttttttgttgtatctctgccaggctttggtatgaggatgatgctggcctcataaaatgagttagggaggattccttctttttctattgattggaatagttttagaaggaatggtaccagctcctctttgtaactctggtagaattcgactgtgaatccatctggtcctggactttttttggttggtaagctattgmttattgcctcaatttcagagcctgttattggtctattcagagattcaacttcttcctggtttagtcttgggaggatggatgtgtttgaggaatttatccatttcttctagattttctagtttatttgcrtagaggtgtttatagtattctctgatggtagtttgtatttctgtgggatcgstggtgatatctcctttatcattttttattgcatctatgcagttcttctctcttttcttctttattagtcttgctagcggtctatcaattttgttgatcttttcaaaaagccagctcctggattcattaattttttgaaggattttttgtgtctctatttccttcagttctgctctgatcttagttatttcttgccttctgctagcttttgaatgtgtttgctcttgcttctctagttcttttaattgtgatgttagggtgtcaattttagatctttcctgctttctcttgtgggcatttagtgctataaatttccctctacacactgctttgaatgtgtcccagagactctggtatgttgtgtctttgttctctttggtttcaaagcacatctttatttctgccttcatttcattatttgcccagtagtcattcaggagcaagttgttcagtttccatgtagttgaggggttttgagtgagtttcttaatcctgagttctaatttgattgcactgtggtctgagagacagttagttataatttctgttcttttacatttgctgaggagtgctttacttccaactatgtggtcaattttggagtaggtgtggtgtggtactgaaaagaatgtatattctgttgatttggggtggagagttctgtagatgtctattcggtctgtttggtgcagagctgagttcaattcctgagtatccttgttaactttctgtctcgttgatctgtctaatgttgacagtggggtgttaaagtctcccattattattgtttgggagtctaagtctttttgtaagtcactaaggacttgctttatgaatctgggtgctcctgtattgggtgcatatatatttaggatagtttgctctccttgttgaattgatccctttaccattatgtaatggccttctttgtctcttttgatctttgttggtttaaagtctgttttctcagaggctaggattgcaacccctgcctttttttgttttccatttgcttggtagatcttcctccatccctttattttgagcctatgtgtgtctctgcacgtgagatggatttcctgaatacagcagactgatgggtcttgactctttatccaattggccagtctgtgtcttttaattggagcatttagcccatttacatttaaagttaatattgttatgtgtgaatttgatcctgtcattatgatgttagctggttattttgctcgtacagttttttcctagccttgatggtctttacaatttggcatgtttttgcagtggctggtaccggttgttcctttccatgtttagtgcttccttcaggagctcttttagggcaggtctggtggtgacaaaatctctcagcatttgcctgtctgtaaagtattttatttctccttcacttatgaagcttagtttggctggatatgagattctgggttgaacattcttttctttaagaatgttgaatattggtccccactctcttctggcctgtagagtttctgctgagagatcagctgttagtctgatgggcttcccgagagatcagctgttagtctgatgggcttcccttgtgggtaacccgtcctttctctctggctgcccttaacattttttccttcatttcaactttggtgaatctgacaattatgtgtcttggagttgctcttctggaggattttctttgtggcattctctgtatttcctgaatttgaatgttggcctgccttgctagattggggaagttctcctggataatatcctgcagagtgttttccaacttggttccattctccccgtcacgtcactttcaggtacaccaatcagatgtagatttggtcttttcacatagtcccatgtttcttggaggcttggtccatttctttttattttttttctctaaacttctcttctcgcttcatttcattcattttgtcttccatcactgataccctttcttccagttgatcgcatcagctactgaggcttgtgcattcatcacatagttctcgtgccttggttttcagctccatcaggtcctttaaggacttctctgcattggttattctagttatccattcgtctaatttttttttcaaagcttttaacttctttgccattggttcgaatttcctcctgtagctcggagtagtttgatcatctgaagccttcttctctcaactcgtcaaagtcattctctgtccagctttgtkccattgctggtgaggagctgcgttcctttggaggaggagaggcactctgagttttagagtttccagtttttctgctctgttttttccccatctttgtggttttatctacctttggtcttcgatgatggtgacgtacagatgggtttttggtgtggatgtcctttgtttgttagttttccttctaacaggcaggaccctcagctgcaggtctgttggaggttgctagaggtccactccagaccctgtttgcctgggtatcagcagcagtggctgcagaacagtggatattggtgaactgcagatgctgctgcctgatccttcctctggaagttttgtcttagaggagtacccagccatgtgaggtgtcagtccgcccctactggggggtgcctcccagttaggctactcaggggtcagggacccacttgaggaggcagtctgcccattctcagatctcaagctgcgtgctgggagaaccactactctcttcaaagctgtcagagaggaacatttaagtctgcggaggttagtgctatcttttcatttgtctgtgccctgcccccagagttggagcctacagagggaggcaggcaggcctccttgagctgtggtgggctccacccagatcgagcttcccggctgctttgtttgcttaatcaaacaactaactgggccacggctggcgcccctcccccagcctcgctgccgccttgcagtttgatcttggactgctgtgctagcaatgagcaagactctgtgggcgtaggaccctctgagccatgcgcgggatataatctccttgtgtgccgtttgttaagcccattggaaaagtgcagtmttagggtgggagtgacccgattttccaggtgctgtctgtcactgctttctttgactaggaaagggaattccctgaccccttgcgcttcccaggtgaggcgatgccttgccctgctttggctcgtgcatggtgtgctgcacccactgtccggcactccccagtgagatgaacccggtacctcagttggaaatgcagaaatcacccgtcttctgcatcgctcacgctgggagctgtggaccgaagctgttcctattcggtcatcttggctcctcccccgtcctgtcttaaagagaagaaatatgagtctctcctgcctgacagaaagttccaggcagcagaagcatgaccttggcattatggcagacagagaggtgtcctttgcttgtgcctttccttcaacctgcctgaccccggctctgctcagcagtgacccatgctctcttgaccacttgtctccagcagacctgtgatttgtccaccttgctgcatcctgggctggtggaactaccctgtttggggcttctcctccaggggttcacccaagtttagaaaagcagtaaaacagccaccatgcagaccagcctatccttttaacaaacgtctttgaagctaccatgttctaaaacattttcagcatgttttgaagctttttattattactatagggaacactctgaaactaatgctatggttataaggaactcggagccatccccagtatgattccatttcccaacaagttcaagaaacagaatccaggcacgtagtatatgaacaatgccaaaagatgcaaccgatacagtgaaacttcatggtgttagagacaggaaggaggttggaaattaccctctaagtttgttcttttagctcattatttacttttaaagtactgcttgtgcagaacccaaggacagctgcgcatttattgcacatttatattcactgcttcctgatgacattaaatgtaagcacctgcagcagggtattggtraactgtccaggggaagcacaaattagaaaaaatacaaaatacgcttccctgagcccatgaatttaccrtatcaggaatatgtaagatacattaattagttcatcagtaggctccaagacagacattgcagatggtggggaaggtgggggtgggggcaggtgggtgggcaggcaccactgactcaaaagttattgcgtgtgggacactttgccaaactctggggcctgtgtgggttgaggcacatatgttggggcctccatcagggctgggtggaggccagggcaggacacagtggtctggagctgaggagtacgacacacaactccacaggagcctcagagtttagcacgtgtgcagggtagcatgtttgggcaatgtgtgtctgtctgagagtcttctacagctgagagcctggggtccccaaggaaatagggtgatgtcagcagggaagagcccaaaacgctcatcagccttcaaaattcagcatacgctagggacctcatgattccaagcagagaagctaaaagaaatgcagttcaccaaggcatgtagttcaggtgccttctcccaggacctatgtagcattgagacttccctggggtcctttaaattatgcaattatcaagccttttttgaagatcttttttaaaatgatttttctttttgcattgtcttttggttttcaaggaaacataggttctttggtgaactgttttataactacagcatttgctgtaaggaggtgttcatattctcttagtgtaataacatcaagaagctgaaagaagtccgagatctctaggagggaaatggcttcagaatatgcctctcaggctaccatagatctgacaccccagaaatatttggaagacagactggagttagattccataactcaggctatgtggcctacctgctggggctcctatggccttccctacctccactccccaagttgtggcagagagccccttccaaattgtcctcggtctgattaacctcagtatgttagaagacagggggttgtcaaaggccaggatgttctttgctgtctctcattgtgctgcagttgttgaagcctggagtaccaaccgggatttcagacagcttggatgatgtcccttctggttctgcaatgggttctcttatttgatgggtagctgagaaaaagagaggcaagggggctttagatcttctggaaatcttgattcgtcagagttgattgactygtctcttccctggagtcagtgacaggcaaattcacaatttcactcaatgctygcactgaatagctaaaaaatggccagtattctgggctagaacctgatgacagaaagagatatggaaggaaaacagtgtcctaccacaaagtagcaaagacacattgccttggtgtcaacacacttatacttaaagcttggttctgccatttataatgaagtgacctactgctaattgttaacttctctgagcctcagtttgctcatccataaaaataatgcctcagtgttgcagtgaaggcttactataaagtgaccagcaggcaagctagacatagtaagtggttggtgcaaagtagctgctgttgggctgcttttcattcggtttaagtactcatctagaactgatgcgctattagatctatttgactgtcctgtgaacaaaagataaattgtttcctaggagtattttatttttctaagctaaacacttggtgcataggagcttaccacttgcatgtaattttcttgttttgtataaaataaactgaaaaaccrgttctttttttggctgaatttaatcatcaaacctatttttaaaatgctctttgtgtactttctttcctttttagaaaattccttttggtatttaggaaaatgtttaattttgttctaatggttacctttgtagtactctttattacctttttaagaattttttaaccttttaccatatcttttggctattacttatagtgtaaattcaatgatcttattctacgttcttacccacttctcccattttaaaaattgtactgtttckattctgttagaaaatgcaatgtttaactaccattcttatacccatatctccaaccttgtgttagtcctagatctatatatgaaatatgtagaagcccaccttcaatcctcctgctgaagtgtctgcagtcagctcttagttgaataaagtacacttaattctgcagtggattcgtcagaaaggacacgtgggcacagtattcttgtgttctttcgtcttcaaaactgcttttctatattgttaacatttgaagaacagcttggctagatataaagttcttgacttgcattttctcaagcttctcaaagagctgcttcactcacgtcttgctttatatgttgttgttgagaaatccaatgtcagccaaatcctcttctcctttcaagctattttatgtttcctccaaaaggccatatggatttttttctttctctttaaagcttagcagttctactaggatatggctctgatataataatgccaggtcaacttttataataatgccaggtcaactttttcaagtgaaccctttcacttgtagattcaattcctgatttatttccagaaagttttcttggattataattttaaataatagttatattccattgttttgctctcctcgttcaagaactccagttggacatccttggctggtcttccacttcgatcactttcctctgaccttttttctttttttctttacctcctttttgctctcttgttttctcctgctttccttcaatgtcttttgttaaatttccatttaaatttattctcccttgggcctcataattttgtctacatttctggtatgattttgccattttctttgatattcttcctatgttcaatgactatcatttcatttcttccttttcttctttcttgatctatttgtgttgctgagttttatatttctgattcagttttatatttctgattcagttttatatttctgattcagttttatatttctgatgctttttacgtatctccaaattctattttgaggaaaattaatttttgtgggagtattatgttacagttttcctcagctcattgttccccccaccacaccctgcccctgaggtgagggagtattttcttcagctgaattaccttggttcactttttacgacagttttatttggatatgactgcggtttttctgtacctcttcattctgtggagagagttcatcgtgtgacatcagcatttcctttcagttctgcccttttctgtgaagtttcttttatggaagatgttgatggtgaagttaggaagaaaaagaaagggactactgtgtctttcttcctagaaacattaattttatcttttcttttttctttcctttcattgctatttcaccgaggaataccaccacttctctgtatctcattctccctaagaagccgtgcttctccagggctgccacttctgggcctcactcatttcaaatcttttccctgcagctggtggtgtgaactgccaagttccaaattgcgtagagcatttcttaacgtagttgggctttcttttgagagtgtgcataccttatgtaagtccttaatgccctctactatttttgataccattctttaatacttccctacttcactttccatatccataggcttgaagcagtaaggcaaaaggtagctgttagaatatgatgcatttttctacttgctgatcatttacaacttgtagtattctccaattcttagtaatgctaaagccataatgttattttctattttcactctatttattttaagggtttttaaagttgtatggggagatttgaagtcaagcagctgccatcattttccattcctgtttggtgttcattgaacttcttggattttcatgttgatatttttcatcaaatttggaaaaaaattttgactgcatattttttcaaaacttttttatctccaatctctattctttttttttctcaaatctctctctcctctttttctgggactttaattacattaatatttgaacccttaataccatttcacagataacagagactacctctctagcctttcttctcttagcttcagtttggatagtttctactattctgtcttcaagttcactgatcctttctttttcagtgtccactgtgctgctaagcccatccagtgaactttttatttgagatattttattattattatcattttcatttctctactgagagtatccatttgtttactcattaggtttatcttatttaaacctgtaaacatatgcataatggctgttttaaagtcttcgtctattaattccaacatctctgggtctgtttctattttttgttaattttttttcctggacataggtaacattttgctactacttcacatatctagtaatttctgattgtgtgctggttattgtaaattcttgaaactcccttctcttggctcctgtgacacaatgatctctgggttttcctactacttctttgggattctgtccaccttctttaacactcattatcttctacttgatttttaaatgtcatagatcttcatggctcaatcttatatttgatcttttctcacactatattttctctttaggcagtctcatctacaccctatgcttcaatcaatcaccacctacacactgatgattcaaaatcatataaattcagatgagacctcttctttgactaacttcagactaattgctacttgtttgtttcaataacacatctatctcactatgtccagaaccaatattgtgatttctctggcctgcctgcatgtgcaaacacacacacacacacccacaatatgaaataggaaacttcttctagtgatataaatttcagtgaattacaccaccatcacttcaattatgcatgtttgaaatacagacactttgacacctcttccttcctcattccccatatacattccatcttgcaattttattgattttatacttccacttgtctccattgccatctctctctgccactatccagtttttagctcccaccacctctcacttgcattatgaaatagctccaaatttattgtgcacctctaatctttccctgctataatccattctccaaatcattgccagcattacattttagaaatgcaaatctaataatgcaaatctaattcattctctctctgtatttgtctctctctctctacatgcacacacacacacatacacacacacagttttaaagaaggctaaattgttgtccattgctttttggatgaaaacaaaaatcattaacatgggctgatccctacctgactcatgttaccatgctttccttgctctctcctatccctctctgttgtcttggtcctatatactgttctggatttcctggagtgtatctgcctctggtctttgcctgtgctattccatctgtattaactgctcttttctctcctcatcacctcctccaaacctgaaatcaattgtccttttcttgggggaagccttccctgaattccttggccagtcaatctcacacttatgctcacagtggcacagtgtacctctcatttgtagtccctataacatttgtaatttcacatctatttccgtgattctttcattcaggtatgacacccctactgaattataactgtcatgaaatcaagaattgtgtctgttttggcacactcatatttctagtatcaatcatagtgtagatgtttaataaatatttactgaatcagtgaataatgaataaaaagtactcttccatgaatctttcttatactcatgcttagctctcactctacctttctaacaaatggcctaagcagaggaagatgctaaaggggctgctaaggcagcaagaaaatcaagtarcacagaaacagagtcagttggttctttgcacttaggattctcagaagaattttttgcttctgccttcaaaattaaactggaatattaaaactgatcttttggtccctggaagatgaagtacaaaccatcatcaaaaagtatctactgttgggactggtgactcactttgtccttccctcctgtaagccatgagaaggaatcagaatgattctgtcatcaagagcatcacaaatcctggatcttcacctgattaatgcttcacgtctagcacaagcactttcattttcaagggattccatactgtattgtctagcccctggctgggttgggatatagttatcttggtggcataggatcagcatgtgtaagagcgggatattattgggcgctgtattgaaaagagtaaccctgggaaggtgagggtgattattaagaccaactctgaagcgatgactggtgaccagaaatgagttgatgtcagaaatttctacagagatggtgatagcttataaaggtgaaaatccagtaaatagtctggggtttaaaaactcaagtaagggatgaatcaagggatgatgcagaaattatgtgtagtagaaaaggcagatgtcaggggtagaaatacatcaccgggcaagtaaggccaagtacgtgcccatctggaacacagggcagaatctcttcagtaagttggctttattggttttagtcatttttatctattgctgatgctcatgtgatactttgtttcttgggtgaatttcggtatctcagacagacacatacaaggagaaagaacagaagttcttaggtagttttttagtaatagaagttcttagattttttttttttttttttttttttttagtaagaaagaaaagtgctgggagagattgatcgttccttataaaaaggccttcattcctcacaaaaatacaactttcagtcaagaatttggtcctttaaaaaagaaagaggaagaaaagaaagcatgwgctctatccctcttttgactaaatactaccactgactttcctgtttakaactaaaggctgtctcttgttccacaggtcaaatgcatactttttaaaatgccacttgaccccttgggttccccattctcagtagaaaaacaaaatggtcattaatttattttgacatgcaaactcagctgaacattttktggtgattcaaccccacagatgtaaagtgaaagagtgccagaaaagcaagtgagagccatgagattaccacaagtctgtgagcacatttttttcaaggcttacagaatcccaaagcttgcccttgcttcaggaaaaagaactggttgacacctgagaggttttaagccacaagaagctgaggcccgttgtgaggagggcagggacagtggggccaggccacacgcgacgcgtcacccacctcctgcctcacctcccccactgagatgtctgctgggtgggaggaggcttattgccagagaacagtctggtgttttctgttcctgcttcaggaagtcccccttctcccgccacccccgcagctcctcagcctggaaacaacttttagagaggagaagggaagcaaagctttcaaaagcagatacctgtggggtttgaagggaggtgccccttgttcaagtatttctcccccaaaattgaaaggacacttcagattcattcattttagttttgatgtatcttcagtaattaagaagccactaagaaaactgaccctgggaaggcaaattcctgaagctgagtcagatacagccagctcttaccataccatctgaccctcagttccctctgacctcatctcttcccacctcctctctgtctgactcagcagtgaggccacacaggcctccctgctgattcgagaatggctcccacctgaggccttgggccccccttgttttcgcccccacatacccatctggcttccccttcactgcttccaaggctctcctcagagagcatcctgtcagaccagtctttcctggacatgctgagtgtacctttcccctatttcattttccttcgtggcaccttttaccacctgatatgttcaatggctctatgtttgtttgtagtaagtctcgcctgactagaatataagacccatgggagaagagactttctgctctacccttggcacataccgggtgctcaaaaaatattcaagtgctcgcttyggcagtacatgtactaaaactggaacaatacagagaacattagcacggccccttcacaaggatgacacacaaatttatgcagcattccataatttcgagaaatacaaatcaaaaccacaatgagataacatctcacaccagtcagaatggctattattaaaaagacagaaaataagagttgctggtgaggctgcagagraaaggggaaagcttatatgctcttaatggaaacacaaactagttgagccactgtggaagacagtttggagatttctcaaggaactcaaaatagaacaaccattagacccagcaatcccactactgagtatatacccaaaggaaagtaattcatcctatcttaaagacacatatgctcctatgttcactgcagcaccattcacaatagcaaggacatggaatcaacctaagagcccatcaacagtggattggagagagaaaatgaggtacaaatacaccatggaatactatgcagccataaaaaagaatgaaatcatgtcctttcgcaacatggatggaggtggaaggcattatgacctccataaatgacctaatgtaagaacctaaaacaaaatattgcatgttatcacttgtaagtggggcctaaacgttgaagacacatgatcacgaagatgggaacaataggcactggggatcactagatggggaaggaagggagcagggggcatgggctgragtgccacctgttgcgtcctatacttattccctgggtgatgggatcattgggatcccaagcctcagggtgatgcaatttacccatgtaataaacctgcatgtgtaccctttaatctatgataaaagttgaaattaaaacataaacaaataaaatcctgagtactgtttcaaaaaatatatttgaggaaagaaggaaggaaagagggatggagagatggaggaagactaaaggaaggatcgtggccctgagagaatagagcacaggccaggggtgagatacagagtgagatgggagctgaatggggtctctgaaactagacatggaagacaccaaaagaaacattcctacttcatctttccctgtgcctgggataatttactcctggatggtaaagatatgtcttggtttcatctgtgttaaataaacctgcacgatgttacaagctggcattgcttcataagcttgaccttagctttcaaataggacctygatcattgctcaatgaccaagtcacaaagttgcctaatgatattggcccacagccatgttattgcaaacatggcaatgactggccaaaaccaggtgtgctccttacatttctgcccgggtgatactctcagagagctcctcgccatgagaactaagtcastctcccagtgccaggagccaggacaattayggggctttccctattgtgtgttcttgctgctaaccagctcccaggcctaggcttctgagaaacagtgyaggcacacaagctgcagatctctcctccctttattctctctccccttccccaaacccacaatagcctctaccatagtgcttattcttttgacctgttctgatctgctagcctaactattccccarcacctttaggaagataggtcttccctgaccctcagtctgaggtctagaagcccttctgccttgcctcacaggcatcttccctcctcccccgtccccyagaccagtccaacagcagcccgtgcagcctctgaagtccactcccagtgctagctgatgggaaccccatgggctcctgtctgctatacaaatggaacagactttcttcagagccaaccccagctgccccactgaagctggttgccacagtgattttcagtctcataccagattctgatctcttctcttgcccacctttggtgctgcagagtggatcatcttgttttatactcaagtcatcattaaaatttatagaaaaagagagaatttaaaaaaaaaaacactaaaaaatcaccttgtacgcatatacctcagaagrtctttggcctaatggtaatctgtgacattaaggcaaataaccaaaaatatgtaatttttctatttatttctttgagtgggctcagttgcagatatatgaatctgaccagggtcctgatcacttcctgctcccaaagaccaccctttgagcctgtaagatccaaagtcaactcagtggattaatgtgcaagtctagcctgagccagtaagacatggttccctctaagatgccaggaaaggacctagggcttccctgggctgagctcttaggtaagccatggcctggcctggcctyttagaggttgtgcaagaccagcctctgtgatctgcgaaggccctgagtcccagacatcgtctccaacactgacctagatccagtgccagcaggacaagaaagwcccctctgctttaacctttacatgaaaagaaactttgaaatgaccaatccacattttttttgtttgtttttttctgctttccacagcccttttctgtctgtaaaaccaacctcctcttcttggctcatcagaacactcattctattttatggaataaagtgctgcccaattgtagaatcaaaaatacagcaaattaatgttttttatataaagtttttgatacataataattacacatatttatggggtatctgtgatatcttgacacagccatagaatgtgtaatgatcaaatcagggtatttaggatatccatcgccttgaacatgtatcatttctttgagctaggaacatttcaaattttctcttctggctattttgagatactcaatatgtttttgttaactatagtcaccctactttgaggctgaatactagcrcttattccgtctaactatatgtctgtacctattaaccaacctctcttcatcccacacacccttcatagcctytagtagctaccattcttttctctacctccatgagatccatctttttagctcccacatatgagtaagaatatgcaatatttgtctttcggtgcctggctgattttacttaacaaratgcccttcaattccatacatgttcctgcaaatgatagaatttcattcttttttacggcttaatagtattccattgtgtgtgtgtgtgtgtgtgtgtgtgtgtgtgtgtgkatcacatttgctttatccattcatctgttgatggacacttagattgatactgtatcttggctattgtgaatagtgctgcaataaacatgggagtgcaggtctccctttgatatattgattttttttcctttggataaatacccagcagtgggatttctggatcacatggtagttctatttttaattttttgagaaacttccatagtgttttctataatggctatactgataaatgaatttaacaaggttgcagaatacaaaatcaacatacataatcaatagcatttctatataccaataattaacttgctgaagaagaaatcaagaaagtaatcccatttaaaatagctataaaaaattaattgtctaggaataaatttaatcaaatttaataaattctttccgatgaaagaaattgaagaagacacaaacaaatagacgttccatgctcatgaattggaagaattaatattgttaaaatgaccatactacccaaagtaatctacagattcaatctcttatcaaaataccaataacattcttcacagaaatagaaaaataatcctgaagtttatatggaactacaaaacaccccaaatagccaagcaatactgagtagaaagaacaaagtggtaggcattacacaatctgacttcaaaatatactatatttggttacatatagtaaccaaaatggcatgatatttagtataaaaagacatatagaccagtgaaacagaatagagaacccagaaataaatccacgtatttatagcaaactattttcaacaaaggtgccaagaacatacactggggaaaaaatactctcttcaatatacggtgttggaaaaactggatatccatatccggaagaatgaaattggatccctatttctcaccatatacaaaaatcaacacaacatggattaaagacgtaaatgtaagatctgaaactataacactactagaggaaaacacaggagaaatgcttcaggacattgatctaggcaaagattttatggctaagacctcaaaaacacaggcagcaattaagatctttaaaccaaatttgttgtaattttgtcttatgacactagcaacacaagtgaatttagaaccatttgtctggtcacttaccgtagaattaaccaccttcaaaacatgtaacgactttaccacttaaacccttaccattttgttatggtcagggatactgtgggccaggtattcaataaggacacagtagaaatggcttgtctctgttccacaatgtcttggaccttagctggaaagaagcaaaggccaatggttacttgatggcyggragcaaatatcatctcaaggctcccttcctcacaggtctggttcctatgctaataggactcaaagacgaggataggtgactcattamctacccatggcctctatacatgggttggtgttttcacaacatggtggcctaggtattcagactcaaggctccaagaactagtgttctagaaaactaagaggaagctgcgtcactttttatgattgagcctcagaagtcaagcagtatcactttccctactctactgtttgaacaattacaagcccactcagattcaagtggactccacgtcttgatgagggggaactaaggtcacaacgtagaagagcacagacgataggagacactggccatctttggaaaatacaatttgccactcatcatgtgttaatgcacagatgaggaagtgctatctgctcttctcccctcctcagctcaccctgacttctgtgtttccagtcctgattatttataacacatgttcaatataacaaggatgttttgaagcccaaaggagtgaatcctttcctagcctttcaaaccaagataaggaaaaagtggaagaagacattaagacatgcagctctaaggaactatccaaattacactaggtagatgccctgcagatgtttaacttcaagatttccagaggccacgtgtgtgtcagtatcagagaatcaagtttacattctcaataagtagatgttgagaatatacagctgatccccactatttgaagatttttgcatttgtaaatttgcctactgactaaaatttatttgtaacccccaaatcagtattcagagtttttgcaggcatttgtaggcatgcaccaagtggcaaaatattgagttaccttatgtgcacgtcaacagacgaaggtgaacaaggcaatactctgccctcttgtttccattctcatactgtaaacaagtgaccttctgtggtcaacctagtgccttatttttcaaacttttgtggttttgttagcaatttcactctctaaaaatgaccctcaagtctagtattcctaaaaacaataaggctgtgatgtgccttacagagaaaatacatgtgttagatacaccttgctcaggcatgagttaaagtgctgttggctgtgagctcagtgctgatgaatcaacaatatatattaagtaaggcatctttaatcagaaacacacataaagtaaggttatctaytgatcagttggcaaaaatgtaactagaggctcactggaacctaaacctgcatttcccttaggagcagtggttcaatatttgctaattcattgtttgcagtgactttatagagcataacttatattacaaataatgagaatcaactgtaccgtagatcaggacttttataagccctggagatacaacagtgaccaagcagaccaaaatccctgctgtcatagagtttatattctagaggagaggggaaaacataaatgaaataaataaataaaagatatgtatgttagaaggtgataagtgctatgggaaaaaataaagcaagtgatgggaggtgggagtgggcattcaaggtggccttttttgttgttgttactattgttttctgtttctttaccaaaaaaaatggccagggtggacctcaataacaatcagataacagttgagacagctggkgaaagagatgaggaagaacactaagcgatttcccggaagacagcagaaagaacaaccagtacacaggctgaggatgtaaacaaacccgccatgttgtggaaaccaggaggaggctcatgtgcccaaaatgsagtcagtaggagataaggtcagagaagtaagaaggtgtcaactcaatagggcctggcagcccattgtaatgactggggctttcacactgagtgaaagatggtaagcatccaagggagaaacaggasagcaattaaaagagtkgcaaaaatctagacttggagagtaattaccaccgattataagaagtggtcaggttccagatgtcttcaaaggcagagccaacaggatttgccggtggattgcacgtgtaattgtgaaagaaatgatgatgtcaaacatgactccaaagtttttggcctgagaagctggaagttgccattctaagacagaaaagactgtagatcaagcaggttctggaggggatttcaattctactcattttaaggtgagatgtctacttaatatccaagtggaaaaataaggtaggcaactggatatacagggctggaattcaaagaagtccaaactggtaatatacattttgagtcctcagcataaagatggaatttagagacatgtaactgaatgagaccaccaaggaatcggtgtaggaagagaagaggttgaagaatggaatcctgaggcattccagtgtcaaaagaagaaattgagaaaagcagattgagaaatgtggcctcctggaagctggatgaagagagtcttcctagaaagagtgaatgattgttatgtcagcatgcccagaagtggggtaggatgaggactgggaagagagaaagtcctgatttgtagagtttgccaatttccatggcgaaaatactcccaccagagttgatttcaagctgttaatgtgatgtcattgaatgcagagtttagaagagatgcacacaattggctctcaggagatattgcaaactgatctcagcagacattgcaagctgatctcagcacacccctgacagctaatgatatccattgcctcagcaggctttggcatccaagagggaactaactgcccaagcaagtctgaacgtggcatggctgaatctctgtcatctggacagggccaagcaacatttatcttcaatatggtaggctggcaactttctcagagggcagcccaagctgggctgggcaagaggggctcagaaaaggatgtcatggtccttgcagccagactcatgctaacttttagcagagtgcatttcagtaatgaacagcctgagggatggtccctcagccaacacagaatgcagacctctttgcaggcttcccagatcttcctgagcacatctttggtgtctgattcaacaatgagagggtctgactagacagatttaagtctcagatggacttaccgagcaagtacactaaagtaatctggacactttaacaaataaaagcataatactctctctcaaagagttgttaaaacaaaatctgatgagaaaccttcttggaaataagtctcccggcttatgggaaccttgtttccaaatctgttagtattcccgcccacatcctgagaatccttttatgttctctcagactccagaccctacttcatacatttcctgctgcctagactttatcttgactggcctgattactgataccatttggttccagccacttaattcccagcagcctgaaatggccacatccctaaagcaaaataccatcggactaggaggaacatcaacctgcttaaattgtgggctctgcctttcatttacacacaggaagaattttccaaggaggtttttttttcccttccctctctggaagtctttaaatgtgagattttcatttttcataaaataataattaacaaacatacatcgattacctactgaatgcagcgcaccatacaggattctataaaacatacaaagaataattagatgtctacttataatgtagttgggaaatttgtcattttcttagataaaattctgaccaatgtgagtgcccagtgaatgtctcagaaaccaggtactggaggacagtgagacacaagaagcccacaaagctgcagtctacaggatggataagatcaaaggaaaggaaaaggaatctcctatttgcttgccacttctttgtgctagaactgttttagacactacatctgtttaattacatcgcaatacttcctattgctataaaaaaggattttcctacttctatgaaaagagagtgtcattcctttttacaaatgaatcacagagtggtaaagcacttaaccaaaatccacagagccagtcagtggcagaagtgggaccccaacagaggaaaacatctccaaagtcctatgtttaactcttactaccacttcacattgcttcccttagactgaggagtcagtcgaattgtgccgcccctcttcccaaagatacgtccgagtcctaaatccctgtatctgtaatgggatcttatctggaaatagtatttacagatgtaattaaagtgtcttgagatgagattatcctggaggtaggggctggactgaggagccaaatccaatgactggcatctttagaagagaagggaaaacagacccagagacccagagggagggccatgtgaagatgaaggcagacgtkggagttctgcacccccaagcccaaaacaccaaagactgccagcaccccgcagaagtctggagaagggcgtggaatgaattctccttcaagccttcagaatgaaccaaccctgccaacaccttgatttttagacttttgaccttctcaactgtgagagaataaatttctgttgctttaagccaccaagttgttgtgatttattatggctgccctaggaaactaatacggacagtcaggatgaggtcagtctgcacagagacatgggggaagaaagagaagaaaagatcacgaaatgtgacttctaaagctgagccaaaatagggttcctgggaagagggagctatactctttttgctgccagtggcaagtcctgaactcccatgtcttggtttgattccaactagcgtgtcataaactattcggtttgactctgaatgctaacatctaatcagtttcctcagcttgctggttttgctggtttctattgtttgggcaagtttgagctacacagacacagctcctggtatacttgtcctcaaatatcagagaacatcgaatcattcaggtgcatctttgtgagcacactgaagagataagcttctaagaaataaaactgatatcactggcaatgcctaccattggtcaaaagtaacttcctcaatagctcttggtggtgcctagttctgtttttacatggaggcatcagataaaatgcaatgattccaataggattcagctatcatcacccattaacaggtcagttctragggaagcagctctctggggatttattgtggaatgagagaggagagaaaactttatagccaaagcaaaacgcaaagagatagatctatttgagaatcctgggcattcaggaatgttagcaaggaattgaggaacagactgaaatgaagatgacaaggaatgagaataaatcatggttatgtccaattttttgtatgttggtgttcaagaaccataagtagccacttactgaattctgattcgagcttactaaggacctactaaggacaatgtaccccattaggtgggtgtactagagctataaggatgaatgagttcatctgctcatagcataaggaggcaaactttgggggttgggggaggtatatgttgggagtcagagtagaggaaagaaaaatgatgccatatccctcagcttctgggaggtgatcccatcaagagtgcagtggaatttttaatgttgagaactccatgaagttctgtaaccaagtaccccccattgtttctgagatagagaatgaattattttttattttctcttctctctttccccctrctcccctgttccccacttcctatttagctctttagaaatgcaatgatgataatattttaccttccctccaccagacatccctacagggcaagcttatctgactatgtgcttacttaaaagctccaggacagaactctgtcctaccaggagatttcctcaaaagacaacagtcaatacgcaacctaaagtacgcccactatgaaaccctctcccacctggaaagtatctcgagacaaggccactttacaacctagttctgcccgggatggtgccagctcgaccacctggtagataaggcacaaatcgagtcatgcagacccccacctgctcacgccctcccttgcatgccattcatgccaagtccccttttaaaagtttctgctttctgctccaaaagcaaagtggtacccataaggcaggcagcctgtacttccctaagctagctttggaatacaaaatcacatyccttataccagactccgctcttgttcattggactaagcaggtggcaagtgactaaacctgtattttggttacatttctactgagaggaatccagggacaccaataacaggctgagagttgtctggctgctcagagctccacacaaaggtcgggtatttgtcagaggaggaaaagtgtggcatctttatatagaccagggctcaccggcatatactttgccatttcctgggaaaggaagcttctggctcctggaaaaatggcagamacttgaacagaggattggtgaagtcttttggtttatgtggccagatagtacaaggttcctatcaggaagaaaagcacatagtgtctttcttcactcctttgggtttgggaaacaaaaaaaatacaccaaaggcagtgaggccaccataaaacccagagtgggggcagaggacaggatgctggggagttcaggggaagggctcttctgaggtctgagtttccctgtatctgcgcatttatcccaactgaacttttccacgggagtgcttctggcctcctctcagcctaacctccccacctctccacatcctgagcaaaggttccatgtgaatgagcccagatggaaaaacactggaggagtttttctttgtcactacaggcaggaagaaaatggcaaatggagacaattatttgctgaatttggtctccgtagactcatactttttgcttagttttcattatttgaggataaarattgcttttaggcctaagagactcagctaactggacaatttttcagttcatttttgagaagtaggcatggccttgggagaacattttttaccctctccgcactctcattccatctcacatacaaatacatyaagaaaatgaagccaactgaagcagaggtcaggagtgaaagaaaagttgatataagagcttcagcaacagcagctggccccaggcactagcggctgataaaggaaactctgggcagaagagcctgagatgaatgggatattagtgagaggagctgagccggtcacatagccaagttttgcaggaggraaaaagagaatgggaaattaattataatcaattcctactaaaaccctgagaattggagacaacacataggctattgagagggcgatttctcctaattctttctgcaaggtctwagagtgcttctwacccacaacagaaggtacgagaacctctgccaagcatatggaattgccaacttcaagtcaggagaacttacttgtgagcctcctggagatggttatgtggacacagatgatgggttttctttctgtttagtaaggagttcagtaaggagtaaacctatgtttgtttggttctcatactcgtctctactccctgctgatatttcccttggcagaaaatgagtgcactgaccaagccaaatgcaagcaataaatccggtggcactttatatcgtattaactccagagaggagttagaaggcctcaagacaatcatgcctatcgtgatattggaggttcgctgtttggagggcagaccaaaacctggaggggtctagatatgaggatcagaggctgagaaagggtattggggtagggagtgactccaactttgctttcagccacccttctcagaggacagtgggcagaccagcaaaaccattctggagggaaagccaaaaaaattagggttccaggaaggctgaaaatgaaggcggccttttctaataaagtgaacaggatcaagaggctgccaaatgctgctcactccaaccccttttattggcagtgaagcaagtcaaatacttactaggaacactagccctttcttagaagcgactcttgttgaaaaaaacatcctgtgctttgygaagtgatttgtccctgaagaactctatgagtaaaagagactctagctgtgactttggccaagtcaggtggtcttgctactgatgagggggctgaatcctgagcattctctttgatacggaaaataaaacggactaggggagaaggtatagaatgtaacgcactaggggttttttggagggaggataatctctgggmagttccctactcttgaaacctagcctggaatgggctttcacctctgtgctatttatactaaaactgaattggccttagggatgggatggaaagtaaktaggattccctattacctgatgattttgaacccaaactattcccttgtggacacaaatgggtatggtggagtcaaatgcattccgtgaattcttcccctattgttttaatcaaagcaccgattttagcacagactcatgtgccaaacaaactattgaaaaactactgtgatacacatttaatgagatgatctaaagtgtttctgggggcttgtcatgggactgctgaggtggtctccagggatgcttagaggaaggatatgggaagtgagacatgtgggttgaattgccccactcctaataaggctgataaattgaaaaaccaaggtatagaagtgaccttttacgttctggggcaacttttcatctgtgcttaacgagagaaatgaaaatcggatggatttccactgaaaatttcatgtcacgatttcatgtgaatgatctaatatctagctttccccaggagccagtgaattatatatccagctgtggaaactgaaaacaccatgaggctgctcatgttaggcacctgctgtagagaaagacctttcgcatttgggaggaggggcagaaggcttgtttgtaaaacagcctggtgtgatgctcttttctgagcatttttctcttgctctctctgccttgcctgagttgtctcttctcagtgactttaggagacatacctttgggctatcttcataaatcttttgctatgaatcaggatttaaatcattagggttttcactcatgccatttaggatactgaaaacaagtgtgcacttttcagacattctgtcttacacctgtaggtcacaagtctttcatgcctatggtattttgttacagtctatatggtttactgttgcatctctcaatccattgaagtctattccctaaaaacttctaggcatggagtaaatgtcaattacaaatgaccagaatttaacaacaaaaaatttctaggcaggaatgttacagcccatcttcagttctggaggaaagctgggatagttcataaaataattctgtctgatttgtttctatgagaatctgtgtttagggtattttcaggagagaggaatacacttacttgctctaaggccacacatcttaaaccgagatacatctactctgggaggtttgcagctggagttttcagctraacttttaaaaactttgtttaaaataagttgctttacattggaacttaatatcctcagtggattgagatcgacattctgggaattgaaattgtgtctggagaagagaaaggagcaatgttgcattttgcagtagaggcagatgggctaggcagggatgggggaagtcttctgaaaggaaagcagtgaacagttggggaggggttcagaaatggagctaggggaccaaccacagaaagggtggcctactttgggatttttctagctgcagcataaatctagtacatctttttatattgaaactaaatacagatatgaaatagagcttcatctggcaatggcctcatgagtgttgggcaaagctgccttcttctgaggctgtttccttcaggcacgggcttgggctcctcttctcattccctcaagccccactctctcaactcaggtgcctttgtcagcttgacataagatcctttaataaacctaatggcaaacatcaacgggaagcaaaaaatccagatctcaactatggcatgaatagttgcaaaagatctaactaaagccacccagccacagtgtggcttcctttctgcacaagtattcttgcttcctaaaaaaggaccaacctggctgggaacgctggctcacgcctgtaataccagcactttgggagcctgacgtgggtgaatcacgaggtatggagttcaagaccagcctggtcaagatgtgaaamcccgtctctactaaaactacaaaaatgagccaggtatggtggcgggcacccgtaatctcagctactcgggaggctgaggcagggaattgcttgaacccgggaggcggagcttgcagtgagccgagatcgcgccactgcactccaacctgggagacacagcgagactccgtctcaaaaaaaaaaaaaaaaaaaaaaaaaaaaaaaaaggaccatcctataccccattctcagcacgtcattcaggtactggacagaccttagtcttaaaaccagcatgcctggagtgggctcttaccctctatgggcctcagctatggggggaagaaaagaaaaaaaaaaaaaaagcgttaaactagggactcaccaagggcccttccagctctagctctcttcaattctacatacagcattaaagaatttcaggatatatctccctggcttgttgttagtctctttttactttctccaactttccctaaagcagggaatagcaaagaatagcaaagaaacttggtgctgatctgcagagagagcctctcctcaatcagagattctgagccaaggggtttgtgtgacctttggaactcaaccacaaagccctggaagaactggttaccaccaggaccctagagaacaatcccaatataagccacactttctcttgttgttctcctatctccatttttgaacctctccccaaccttttactgccttgccatctaagtctactgtaaaaatacaacatttctcctttctcctctctgtcccaggcaaaatttctattcctaggatgttgatctcaatctgctaagaatattatgttctaatgtaaagcaactctttttaaacacagagctcaactcaaaacaatcttcagtgatctaccaaaaaggaagatattttgaataagagacttccttcagatgaaatcagtataattaattcaaatcccatccatcctctctttatataatcaaacttcacagcaggacagagataatatgggttagccaagaagagaaaagttttcagtcctagaagaaagaaggtctctgctatcacctcataatagctttggggctactccctccaagatcatagagctygtcagcataaatcatagaggagctgtttgcatgcagcagagggacccagagtgccacctggcatggtccaacctaagaacctaggtgagaagcatgggaagccaggggttgccatgagaataaaggtaaagagacacagtttgtctaattcttgggtttgcttggggtcagctctgcgtgtcgaaatacccccttccaccaattttctaggcttggcttgactccacttacactcccgtagatttcagctatcatccctgcttccctcttgggagttttttttttcctcttgggagtgttatttaggctggggagaacttaatgcagtcatcatgttgattcattttcacaaatacttattaaatgtctgcttttgcacagctctgtggaagggccagagtggtatataatgcatgatctctgacttaaaggaacttgaaagtaacctgtgccctaactttgttaccgacagggaatgattttggaggttctgggagaagcaatctgttaggttggtgcaaatgcaattgctgtttttgtcattaaaagtaatggcaaaaactgcaattacatttgcacaaacctgacactcctgacacctgagagccaactgccaatcattccaggatacactgtgtgcactttgctttctcactgcaatcttctttaagcattcatctatctctcaatttccatctaattgaaactgtggcagcagcattagcagctggtggtggtggaagacctcctgattccagaaatttcccagggtggccccctacagtttggatctgctgaggagcatgtggaaattcaaaggcatgctctcttatggagaacagtttgttggcaaaacattgcccgtttgctgcacatctgtaaactgaagtagacctgtctttctcgacacattaaaaactggtcaaaagcttcactggctaattaggttagtgatatggtttagctgtgtccccacccaaatttcatcttgaactgtagcccccataatccccacatgtcatgggagggacccagtgggaggtaactgaatcacagtggcaggtttttcccgtgctgttgccatgacagtgaataagtctcaccagatctgagggctttataaagggcagttcctctgcatatgccctcttgcctatcgccatgtaagacatggctttgctcctcctttgccttctgccatgattatgaggcctccccagccatgtcgaaatgtgaatctgttaaacttctttttctttataaatcacccagtctcgggtatttcttcacagccgtaggaaaatggactaatacaattagttgcaaaattaggttaatcaccttctcattgaatgtaacttcatcacatatatataaatgatatatagtgtacttcatataaaaatgatttgttatatatacatacacacayatatatatatataatggttwgtgtaccttccctgagaatgtgggcaactggagaactctggccatgggtgcaaaagggcctcccttgctgttccatgatggtgctccctcaggcccctcttcatctctcctctccagcccctcaccctctgcctgggctcaggccctcatcttctttttcttagattacctattccaacagcctccaagcctgtctgctgcaaatccagtctgtttacaacttacatctgaccatgtttctcccctgcctcagagctccctgagactccccattccccagaagagaacatctgagaagccttacaaagtgctgtctgcctcttcaatatcacttctgccaacctgctgccttgcagatgggcaagaagtccctcacacaccccaagctgttgctcagctttgtggctttgcaactgctgtcaccttttgccctctgcctatgcttcatttggttaaccctactcatccgtgaaggctcggccaggggacttccctggctgattgctcccaaaatatgctgtgatggatagcaccatcagtgygcttccatgaggtatcgtaactaactgtgcaatggttctctcctcaccgaggactgtgagatcctagagaacagggaatgggtattagtcatcacatccccaacattaaggacagtgattttgccccccaggggatatctggccatgtctggagactttttggttgtcataactagatgggggtactactaataccaactaagtggaggccagggatgctgttcaacagcctccaatgcacaggacagcctgcataaccaaaagttatctggccccaaaccgtcaatagaaatcttaatctaggacaaagactacaaacttaacgctgcttaatgaatgataaagtgaatatattttactgaatgaaactctgcccttaagtaaggtccacgtgacaattgttggatcatgggaaagaattcaagtaaatgtactccttctttagaacaagtaatggcataagcctagtcttttattgtggatttaagtttggctccagttaacaaggtatttcacgttatcaactgagcaactaggaataatataccgaaggctattctctacatagagtaagaatttctagactaaaataaagtcagaatgtcagaaataaaacaggtgttaaaaatcatccaactygagctactgattttataaatgaacactccaggtcctgcatgataaagtgactccccaaggtcacctagctaggagtgacagggcctggggccagtgaaaagagagcttgtgttatgacttcaccagaaatgaatatgagactactgggtccatctctgggatcctaacagagattaggtcagggctgggggtttgggagaggagaagagagaaatagagatagctgggaggtaggctttgttacatgtcttggtttctttcctgaacagtcggacctttcctcacatctcatggctactgaatttgaggactgcctagtgccaaagtctgtaccttgataccttagatcacacacaattcaaacttttccaccttctggggtctctcactggcaacactattaaaattttgggcaagacgattcttgtttgcaggactgactctttggaatacctggcctttgctcactaaatatctgtggcatctccaggcatgattattagaaaacaagcgaggatattttcaaatgccacctaggagggtggtactgcctcattttcctgtcccttcaattgaggatcaccaaagaccagttggcagggttgcatttgtgttgagcaaactgcatcttggtcagcacaagaaagcaatcagaatgatggatgagaatggtcttaatgaccaccttcaccaaaatgacctgtgttgtctgttaaaaataaaattctcaggccccactctcagggagtaggatgcaagaatatacatttttaatagtctcgccaggtgattctcatgcacactaaaagtttagaacctctgccttagcagtagcactcaaccctggctcatatgagaattaatgtttaaaaatgccattgttcaagccctactgtcagagatcctcagtttcaactacagtgaagccctagccttgcatgttttaaaacctgcctaggtaattctaatattcatctaaagctaagaaacactaccattatgaaatcttgctagttaagaggaaaccacaaattaatcccctcactttcgggttaaatgcaagaaacttaatgttttcaaccttggctgcacccttagtgagatttctaaaatcgcagtgccacaccccatgccattgatatcagaatcttctgaactaggacccagcttcagtgttttttaaagctcccagttgactctaatgtgcagccaagcttgagaaccatggattcagaatattttcctaaattctcccataaacctctgctcttggcttttagctttcctcctatcccctagttcaaaagtttgaggttgtgggggtcagggcaagaataataaagggagaaaggacaagattcaatccaatccagttcttttctccacttaatccctggctaccactgactyggcactctgggagtaaagagcagtggagaaagctctagacctattggtgtatatttccaagaggaagatccttggaccagcatcaagttggctttttatcttgattcttccctgaggtttctaaatattgttccagcataggaatttcagcttttattcttttccaacttttcatttatatggcatgcatgggtcacagaagcaatggaaakttggaaaccattgccttctaattagcagatgtctcagtggctaacattatttgccagtagcagtgccagcgcagcrctgggaaagttaattactgtcgacagtcctcgagcctgttttcataactggtaatgactgttaatatgtcaccactgaagttagagaytcagaaaagtcttttgtcctaggactattaaatgtcatggaagaataacccccaaatttgcctttgggtagataaagttcaatgggactggctgggygcggtggctcacgtctgtaatctcagcactttgggaggccaaggtgggtgggtcacgaggtcaggagttcaagaccagcatggtgaaaccccagctctactaaaaatacaaaaaaattagcggggcacgggggcgcatgtctgtaatcccacctacttgggaggctgaggcaggagaatcgcttgaacccaggaggcagaggttgcagtgagccaagatcgtgccgttgcactccagcctgggcaacagaacaagactccaactcaacaacaacaataaaaaagttcamtgtgacctttttaaaagaaatgttaaatctgaccccagttgctaaaggcagaagaataacacgagatttgagaccaagccagttcctgtttgactattttgaccccatttatagwcatgtcaaatgtcccccatttctgctggctccagccccatcttgttgctgcttccttgagatgtgaggaacaatcattctttcttctgttctaggccaggtcccagatgctgacaataaaactgtctaagtctggagtgttatggctcctagtgttaggttctttcaacacacaccacacacacatgttttatgtaaggtgcatcatttgcaatgggctggtggaccctgatatcgagttgggggtcaccagtacatgttccccttccctaatggtyagtagtcctgccctgccacatggccttagttaggaccagatttgaccatcagatagttaaataaatcagaactgcaaatccatcaagatcctttctccttatgtgagcttatgtctgcaaatagatatgtggtgaggatggggggaagaacacagcctgacaacatacaacaatagcatccatgcctcaaatcaaaaatgccctccagtgggtggatacttgcctgaaaactgcaagccccaaaagaaccactcaaatagttctacccagatttccagacatttcccaagtgaaacagcctcttagaacttaaaatgggaacgtcagagacattaatatctcattcctaccacctaccgcttaatcagtgtgttgctaagccccttacatatgaaatcttwctcagtcttcacacaacccacagagggggacaagatatcaccatccgtacttaacagaggaagaaatgcgctgaagwttacacaattaggacgtgtraggatatgattcagggtgtgtstggattcagaactgcacactgcacctgctgtgctttattgcattagctgctgctgctgctctgacctgggctgacgttgcagtgagtctggagaaaccctttgccatgtttctgtgttttcatcacagtttctgtcactactttcttgaccttatcactcttacagtcctggtcctattctgtctgtgatgggagagacctttgccaaccagcctctctgctcattaattagatctcaaacatggtgtctttgtgttctagtctttctatggtgcccttgtattatgaacataaaagttaagcttccagatctctcacaggtaccccattttctcctccctgtgcttctctgaacttgtttccctaaccacaaacagaacaagttctctagaggttgagtcagaagaatttttgtggtaaagargacattgaaagggggtwggtctactaaatgtcttgtgttagggttctccagagaaacagagaaatatatatatatttctatatatatgtatatatattttttatatgtgtgtgtatatatatatgtgtgtgtgtgtatatatatatatatatggagattgttatgtgaattaactcatgcaattacagaagccaagaagtcccacaatatgccactgcaagctggagacccaggataggtgtcattcmgttagagtcctaaggcctgagaactgtcatgggaagactttggattcagccatgactcaagtgtaccagtggacttttcagttacatgagaaaatgcattgtctttctctttaagcagttgggttcattttctgtcacttggaggtgaaggttcctaaagactacagcattcttcccatggatcattggatggcctcatgcaaaagtgttgcccggacactgtgtgggacagatgaacccaaaagcatttcttccctaatatgcaccccaacacccagaatctcatctatgcatgagaaacagctttgtaaatagtaaactaggtgtcaacataaagtcacattcctataactcagtgtgaattgaccttcttgatatgagagctgagtgaagacagagaatgtatgaggctttgggtacaggttcctgaggcgtgctcaaatgtacgttaagagaaaagactggaatagggaawgagagaaggaattgatggatgttaaaatgaacatattaattttgcctgtgggcatgtttccattaattggcttttggatctgaaccaagaatagcagaattgaaaacctaataaaaaccaaacccatgaagagaagaaaaattttcataatagcccaagtgagagtaatgacgtgagctaatccaatttgaagtataaacaaagaaatttcttcacgcaaagagactgacttattttgtttcagaactaaataccacgmagtagaggttaggtcagggaatctggcctaaatatatgggggggtcagggagatggaggttagtcattccattggaggacagaagaaaaagkaacaagaagttcttttatagtgactgaccataaagttttgaaaaaagaggtattcaaatagcactttaatccacactgcatgttatgagaggctatggggagatgtacaatttaaaagctcactaaaaaatggcaaattaaatttcattttctacttacggttgatagacgtgacttttcaaggtcaggcatattaattggctttcagatattaagcactgtagaaagaggggacatatttaaactttcctttaaaatagtggtttccatcatttttcatgttattatacacaaagaaagtgacaattttacggcactacggtaaatagactaggtcatttgaggcagagattgctggcctgggccaccccaggtccacctaggctccccaaagactgaggaatacctattttgyatacaagtgagctgcatccactagttaagaagccaaatcaaagactgtctatgaggcaaaacatatactgcagccatttgggggaaagaacaaagcactgaactagagggcaaagaccaacattttggttctagstctgccaagtgtaggacattggactaggcacttaactkcagtaagcctcagtctgcttgtgtacaaaacagagtaaaagatttcttgcatttcctactttacaaggtcaacatgaggatcaagaataccatgttcataaacatcatgtacaaccatagagtcctatagaaatgtgtggcctgatgatgacaatgagtatgacatttttcttcctagtcctacctccatttagaccacccttcctttcaagagtcccctgcaatggacaggagttgacaccaaggagaacaatacagctgctaaatctcaagtggctaggagcacagagtgtgggaagctattctgcagctgtgtttttgagttgggccaaagagctagtggggttttggcttcccaagtacctttgttgaaactccctggggaattttgctttatgaaatttccagcaattggagatcccactgggttggtgaatagaagcctaaagggctccctgttggatgaaaaaatgtgtttgaagtctgctgggaagagctgtaggagggagctgagggttcttccatgactcctactgtgcattgacagaagctgtccctaccactgttgattgccaattatttttgtctccagagccaaagaaaatatatttgaatttgacccatctttcactaggatctacagatggtgaaatattaatgaacaggtgggttgcacaatattccaagattgcgttagaattgatttttrtaggctaaattattaacaccagagttgctgacatatattctcatatgattagcaaacccagaagccttaatatcaacacagaatacattcagaaccatcaaacacaacatctactttgctgggaacagaatactaggtaaaggaattgagatctcacacaacactcctctgaaaatagggacagctaattttgtaatggattgccagcaaaagctgtgacaatgcctactctggaagtctctaaatttcttttcaayctgagaagggtgttccatgatatttactggagtaagaagtgatggaggaggtagaatagttctggaagtcaggtctctaaatagaacaaatcttgggatcctccaagtttcagtctatgcatggaattatgtttaaagaggcaatatctagtagctaaataatagctaaaattgttccaatcatgacttgcacctctcaaagatcattattcaagtaatgcttctatcctttcctccagctcagtgtttcctgaacttcccctgcactgatgctcttgcttacctaagcctcttcttcagcctcttctccatccctggacaattcaatgcactgcatggaccttgcttagattctgatttgagcaaaccaacttttcttcttctccttctccttctccttcctcctgcctccttccttcttctttcagatagcatctctctctgttgcccaggctgaatggagtggtgcaatgacaactcactgcagcctcaacctcctgggctcaagtgattctcccacgtcaacctcccccagtagcttgtactacaggcactcaacaccgtgcctggctaatttttgtattttttgtagagacggagtttcaccatgttgcctgggctggtctcaaacttctgagctcaaaagtgatctgcctgcctcggcctcccaaagtgctgggattacaggcatgagccaccacacctggcctcaaaccatcgtcaatgcaacactttgaagacaatgagggaaatctgaatttggatagtgtattagatgataccaataacatattattagttttgataggtgtgattaatggtattgtgtttatgtaagaaaacaccactatttttagcaatcaacacttagatacagaaagctaaaatgacacarttctgggattcggttatcatacatcagccaaaataaaggaggaaggaaggaaaaatgtacagaagtaaaagtaggaaaatactgataattctggaatttaagtgattgatgtttgaagtccagtactatattctctatttttgtgtatggttgaaatttttcctatttcctgggaaaattttccttgaaaaactttttaaagaattttaaaacttcttttcaaaagagaaaaagaaggactggggtggtggatcatgcctgtaatcccaacactttgggaggccaaggcaggcagatcacttgaggccaggagttcgagaccagcctggmcaacatggtgaaaccccatctctattaaaaatgcaaaaattatccaggcaagtttccacacacctgaagtcccagagaatctcttgaacccaggagccggaggttgcaatgagctgagatggcgccactgcactccagcctgggtgacagagcgagaacttgtctcaaaaaaaaaaaaaaaaaaaagggagaaagagaaaagcaaatgcaaatatcttcaaacgtcataagaaaaggcaaaagtgaatccgataaatatattttaaaacaataataaaagaggcattttgytgacagataaattcatgaaacaagactgacttttttgaatgccattcatagaactgccaggtcagctgtgtagtgtgaggtatatttcaatgcaaaatactgaaattataaaaacaggattatgcacacaaatgtttcaagcctttataatttttttaagtccaaatggcataggtccatttataaaatattttctgaatttatattatgatttmaactagcaatatcctattaattaacttatttaaaattcataaggagacaagttatttaaaaaaaaaaacactcttgaactgagtaaaaaatagcacgaagtgaggttcagctctggggagaagggaagttgtgctaaaacttttcaaaatggaatttaacctcagacttttaaagcatcactttctttaaggattcacggctttcctcccacactgtctggtctggggccagtgtctggagtaaagtattgctactcctaaatgagattttagaaagtagcatagtttctgaaaggagcagccactggaaaccaaaaactttctcagggtactcaaacggtttgaagagaactgatayttgaaaacggaaatccttccatttgtgacaacatggacaaacctggagaacattatgctaagtgagataaaccagtcacagcaagacaaatactgcctgatcttttgtatatgtggaatctaaaatagttamtctcctagaagcagagagtagaatggtggttgtcagggctggggtatacaggaaatgaggagatgttggtcaaagggtacaaagcttcagccatgcaagaggagttagttctggagacctaatatacagcatagtaacgacagttaacaataccgtattgtagacttgaaatttgctacargggtagatcttaagtgttctcaccacaaaagaaaagaggcagctatgtgaggtgatgggtaagtcaactagtttgattgtggtgatcattttccaatgtatacatatatcaaaacatcaagtcatataccttaaatacatgcaatttctatttgtcagttatgccccaataaagctgaaatttttttttttaaatgagaactgatgtttgcatccagttgctgctaaaggcacaaattttctttaaaaactattgaatgattttccagctcttacagacatactgggaagaaaaaagttaaaaactatttgagaaatttggattgaactacctcatcctgtatgaggtaaggccaatgtgcaatcttgcattgctaatcactcaagcagagtgctcagaagctgggaaacaggctgcggttaagaacattgcttaaggaagaataattagatcctttccgtgtctcatagccacaatttttttccagctttggctgttgtttgagcaagaccttgtgtatcaaacattgatctagccaagtggcttagtggagaatttgctcaaattggttttttagtatcttgttggcaggaggggaaatgactgcttgaacgtttcagccttaatgctgacatgtggtgacttgaagccaggtgaatgaaggttcctccagctagagaggtaagatgaacatgcmggaccaggaagaaagcaggtcatcatgttagacaggtgcaattatgtgcagagactataaaagaagagaaaaagacatttagtcatcagagagcagccattcaagtaagaccttgaaggaaagggagggtgaatcaaacagaaaatataatgtaagcaaacgcacagaggctatactgtggagaggatgtggggaagagggaagtggtccatttgactggaacagagggtaaatttaaggcagtaggaggtcataagacttatggaaaatttggaatgccaaaatgggactgttatgtgttaggttgatactgggtgggggcactgaggatttttaaaacgtgatcagggctgccttgttgaaggtaaacctagcggtggtaagtcaaatgaaawggagtcatgagagaacaggtggtactaatcactaccagtactgagtgctttgcagatgctacttcatatacataatctgatttaattctgatagcaagaaccgttattagcccactttacagatgataaaattgaggcttagggtgattaaacaacttgctcaaattcacacagctaaagcagaagaggcagtgttttaatctagacacaggtacctgcccttaatcactatgcttgacagcttcttaagctagaatgggtggtaggtgacyggggtctgaattaggaatttggaggtagtaatggaaaagagggatcaaattcttagaggtaggataggcaagacttcaccaacaggagcctacggaggtctgtgatttggtggctgcgtgaaaaagaagaatgatactgttactaacctaaataaagaaaccagaagaaagacttggcatcgattaaaagattattaatatggttttagttatattgactttgaaatgccatgagtagatccagtgaaaatgtccatccagccatcggaaatgtagtttggttgctaaagaggggagatggagctagaaagagaagctgaggcatcacgtgcaagcaatagaggggcaaatacgcaagggagggtggcagaagaaaatcatcccaggtgtttcttttcttcttactcagctcggaatagagatgacttctgagtttttatctactcccattcaggaatgaaatggagaaatgtaggtcaaaattttacaaaatggtcatgtagaataattctctgacttcccatctctgggaggaagagaggcagctttagtagaagtgtgaagattctaagcaaaatttaagtaaaattattaatttttttagagatggagtcttgctatgttccccgggctgaattcaaactctgggctcatgagatcctctcacctcagccaagtatctggaactgcaggtgtgcctcaccactcctggctgtctaactaaaattatgaagggcaacccattatctctttactttctcttgccccagaataagacaagaatgccgaggcctggtcagtatcccagggtaccaccgccagtgctggccagagcaggctctgagaggctaacrcaggccacagagcctagggccttgttttggagggtgaggtgaggcttaaagctggtaggataggcgccctctgagattcgccatctgagaagtcagtcagttctttattaaaccattctaaacaacagaaagtgcagtgggtgggcaagattccactgctgaattcttcagcaggccctgcaaatgaatgacatggtgtcaatgggagggaaagtgaagcaataaacacagatggtgtttgtgcaatctcatctgggtcaaggaaatcacctcatcactcttctttgatgggcagattcctatctcttagtttaccattttccttactaattccctcagctccatccaatgtgcattcttgtgtcaaattgcatgttcatgagtatattacatgttcctgttgtgagtatgcaggggttaccatgggatgacccctgtgctatgaacttggaacctcaagaaattagattgccttttaagaatgaatcagagaagaaatacaggaaaccactttaaataacaaatgtgttcctaggatagcaagatttgactggaccctgactgacgagattactatacctaaagaaagaacgcattcgtgagaaggagagttctgctcagttatgaacaaagcaactgcattcaataaatatttgttgagtacctactgtgttccagcagagagctcrcattctagctggggagacagaaaacaaataagtgcatttataattggatgtctgcttgtgatatgtgtgtatcccaggcagagggtccacagaacaaacarcagcatctagtgtggctcggagatgtgctcactcaagttctatgccagatttgagaagcctgcttgactctaacatcccaaatctgcatttccagcacttgggtgacattttgacctacctaatagctctcgggttgatttctcctgtgtgactttcatgaagacatacatagaggaaaaaaagcacatatcaaaagtactcaggtcaatgaattttccaaagtgagcacacctatgtagccagcaccccaaatccctccttatagccccttttaccacccytaccactgaaatgtaaccactatccygagaccagcaccataggtttgttttgcctttttctgaactttatatagatggaaatatacagttcatactcaatacatgctgcatagattctttgattcaatattacatctgtgggatatattcatgttgttgtttgtattggtgttttgttcttttttcattgtcagatttcatggtatcactacatcacagtgtattttatttaaatggacatcagggttatttccactatgccactattcttttaacaaactatttttctgcaggaatctgttagaagtggcttctgatgtttgcaactaagaatcctgcctgatccacatttgttttaattctaaatttgtattgggttacctaggttttgtattgattaagaaatcaagtgaaaatttcggggtttttgtagaaattcttctttttaaactacgcttttgaagacatagacatatttttcatgagctatttgccaacgaagatctgcttactctgtttcaacagtgaagcctaatgataaaaaataacattccatgtagataaaagctgtgacttcccagcttaaatacagcactttctggaactacagctataacttgtgttctcttaggttgctaaacaagttggttaggagcttttctcctcagggttcaaccacatgactgcttctgggcagttcgagtggttttcatcctcattgcacaatagcagaggttttgaggttgtgtttttctccacattgcccatttccctggcggccactctcaggagctgtgaagagctcaatttaaagacagtcatatcagttattcatcaattactgggatcttttcattttttaagcatatcatatcaacaccccttttgtaggactatagcctgtctgagcggggctgtaggagagaagggtatacctctctgtcattacatcattttcttctttgtccgggccatatcaattgccaatgcctcattcaaggcctgacttttgagcaatgagatggaccagccagcagtcattcctctcagtgactcaaggagactgacatttgtaataacaaggagttactgagcacttggtatgtatgccaagattcttagtatggacaccagggatctgcagagcaagcatgtccatttcattaaaaccaatctctccactcgtgctctggataccatccccttgtccttcccaaagactttcctcctgcaataaacccttctctccctaacatgatcaatttctctctccctcctggatcatttccatgagaaggcagatgtgttctggtgcctactttccaaaaaaaaacattctctcacatcattgctccctccagacacaatcctatttctcaactctttcacagcatgccttcctgcaaagaattgtctgtagtcactgctccacttcctcacctccttttcttagctcagccaactctggttaacttccttctctccatgcccctgaatctgttcatttcaaggtcatgaataacctcttttgccaaacgcagtggccaccactgtgtcttcatcttattcaactttcgaaaatatttgacatagttgatcacttcctcattcttaaagctgtctcctctcccagtttccatgacaccactttctccccttttcctctgacctcactggctgcattgtctcaggcctttttgctcgtttctctttctctgatctctcctggaatgactccaggctctgtcccagatcttcttgtactgtccatctataagctctttgtaagtgagctcattcagtctcatgtctctaaataccatctacataccgatggctctcaaaattaaaatttctgatcttgatttatctgacctatcccctaaggtcaagttcttatatcctactgacttctctatatcactacatgggtgtctaagaagtttctcaaatgtagtatagacaaaggtcttggtttcccaatgtccatctttgcctctctctgttctccctagtaaacagcagcaattttcacccattgaaggcaaacatttagaagtcatccttaagttctctctccctcactttcccaaacgaatcatcggcaagtcccgttggcaacagtttcatgtcaagagttaattttaagaatcttttattcaatttaaactgacaatttttaaaagtttggaaagtgggagagaaaacacccatgttttctcataatcttcataattatcattttaatagcacatgctgtatcattgagtagacatatcctaatttactttacagtccccctaatgttgtatctttggagtcttctcacattttatttctataaacaattttcaatgaatgtctgcatgcctatatagatgttttatttttstttttaaagtagagaagctgatttttgctgttgtttttgttgctgtataaaagatcactgagtgattgccttagttatgcaacaatagagaaataagtgtctattattctggtgttcaggtaaagtagaattctatcaaaattgtcacaaaattgtctttgatgagagccatcatagtgcaaagttgatgactaaaaggagatggttaagttgtytaaagagcaaggccataggagagaagaaactaatattcaaagcttcctcccacagttcaaagttagagaaacctgagaggggtgtactggtatgaccacccgagatcccatcgctgagaaagataatggccctggagacaaagactgatgaagaaagacagtatccagctgtgatgcagatgaaacatgcggcatggttgcactcactatgcagccaaggctggaagccactctggatccagccactctggcacagcgttcttgctctaggaagaacaactgaacatggccacacaggcctcacagctggcatatggaggctgttaataagctgagcttgaggcttcaaaggactcttgtagcctgtgctggatctagcagtgaccagtatgccagtggccatggatgcccaggcccatgttcagtagtgaagcaggtgctagcagcagaagcaatagaaatggaaactgggagatctgctgtggatgaatctcattatcttctttctctgaccctctttggactaaataaactcccagtattcttgaccaacagaggtagggttggaacagaacctcaaaagtcatcatyagacttcctactaatagggcattggaagttcaagcgactaactaggaaacaggttagtatttgtacccctacactgtgcaacagattacataccatttgctctatttggcatcctttccttaggctagattcccagaagaaagattactgattcgaagggcatgaacatttttatgactcttggcctaaattactaggccaaggttttttcaaagggatgcactaattttcactatttccccacaccctttcaggtgataaataattgacttgatttgtttacactgacgccaagaattcttgggaagaaggatcaaagtgaaaagtggtagcccatggtggggaggccacactcagtgcagttgtgaagtcagcagcatttttaagcccattcattgccagtagccctgagatgagcattcccaagctgcttcccaggtccctcctccactctctcagggacatccattctgtaccagccccctcagatactcatgcccttgccctcccttctccatgctcattaaaaccagcttaagagcagatatgacatcagtcacttaccttttcgtgtggctctaaatcaaagtgtcacctctcccaagcacatgcttgcatcttagctctgattgaggaatgaaaagctttgttctctgttaaaagaactttgagcttagatgccccagactgagaaatccaccaaaagctggacctttgacttgagcggcaaaggacccccatagtcaggctgtgatttgaggagcatcaagaggccagagtttccaagttgggacccagaaggtggggttggcagggggagggtaggagcagctggagactctgctctaccaggggaatacggaggtggggaccaatcccagggtaaggaatgaaagtaggagccccagaagctgaaaacatacttcaccgatgtcagcattttacccagagccattccaaggtgaccataactcacttaaaagcctgaaagctgttttatgccaactaataaagtgcagtttaataaaaaagttgtcaatcatttttatataaaatgtatttggggcatgaatggttttgatcttttataaagtcaaaagcttttagtgctgctcatggttataatcactgcgtgagcctgggcaagcctcacaaccttgctggccttgactttcttatttatgagctatagacaattacacccagcctgctgcctggagggctggkgagagtggtgaattgagtgttcaagttgaaagtaagaggtggtcttcagcggttgactccaagcattacttatgatcaaggtctaatttctaagagtccaaaattaaataacaggtagaattgaatgccttgagcttgtctagtgatatggaagtgtagctaatagcctacagcctaaccgtgtaagatacaactggaatataatacaaaccccatggagagtaaaggacaaagagaaattaaagtaagaggcaggaaataataaaacgatatttaatttggacatgtgcccccaacgcatctgtagaaaaatcaacaaagcataaataccaatgggaaaacctagccataattactctaaaagatatagagacaggaaattggataggagtttgcagtgttgttttgggctgcagggatgcccctgtgtgcctgcaaagggaaatgagagtttatctctgaataatcagatggaattgtacatcaaataagggtaaaattggtcatagtcatctcatgattgcagtggtttctatgttctccaggtcagtccaccatcattgaggagacgtgggtgcggagaaaggggtcaggtatgtggtcagacatctctgtgggatctctgctgctaactagctatgccacattaagtatgttttaacttgtctgaccctccagtttagctcaacaaaatagaagaaaatctccctttcaaggctgttggaaggactacagatgaaaagtatataaagttcccagcagatggaaaatatcaaataaatgtcagctagtagcagcagcaggagcaaagatgaaggccgactcctgagttttcagactccacagatcccagaatccttctctgctctgagttctgagtcccacagttctgatgcatccacctgtgcacctcaccggcaatcagtgggagcctgggaatggttaactaagaggggcttgagaaggcaatgagagaggagcacaaggaggtaaccagccactccactgaagctgtgtttaggtggtggatatgatctgccagcggcccctcagccaaaaccaccaatacaaatccaygtagacagtttcttaaacaaacttagtaaaatcaaatctagaatatctccccctttcaaacaatgcattttcccagtgccaaagtacagcactttcttagcatcttccttctacaaatgatggcgcgatgcagtttaaacacataccttgccaattctttttaaaatgtaggcttatatgataattttaatcacatgctttcccaattattacatgtgtatgtttatatggtaatgttaaccacatgctttgctacatgcttgctgtgagtgatgttttattttatttttagagacagggtctcaatctgtcacccaggctggagtgcaatggtgatcatagctcactgcagcctcgaattcctgggctcaagtgaccctcccacctcagcctcccaagtagctggggctccaggtgcacaaccacatgttgctgatttttaaattttttgtagggatggggggtctcactgtgttccccaggttggtcttgaactcctggcctcaaacggtcctcccaacttgacctcccaaagcactgggattacaggcccgagaaccacacacagcctgctgtgagtgattttaagagaagctgttagagattggggccctagcatctcattraatcactggttgacaccaccacagcctcccagctctcaagcaattcctaggaaaacaggaattcatcgggaaaatattcttgatcctgataccaaaattaacaaagggggctgcttcttgtgttgtattctcaacagcagaaatgacagttgtgcccatcaaaacccccagagaccctgaccagcagggaagagcagtagcaaggagataggagagaagggtggtataaagagtttaccttctttatttttctctgtccacagttcctttaygcggaaagctatttacagcagccacagtctctgtttggtttggcatgacactgactttctatggataagtcaggatctcatgtcctcatctaaaaatggtaccatattgaatgacgctttaccttcatttctctcacttcactggttttggatgagcataggggcacctttgggtcagagtacttttcagagagggacagtcaataaaaagccttcgtgtataactagtccattttcatgctgccgataaagacatacctgaaactgggtaatttayaaagaaaaagaggtttaatggactcacagttccacatggcaggggaagcctcacaatcatggtggaaggtgaatggcacgtcttacatggcggctgagaagacagaataagagccaagtgaaaggggttttgccttataaaaccatcagatctcatgagacttattcactaccatgagaacagtatgggaaaactgtccccatgattcacctatctcccaccaggtccctcccacaacacgtggaaattaagggagctacaattcaagatgagatttgggtggggacacagccaaaccgtatcagtgtgcccagagagagagtgggtaagaggaatagaccaaaacttgaactatgagaaagagaagtaagacggtagggaagactgtagttcagaatctgtaagttataactgacttctcacagcctggcaaaaaattggaagctggagtataggacataaattcatgagcagtagcaattttagccaagtcgagagaaaagcattgaacttcaaatgaaaataatgttcaaagaggtgaacatgaagttcattcaagatgtggagggaattatgagcagggagatgcatgccaagagaaactagatggtatttgaaaaaagtgagattcaaattaaggttcacacacagagagagagaaagagggataaaacaaaaatattttaatggtttccttttcctgtggtctgctttagaattcacccaaaagccaattgtttctgtggttattcaaattttgtttctcttctcactccctcctcttgtctatcctctgatcsccagcatttggacagaataagagagaggaagtaaaactcaaatcattttactttactttttcttggccatttggctaagagatgtgtggggtgaagaggtgcttgtggccaaagtgtgatttgtaaaatgtgtgggtattttttgtttggttggttttgcttttagctgctatacttatgttaccccagtttaccacatccagtcctctttgggcacaaagggaaagactcaacaaacatttgttgagtggcttgactcagctttgctccttctcctgagtattcctccgtggagttttagcaacttcccataggaaatccaggctaaggtctgattcatccagtcctgaataatgtgttaatcatgaattggatamaaatcatgaattggatactactcaagaggataagctgttttcaaacatcttagcagtaaatatttgcaaaccaacaagaaacacactaaatacaaatggcgtttctcaattcattagagcaagcctgcaagaaccttgacctgggagtagtgaggccactttctcagcsactagttcatgccattatatatacataccagttttaacaatacattatttttataattttcaatgtttgagattattcatgaacctgaactgcccttcaacctgtaaatctgaataagtgaggttttactatgatttacaaaaccataaaacaagrcagaaagaggtctgttcatctaatagtggctgtttgtttctcctttcctttttggagaggagggaaaaaaagagcaaatgtctatctagcaagatgacgtagggctggataaaaagataaatgcctctgaggtgtgtagggatattacaaatgtgatttggaagaaagacaagatctgagggggtgggaagttcagtgtagaaagtctcttctatcaggacatggattctaattctctcctaccacactgggcataaccatcagggaatttaaagtcccttccatgccaggcatgccccatcacctaggaagaaactcaacccatcagcaggcatccaaaaaggcgtcagccaggtagggtcccaaagagccccacacctygggttatctgggaaaatcccaagttatttagaagacagtgtacctcttgcctctacccttggtggtaaacattgcttcagagtcacacacacacaaaaagataagcttttttctcaattgaaaactggaaagttgaaagaggaagtaaagagaaaaagaaagacatatactatawtccaggagtcccacatgttcagaaactcttcacctgtgaatctacattttactgagttcacatctgccttctgaagggtaaccactctttaccccccaaattcaactcattacttgttcaactttgaccaagaggtttttttttttttttttttttttgagatagtctcgctctgttgccaggctggagtgcagtggcgcgatctcagctcactataagctctacctcctgggttcacgccattctcctgcctcagtctcctgagtagctgggactacaggcgcccaccaccacgcctggctaatttttttgtatttttagtagagatggggtttcaccgtgttaggcaggatgatctcgatctcctgacttcatgatccacctgctttggcctcccaaagtgctgggattacaggcatgagccaccgtgcccagccgaccaagagatatttttaagaaaagtctcataaaagcataaaattttatatatggcaaaagcaatcaacatctatagaaaactgataaacacatatgactcagaggaagaaatttccctctatgtattatttactgttaaacttactatggcttataaggccttgatcatctaaacacttgtttcgatttatccattctcttcctctcctcttcagccttcttgagattgtgggtcatctccagggatacttctccacagttctactatcagtgtctaagggattcaggttagggcaacacacacaaaaagtcaaattcagttattcaagcaccaattagataatgaacatctgcctggggtactcacgacattctgggctaaatattcccccagagagaagaataagggagtactcagtgggtactaatgtctggtctgtgacatgacaatgaagtgaagattaagttccatctttacccccattcaccatttatctcccaatctctcttcccaagtcattcttttttttttttttaattatactttaagttttagggtcattcttatcttcttctcatctcttacctgttttytcctgaccctaattcctcaaagaagcttaattcacttctagatcccctccttcccccatgaatataaagaaaataactatatctagttcttttagatgttcaaattgacttgattgctagctgaaatcaaaattgaccagctgaagtggttttcaagaatgttaattcttattctgaccactggattagcacaatgggccattgtacacataagtacacccacaaggcagtcagtaaaatagacaatgcctaaagctgtagatacactatatacatggcatgaatcttttattcatttgtttagtctacagcaggaagccaactgcctcacttcaggccagagggagaatgctgagatattgtacgaatacatgcaattttccaagcttcaggaaatttgaactgaaacattgacaggaaagagcccatagtacacttgcatgttgagctggtgtttaaactctttttcccatgtaatgagctcatatccaaaatgttgactcaacgtgcatgaggacttggcaagtcctgtggggaggagcgccctgtcacgggaaacaggagaaaaacaaggccggctcagcacattctctcagagcacacaggccttcatgggccagagtttctgttattaaaaataagaaaagaaaaaaaacagagaatgtctcctcttaatccagcaataactccaagaagataataagtcaacagtcacttttttcatggctacctactacagagtgtcctagtaaaatatatacttgatacattaatatacgctttaaaaagaayagcagttagacattaaccaatatcygttttggttatgttaaagtcacaaatgtttaaaatgcccatcgtttcacagtcaaccacatataagatatatcttgctttattaagtgtatttaacacctaaaagtgccacacactttccagggcacactcatctgagggagtttgtagaagatgcagtgctcatggggccctaggttgttagctctgaggctgccatgcttcattcaccaacatgtattcccttacaacttgggcccagcaacaacagatttactatataagcctccagtacttcctgaaaaagtcctttccaaataccctcaaaaacaaacaaacaaacaaaaacagtcctctttctgtgtttcaatcaaggctataaaagtaacccatgttaaaaagccaggatggctgcaatgaatggagcacacagaaggcctcctgagcagtatagactttatttttccatcgtggggctcctgtaatttttaaaagtctgtttgaagatattaatttggcaggaatgaggaagatggattcaagggattaggaactgtagggagatgtagcaagtggatgaaggcctggacatgaataatgttcacaagaatgggaaggagggaaagattaaaagggatatttagaaagaagaactgacaagccttggtaacggagcagatataggagataatgaggagagaggagttggagttggagttggtgaggagagatggagttggagttggatacagygacaacttcgaagtttctatccagaggctgggagtgtgatgggccattgacagaaatggcaaacggagagctggtttgcaatggatcaagatgagggttgaactcagagattcttaaatctaaaacatctcagaaggcaccaagcccaattttatacttcctttctgtatattagagactgaggcccacagaggagaggataaagacccgttgaaggtcttagttagttggcatggagcagacactagtacccagtctttggtctcttgtttctatgcctatgatcattattcaatggtcctgtgcctaagctagaaatcttttgattgcgagtgatggagaacccaacccaatttgacttgaataagtaaaggaatttattggctcttacaagtgtaaagtccagaggtttcagttgaggcatggtccaacagctcaacaktttcactgagcacctagtttccttttgtctaatctctgcccaatattgttcatagttccaagatgttcaccaagaggtccctgagctgtgtgctttctcatttacatccagcaggaaagaaagaaggtttttgttctagaattccaagcaaaagtcctgggattcactctaattggatttgcttggtcatatgtccacccatggccaaccacatggctggggagccaaatgtgctggtctgggtcacatgttccacccctggagccccaggtagaatcagattccatagagccaaatggattcccaaactccaatgagggctgctaggaagaaaataacagaagctacagcatcaaccaacaaatgtctattacacattgtttggctaaatctccttctgttttttccatagcaagtttatgacttttatttttattttattttattttgaggtggagtctcgctctgtcacccaggctggagtgtagtggcacgatcttggctcactgcaagctccgcctcctgggttcacgccattctcctgcctcagcctcctgagtagctgggactactggtgcccgccaccacacccggccaattttttgtatttttagtagagatggggtttcaccatgttagccaggatggtctcgatctcctgatctcgtgatccgcctgcctcggcctcccaaagtgctgggattacaggcgtgagacaccgcacccggcctatgacttttattgttagatacaatgatgaagtggtttgtccacaagttttaaaaatatacagaaatcagaattgccatactcaccatggaaaaaagggagcacagctttaacaagaacattttaaagagaaagaaaagtaattagggtgaataaattcaaattttagacaaagtcagtcatggtgacatgtgcctgtagtcccagccagctacttgggaggccaaggtgggaggatccctggagcctaagagtttgagtccagcctgggcaacatgggaagaccttgtctcttaaaaaaaagaaaaaaagaaaagaaaaaattggtaaatgcagccaagtctttgtcactaaaatatattctaggcaacattcttcaaagccaagcaaagtctgtggctgctgtgtgctggggctatttcctctcaattcaatcatgggttggggtgatggttaataaccctgaaatttaaggtcttttgtcagtctggcatcaatgatgagtggtgtgacaaggcttggtgtatcactgataattgcttagaaatgactccacactacccagttttttggtgtatttttcagcagtattgcataagaaagtctttagcagccactggtacatgcttctgagaagcatttgaccacagaatatcttagattcaaaacacattgctttgtgggaagaaaggcaccacccagcacacacacccatcctaattttgaatggacttaatttctgaattctagacactgcctcacaatgatataaaaacaacaagagcctcattaaaaccccagaggctgagcccacaaacaggaattcatagagtctctaagagaaagatatctgggcaacatttctaaattttgagctgtctggctggttgagacagatgatctgatggcaagaatgatttgcaaaaaattcaacactgaccaatcagagcagacagtctaaataaacaycgattcttacaaggctaccttccttaccagttaaatatcagtcctgcctcagagaaacataagatctaaagaggaaaatctacacaagattgtgtgtgggccagaaaggccgccgtgaatggtgagaaggtgagtcaatccatccatcctaagtcaaagaatccaaccagttccatggaggaggcacagaggaaaagaggaaggaacaaagtggaagaagaagagaatgaagaggtgggaagagatgggcaaggatgggagagcagaagccaatcaagagaagaaggaaaagcaaacagaagagagtagaaaggaatgggggccagaaacaagcaggaatcatgaagagtggggaaaggagagactttggaaattcaaacaagtagaggagtgaaaaaaatagtgatgaaaggtaagaaaggtaaggtaggagatgtgtgaaattgcaataagaaaaatggcagtgtttatgcgtgatcattgagtcttacttgcattacacttgcattacacttacactgtgtaatgcagggctcagaaaactttttctctaaccagtcacatggtaaatagtttaagttttgtgggtggtgcagtctttgctcagctactcagctctggtggtgtagcatgaagacagccatagacaataagtaaacaagtgggtgtggctgtgttccaggaagactacgaataccagtgatgggtcagacttggcccatgggtcatagtttgctgaatcctggtataatataaatcttctgcagacaaaagtgcttcttacatttttggcacccacaacacctagatacacaataccaggtatgttacaactgcatggaaaagccactttataggccaaatggcagcaattttcaatggctttttttttttttttataacttttgacctacaaaatgtcagtttcctgtgatgccaccctacctgctactagactggccatctgatccccactggagaagccacaatcatagggaaggaatattccatttggggacagataaagtcaatgaaaagatagatgttctcagtacagcccaggccagcatgrgcaaaggtggatacttaatgtctagtcagcttgcatgccatgacaaaataccacagactggggacttaaacaacagaagctgattttttcatagttctggaggctggacacaagatgagggtgccagcatggtcaggttctggtgaagtctctcctcctggcttcagacagctgccttctcattaagtcccatatggccttttcctctctctcttcctcttcttataaagccattcatcccatcatgaggaccctaatttcatgccctaatctaaccctaattacctcccaataaatttcatctccaaataccctcacactggggattagggcttcaacatataagcttggggagggggagatacaaatattcagtccataacccttaagaaaggcctttcattgattttcatcttaaacaaaaatattcttacctgttttttctggaaacgaataaccagcctgtatgacactccttgggctccacctctcacctggatatattacaacactgtgcataggagagattcaccagatagctgatagagaactttacattcagtacttaaagctttcctattgtgagrgagaactccatccagcataggaaatagctccacagagtttttatctgagccacatactgcctcagagatcagaacccaagcaaaaactctgcttctttaattcatacsctcccttatttcctcaccttgggctcttcaaatgcccccagcttgactgtggagctggcttcctctccaaccatcattaatttcccagaggggcctgtggtacttgggaatagcttcggtgatgagaggcaacaaggtctagccaagcacagctctcyaggtcttgaaacatccttaaggcctaagcctagtatcatagacacgggcttgttctaaccccaaactcagacctctaacaatgacctcacttccacttgcttcttttgtgatttagaagagcaccttgcagcctctgaaatgcgcagttcttgcttggtgaagggttcctgttttaggaagccagcactactatttcattgcctctaaggcacaatgcagggcatttgaggttgattttgtggtcggtttgtttcctttattttcatttgttacccagcaccatgcccatatttccaagtttgtcttggctcctgatttcagtcattctttgggcaccaatggctttcccaagtcatttaccagggtagcacaagatgccttacaaattaccagagtaaagtaatggccccaacaggtatgcttttgaggccacatgaggagatacacagctgcaggattccctatcagcaaagactgaatgatgtcaaacgttcagaaaaggagaaactaagtgggtgyagcacaatcaatcactttgcatttcaasgtgaacttgcagctcttatggggagggaattctctatgtcattttccacgtaaataaagtaatgagaccactttgttgtagcaaagaaattcagtttgtttctagaagcagatgtgtgtgcatgggtgagtgggcatgtgcatatttgcttwaaaacattttccartaactgctgacaacagcaacctgaagcctccaggcacccagtttctccccatcctgagatgatctttttgctcctggagcagcattgacgtgttccataggatcatccctgtcctcactggcctggcctcttcagtgacctgaaatctgcatttcctgacccttcttcctgggcctcttcttctcagtttctctactcttgtcacacaaagttactcaacacccagtaggagcttatcagagccacagcaccacgttccaagggcaaagaaggagaaagagctccacatttacatcccagccttggatttaagcctagagatcttccytcctctaccctcccacccccatcacttccccttccagcacccatcattgctccccctggttgaacctcgtccttgtgaggtccaagtgaaaatttcccctttgycctctgaaggtttactgaaaatcacagacaagaggtagattaataggagaaaaggcatgcaatttattgttaatgtgtacacgagagccttcagaatgaagacccaaagatgcaaagaaattgtccatgttcaacaaagtatgatagcttaggttcaattaagtatggacagccatgtagaaatatgattcgacaaaaaggctataatctaacgctaatagactgagtggggatccagcaaggcctgtctgcctaggttcctcttggcctctgttcagcattccttccttctggttatgggcaggaccctcactggaatgggggtcttatgacctacagtcaaacaaagtaggccagataatttctttgtggccagtttttacgcagaaaggcaggggaatgtcagagtaatatttttaggttttatggctggctttggagaaagggggtcctggtttctatgactcacctcgaagattctagtttccatggctagcctaggtggagactgggactgagacaggagggcaggataaggtcagggcaaaacttgtgcttcctttggggcactgctttctaagtccaaacactgttttctgcagcccactgctcaccattttccttcatgaggaggagaaagtctcagtttactaaacttttctagcctctgttcctgcctctataaatggtgataatacagttgtgctgtgtgctcgcccggggctatggtgaggaatcaatgaggaaatatacaaaagagccctagcacagaacctgattcatcactgatgctcggtgagtgttcattatacacccccaacacctctactaaccaygttgactgtgactaaagtaaatgtagattggcaagtcacactctggaataaagcttcccaaccctgacgcctgacacaatcacctgggagctttaaaaagcaccatgcctggccgccacaatcatctcttgccctgaaatatcctgagggtttggcctcccttgttccttgttttgatattaggcaacattcctaggccaccagagcagctatttgattttctttttcttgtccttctctttctcccttttccactaagttttggggataatctgttgcactgcaatagatacctaatatagtcctcttttcaccacgtggcattctgatgtccctgactttcatagctatttcatttttgcatgacttttctttcccagaaataaagtgttcattaaatttgcatgtcctgatgcattcatgcattattctttaattttgatatattggcctgatctgttagccttcttaaaaatgaatgtggccaggcatggtggctcacgcctgtaatccctacactttgggaggccaaggcgggcagattacctgaggtcaggagattgagaccagcctgaccaacgtggtgaaaccccatctctaccaaaaatacaaaaattaactgggcatgatggcaggtgcctgtaatcccagctactcgggaggctgaggcaggagaatcacttgaacccgggaggtggaggtttcagtgagtcaagatggcgccactgcactccagcctgggtgacagagtaagactctgtctcggaaaaaaaaaaaaaaaaaagaacactttctttagtagtagttgcttctcattagtggagccatgttgagatttcatctcttaagaaatgaaagatgacctccctccttagaatactgaataattcatcagggcggggtacaactgtggagctctcctgctactcctgatctcttgagccccattcctttctaattattaaatggcacaatgccgaggaatccctcctgctcctgaaacagacttctccaggggcgtcatggctgactctyaggtccctcagtttattctctcctgcttgtgcagaacgaaacaaatacaaatcaatattttaaaacagacatatacttaatattttttaaaagccagaatatctacgtatactaatttgcttgtctgttatattcacctctttttgtatgatagctatgtttttatacacttatctcattagagtattataccaaactcatagcctttcacaaaaacaacttgcattaatgaagccgtgattgccttttatttgatgttcacattttcacagtggggctagcaaaaactcctttaagtactgcctctgatattctcgaacactcctttttttcagtccacaacaaaaagatgttccaagccatcctcgctttttttttccctaagactgcaattaactaacttccamgaaaatttgattgctttgagaaaagaatagcatcagaaatcacaattcaagcttctcacctgtgcatcagcagtgaagagaaatgctggtcctttcactaccgccacttagggcctattttgtgacagagccagtaaagatgtttttcagagtgaggaattcctactgattttccttacagaatgtattatgttgctatatattgttttagtcagccagggtctcttaagaaaaatagagtgagtattactagaaaatctaaatgtgggtagatttccagtcaagcagctaggcagaggcgtccagagactccccgtgctcagcatagcgttgtgcagccttgcagggggatgccttgggagaagggagcagtagcagggctcacagctggctccgtggcactgcctgtggatctgcattgccttctgttaggattaatgctttgtctccagtttattttttttcttttttttgagacagagtttcgctcttgttgcccaggctagagtgcaatggcgcgatctccactcaccgcaacctcccgagtagctgggattacaggcatgtgccaccacacccagctaattttgtgtttttagtagagatggggtttctccatgttggacaggctggtcttgaactcccgaccttaggtgatctgcccaccttggccttccaaagtgctgggagtataggcgtgagccaccgtcttagtctccaaatttgttactggactccgagcaaccctgatgcactgctgtagagtgccaatctcccagtttgctcaagactgaggggttttccaggatccagaattttccattttcaagctgggattgtcctgggccgactagaatgagatggtcaccaggtcaccagtgagctagtagcagaaccactcaaggagctcatcacctcctgcacagagcaggaaagagacactctgccctctgctcagcagaataccagaggacagaataaaaatatatttgggacttactcagaatcaatgggaacttaagagtcccgctgcagtgcagacagattcagattcttcagtgcatagggccaaggtaattacaggcaaagctaaaagaggttgtggtaaacatatagctgtgaacaatcgtcttattaacaaagtcctggtctagctgtaaagcctggttttccttccctrtctcagagagctctgtggaaggtagttggtagatctgaaagtccacaagcagattctccaggtgcaaggagaagtgtacagaggaaagcctttgtaaatccacactcagaaactgggcctcacattagaggtcaagtttaggtgggagtgtattcacaagtaccctcatgcatattggttttactattctacactcagagccttggctacccaagagccaaatgtgtccatgaactctgggaagatcctgcgaaggccagacaattcctggggcattctgtgaagctaggaagccagagttggaagggtcccactctgcctcagccctcacatgacctggtccaacaytgccttacagatgaggaaaactgaggcctagagaggtaaagagacttacctaaaaggcatggttggccactgttaaagttgggatttaaaacccaaatttcccaactctctgcactaaataaattctgcaatgctgcttccattgcaatgagagtttgaatactgagtgtgagctacttttctgggcttctaatttctgagaacaaagtttagcagaggaagagaatcgtgaaataatttagttcatttcatggggcaccaatagcattcaaatactttcagtcgaggtcatgttcatccacagcacagccttgaccttagcaagagcagcaggcagattgagtggattcaattccaagattgtctcctattttgtctctttaggcttaaatgctttagcaccatttcaagggagaaaattcacatcacagaggacaaaaaaagctgtcattctttctaaacactaaacttattgtcatcttaaggtcttgactgttggtgttccttctgcttatttacattcacatggcttcttcyttgtccttggtcaagtctcaactcaaatatgattccctccaaaaagcctttccttgttaccccaattatagcagtttataatcagccccaatcttaactcatctgtagtgaattaaataacatctcccaaaaattcacctccaccaaagcctcagaatgtgacctgatttggaaatgccatctttgcagacatgattaaggtaaggattggaataagataatcctgcattagggtgggccccagatccaatgagactgtccttaaagtcctccacagcctaactccaggctacctcgccagtgtggattgtctacactgmctgcctgctcctggaaaactgatcttcctaccaaccaaacagctggcttcagcttctcgccatgcaagtkyctgccacatgccacttctctacctaggaagttctccctcctttcacctgaacctgtccaaatgttactcttccttcaaaatagggctccaatctcaaaatttctgctcccatggggtctttcctgatgycgtgctgccgggcacaatctcaggagactccagcaccactgtttacaccacccttgtgtgtgtgtgtgtgtgtgtgtgtgtgtgtaagtggacctccaatggactatgtgctcctacagaacaggagctgtattttgaagttgttttgtttgtctacttgttttggttttgttgttagtgttcttttctttccaggccttgaatgctctatggactatgtgacaatatgtagaataaaagacagattgcttggttacatgaacagattaatagcatgttacttcgctccaccctaaagcaagtcctctcagccacaccccactgcaatgcagtctacatgtgacttcttggccataattaccaaatggattcagaggcagagaagagggaaaatggcaagtcccttttctcaggctgctgagataatttgcttagaggacttaagaggtagctctttaggattcccagaaataattggggaaatatttgagggtcccacacaatcagggaagatagtaaaaaaatactcaccactttactttgaggtcactgttgctgccatcatcaccccagagttgtttcctactcttggttatctggagtcacactgagctcaaaacagatggccctgaaactgctctctgaagcagtgagcacacaccgtctaaacacacmaatatgcgcatgcacgtgcacacacacacacacacacacacacttgtatgtcaccactgaactagtaaccccaagcaagctgaccaagtgctcttctcctgaagtttcagagatttcattgcagaaacacaatttacttttatgagcagcacttctgtcccaaggcctcagactaagctggtaagtactgattccaggacaaaatgtgacccacatcccgaagtgtcctgcattcctctttctgccccttataggttctttacctgcaaactctctccctcttgtccaaaacattttacctgctctgtcacytttgcatgatcacaggtccttcgcgttccacaatcagttatttccgtaccaggtttgttttatcactttgaaccttaaaacacagggaacaaaattttacccactgtcaaactgaatctgtccattgtgagatgctacaccactgaattttgctgtgcatccgtccaattggaaaaggaatgaatgtgaaagtttcatttaaaacactccttcatgaaactctctgtgcatcaaataactgaaagcccaaaccactgatcagttagtaaagctgtgaagccctctcaattgtcagaagcaatttgaaattgaactgaaaaatatctcacggtctcttagaaacagacacgaattgtggtttgtaacccaatgtggaaatagttacggagaaagtgacaacctcttgtgaggtgtgtgcgctyttcctccaagttctttgttctaaggtcagagggctgatcacctcactgctgccctacatagtcccctcagcrccagaaaatgctcacttaccaccaaatttacttccaaactgtagtttatcagaatataattttattttctgaaagaagtgcttcaactttgtgtattggcacaagataactataaacaataccaaagaaaacggtcccctataatctggccatttatggacacagcaccagagggaaaaaaactttaaacataaattaagaaagttctctgtaagagctcttgttgaattatagctgacaacagtacacacagcacagtcacgccactgaattctttccagctccagctccataattcaccttctcccacatgtcctctattcttgaacttagaagacttttctcaataagggtcactaaggggatcccagttgggaatagaagaacaaaaaagtttagtaactattccaagagtcataacatcgtaggcaataaatgctgcatttaaagactacagatttaagattgtgagcagcttctaccagacactgcattaccctggtaaagtcacctgccttctttgagcttcagttttctcatctggcagttgttcaatgggtttagtcatttgcaatcatttttattaccttctaargtcccctttaggtactgtgatggagaggtagacagacagaaagatgatagatagatagatagatagatagatagatagatagatagatagatgatagataggtgggaaagccttaaaaactcaaaaaagtaaggaaggatgatcccaagaaataagaggaaccagagctcttctccctgggtctgagagaagctggcccaagccatccttccctgagtcctatcctgctcctgcttggacttcccaggacagaatcctccctgctatgtgtgaggcagccccaggccctttgtactgctccagaggtctggggagcagtgttcgaatgggaagaaaagcatccaaaaaagaaaaaccaaagagccaatgccataaatatgtaaatgcccttgaactctactgagaattcctctgtgccccaatagtttcctcccctccatgtgggttatattctattttcccaggcatggagtaagggagaagaataaaattggagctgggtggtgggggagtagcctggaaaagacacttatgaatgcaaagaggccatagatttcattaccaggtgcatagtatcatcagctcccggtccaatgcttactcatagcacaagctgattaaatggttgtggaggaagggagggaaggaaggaaaaaaagaaggagagaaggaaggaaggaaaattggttcttatgctttctactggaaactttttatctattcaaggaagaattaatttttgatgtttactggctatatattttgcactctccaccttgccaccaccacatatttatactgtgaccaacctagctgaaatgaacttatattttaaatgagtcattttgcagagcaagtaataaatcagctatcaggagtaaggagctctcagcaggccatactgctccattgccaggagggattattttagtagtatcacactaggatttctgaatttatgcccttaatttatgagacattcattgcaggggctttcccaagtgttattttcataaacagcagattaatataggggctttttcttgcatttctttggaaaaatcttgcccccatgtagaatattcaagctctgctacctataaataagctaatgtctttcctctgggctgttgtcccttagccttcaacatcttctagtctgaagcaaaaatcatgcttcaytttgttttgctatctttctaatacagtaagagcttcaggtcaaagaactgaagagaatgtgagagcttgaccctctgttatgtttttcgttatttgtagattttccttatgcacttgcccttctgtggaatctttcctcttcattcccttatccctattaggattctaccaatttattgttctaaccttgaagaaacagctttttatttaccttcagctgtaggtggcccaccaggtgtcaacaactgtagagttccatcaagagtcatcattttacagttacaagtcggaggggccttcacagatccgtcaggctcaacactgcctcctyagtgagcctgtgaaccacccaagacggctggtcatcagtgtcatcctcttccttttccggacaactatctttaaaagaaaaaaaaagagtgtctttgaatgtatccattttatccccaaataatcttgtttaataaattccttattaggccaaatccaatgtgctgaaatatctgccaagcatgtcattctacacaaaagggatttgcaaatagccagtagttggcgtgaagaaaggacatgtgaaagcgctgggtgtggaatttcccatcctcggccggaggtctactacagctcgctgtttgcagatctgggctgagctatgcatcacattgttcatgaaagaaaaagcaactgctctccccagtgccccttccccgctccacatggctgcgatcagcagccccaagaccctaattgccacagcctattagaaataatgagacttacatggcagaagccaagggtaaaagcgacatctcgcaacacgaaaggttaatatcaacatatacagctagtgagtgcaaagggcacctcagttggtggctcattatggcgggctgacccatagggaaagtgtcattctgcagagaggcctttctcaggatgtggcagcaaaagttacaaaagataaggacttgcctgtgaaacgcactcaactaatgagagctgaagattgtttgaaatatcccgatgacctcacagatgggggatgctgattaagatggctacaggaggctcctttcttgtctgacagcccattgagaagctttggtgagatgtgactaacaggccgtgaaggtgtctccatcttctctgacatggtccatgctttgggcaaaacaaacatgaaaaataagtctgaactgacacacatgtttgaatttagttttcagagccatatttgggggaaggagcactggtggggccgtcagcgatgattcctttatggtaaagggtgttcgtgactacttgcgtgactaatcgcatgactgcgctggggggtgagccaacggcaaattgaggtcttgaacacttgacaaaacaacccctgttctgtgggtgaaattctatagagcttcatgcgtaattaaatgaaagtttcacaagagtctacacctcaatcatttaatgccgatatgtagcacaaaggaaggatttttgccacatcaaaatacatccatgaaacaatggagaaatgtcccaagttttcagagtcagagatactcacagaagaaaccctggagttctcttgaccttcatttagtgcctgggactctgaaaagagatcaccattatgctctcctctacctcatactagaggtgaggatgagagcgcacctcatactgcatatcttaattcctctcccaggacaactggaaggaacacctatccgtttgccatgtcactaaaacaaaaatcactcgtgtcttgcaaaaacagttcagatctttctatttaaagagcttatcactatattaaacaaggttatattggagttttgtcatgagatttaagaacatttctttcaagtctttctaactagttgttttagttattgattgctgaataacaaattaactcaaaaattagtgacatcacagtagaaaataaaattacataaagatttttataatgagatttaagaaagatttttcaagctttactaactagctgtactagttaattaattgctttataacaaattgccacaaaatatggtggcatcaatgacaataaacatttattatctcatatagtctctgtaggcagcctcataaggttgcagtgcagatgttgaccaaagctgtgatatcatgtgaaggtttgtctggagctggatgatccctctcaatttggttcgctcacatgtctggcaaattactgttagtttcattcaggaggcctccgttgccacatcagcttctctacagagctgcctgcatatcctcacgacatgggagctagcttcccctacagcaataatccaagagaaaaaaaaaacccacaaattcttttttaacctagtgtgtccaaggtcatgccccaccatctccacaatatcctagtggtcacacaggtcagctctattcagtgtgggaggtgaatacacacaggcacgaataccaggaggcaagaatctctgggagccatcttgcaggctggctatcacatttattaaaagtatttcttaaagtatcttcacctgaccaaaaaatataaaaactatgatcatcgatgtggtcggcaaaaagtctgcaagcgagacaaaaatcaaagaactctatggtacactttgtaaagaacgtatattccatttgactgaaaatattttcttctactaactgatacgtgtttacatgtggcacctgtaagaccaaagtgaagacatgaattaagagattactcaagagaaattgattttagtagataaacaaggttttttgaaacaatttgctcccttttgatcacaagagcaggatttttggcctaaagcatctagaaaactgcagtcttccttttcagtgcatatccatggagtagtctacaaccattcaccactgtgccaggcatagggaattcaagagcaacaaggtgaagaaaatcttaatcagctgattgagaatccattttatggaaagatccacctctttggggaaatggacttgatatttagaaactaaaacaatataaaaattttcaacaatagaaggacagaaataggatatgaattaaacaccaagcctgtggtaaatttgctttcagtgaaaaagatgtagaagaggaaaaaaaaaataaggaagagacgaaaggagaaagaaggagcagtggacgtagctgaggagaattatttccaacttttgaaaccaacagttgaacaattgagacttatggtggtttagcactacagtcaaaacatcttgtctcccaccccaacttctatgacctaaataaatgcagagagatagcatatttatggattacaaaactctatattgttaaaatggcaatgctgcccaaattcctcccaagattcaacacaattccaatcaaaatttctataagcattcttataaaaattgacaagctgattctaatatttgtatgaaaattcaaggaacctagaatagccaaagtaattcgaacaaagaacatagttgaaggacttactctatttgacttcagtacttactataaagctatagtaattcgttctgtttaatattatggtaaaggtaggcatatagatcaatgaaacagaatacagtccagaaatagaccagctgagttttgacaaacaagccaaggcaactcaatgggggaaaataaagtctttttaataaatgtcattcaataaactatccatttttttaaaaaaaatcaatcctactccctaccatacacaaaaatcaactaaaaatatattccacatcttaatgtgaaatgtgaaactatgaaacttctagaagaaaacacaggaaaaatatttgagatcttaaggcaagcaaagatttcttagatgtgacaccgaaatcactatccataagagaaaaaatgttggtaattgaactttatcaaaatttaaaactttaactctttggaaagcaccaataagaaaacaaaagactcataaaaatatttacaacatatttatctggtaaagaactcacatctaaaatacagaaagaatgcttataactcgacaaaatgtaaacagacttttgaccaaagtcaagatatgaatggacaatcaacacatgaaaagatgttcaacatcatttgttatgacatatgtatacactgcagattaaaaccttaatgagataccactacacgcccattagattgcctaagattaaaaagatcgaataatacaatgagcctgagattcacttaaaaataaaaaaaataataaaaaaaaaagatcgaacatactaatctttttaccaagtgtttgtgagtatggggaagtggaactcatatactaatgaggggaatataaaatagtacaataatgtggtttgactgtgtccccacccaaatctcatcttgaattgtagttcccgtaatttctacatgtcctgggagggaccctgtgggaggtaattgaatcatggggcgattttccccatgctgttctcatgatagtgagtgagttctcacaagatctgatggttttataagcacctggcatttcccctgctggtactcattctgtctcctgctgccctgtgaagagaccccttctgccatgactgtaagtttcctgagacctccccagccatgagaaactatgagtcaattaagcctctttcctttataaattacccagtctcaggtatttcttcatagcagcatgagaatggaccaacacatccaaccaccaccaaaacaatttggcagcttcttaaaatgttaattatacacctaccttgcaactcagtcatttcacttctaagtatttaaccaaaaggaactaaaatgtacgtgcacacaaagattgcacatgagtgttcttagcagctttatttatgatagcccaaactggaaactatttatcaacaggtgaatagttaaataatggtatcatatcatacaatggaatactattcgttaactatagtgatgaactattgacataagcaaaatggccaaatcacaaaatcattatgagtaatgaaagaaaacagacaaaaacagacaatacagagttaacaattcattcctgggcatgaacccagagaatgcatataaccactaaaaacatttacacaggaatgttcaaagcagcattattcatatcatcccaacatggcaaaccaaccaaaatatccatcaacaataaaatggactttataaatagtggtatgttcccataatggaatattacacagcaggggtccccaaaccccaggccacacagaccagtaccagtttgtagcctattaggaaccaggctgcacagcaggaggtgagcagtgggtgagcaaacattaccacctgaacttcgcctcctgtcagatcagtgatggcattagattctcgtaggagcacaaaccctattgtgaactgcacatgcaatggatctaggttgcatgctccttatgagaatctaatgcctgatgatctcaggtggaataattttgttcctaaaccatcacctcccccaacccactgtccatggaaaaattgtcttccacgaaagtggcccctggtgtcaaaaaggttggggactgctgttatacagtgaacaaactacctctacatgcaaaaacatggaacattacaaacataatgttgaatgaaaaaagatagtcaccaaagagcacaaaagttcaactacatttatataaagttcaaatacaggaaaaactaattcataatgttaaaaattatgatagtgcttactattggggtgaagtggatagtgactggaaaaagcacaagaggtgtgtctgaagtgctggtgatgttctattttttttatcttggtgctggctacaagagtgtgttcgctttatgaaaattcctcaaatgtacacttattatttggtacatttgtctgcatttatgttatatgtcaataaaaaatgtaccctgtaaaatcatgttttatggttagatgatgcagttgaaattgaaaatgatgggttttgtggaaatacagatgttcagccaacaggaagaaaagtgacgtatacttggagttgacaggatattactggagataaatatgtcattccttacaacagtcacagataatgataaaggcaaagggaagagaaagctaaagaaggaatcttggtgaatgtttacctgtaggtgttggaagaagaaaacaaagagatggaaaaggaccaagacatgcatgcacatagaagccaggctaaagaatgcttcaaagaagagacaggggcagctaatcatcaacacaaaagcagcacagtggttaagagtgtgggctttggagccagaatttctggattcaaatcttccaattttcatctataaaatggggctattagttgatactacttca

SEQ ID NO: 8888 - DNA, 14154 bp, Homo sapiens
tcagggcaggacacagaccccagaagggcttaaagggcatttcccagtcccccgtatccctcagatcttggcccctctgccctcatagaggccaagactccctcagacaaatgcttgttcctctgaaatgcctcctcctgactcctcagcaagagctgacctctgcttatctccccgacactccttgtaagcattcctgctcgcctctgcagctcctgccagttgctgaccctggggaaagcaagagtggatagagaggagaagagaggagaggagagggtgggaagggttgcgaaggaaggtaaattgttaacacctccccttcctatggtcacagatcatgagtatctttggccatttgggtggctataacaaaataccataaactgggtggcttagcaacaacaaacatatatttctcatagttctggaggctgagaagtccaggatcaaggcactggcagatgcagtgcccattccttggttcatagagagtgccttcttagtatatccttgctggaaggaggaaggcagctctctgtggtctcttttgtaaggacaccgatcctgttcatgacagctccacccccatgacctaatcaactcccaaaggccccctgtcctaataccaccaccttgggggttaggtttcaacatatgaacaatgtggggacacaaacattgagaccacagcagtgagtgtcgaacttggactctgagatttcctatcccctggtgcagggcagtccccattacaccagattgctgagggcagctgggaaataagctaaggacggtattgactggggtcttccttcgataacgattaagaagttggaaacaggccaggcatggtggctcacgcctataatcccaacattttaggaggccgagatgggcagatcacctgaggtcaggagttcgagatcagcctggccaacatagtgaaaccccgtctctactaaaaaatacagaaattagccaggcatggtggtgggcgcctgtaattccagctacttgggaggctgaggcaggagaatcacttgaacctgggaggtgggggctgtagtgagccaaaattgcgccactgcactccagcatgggtcacagagcgagactccatctcaaaaagaagaaaaaaagaaaaaaaagaaaaaaagaaataaaataaaataaaaagaagttggaaacaatcacttgtagcgttttgttcagaagttcccataggaaggtcagagaagggtcattgaagacttcccaatgggaaaaaccattcatttccaggatccatactaacttctttctaaaatttaaatcaaaatattggaatgaaagtgcaaacagagaagttcacccagatatcaggtagcattcacagccagccacatttttcaccctcttcacttggagatttggtcttgagtaaaacgttagagaatcagagaacatcaggggtccagggcctctgaagatgtgaaaaccaacctccttgttttgcaaatgtggaaggaaaagtcccacgaaaagtccaagaatgtgcccaatgttataaagagacttgccttcatattcaagaggttcaacagtcactgctctggggctgccataaagatggtctccgctggctatctttactgtcttcactccttttatttgcagctgagaatttctaattctgacacaaaattctttttcatttttcccttttttcatctttagctaagtgggagacaagcttcaaccacaaaggcacccaagagcaagacttctacgtgacctcggagactgtggtgcgggtacccatgatgagccgcgaggatcagtatcactacctcctggaccggaacctctcctgcagggtggtgggggtcccctaccaaggcaatgccacggctttgttcattctccccagtgagggaaagatgcagcaggtggagaatggactgagtgagaaaacgctgaggaagtggcttaagatgttcaaaaagaggtactttcagactaccccagggccagcctaaacccacacagccccagggagacacacacgccctaccagggccacacagcactggtgggaaggactcacccagccaaggagctgcctccaggcccagaggcatcctgtgacatccaagtcctgggggcctagcccagttggagggacaagagctggaaactgggttccttagggtggtgccagagtgggcagagacctctgggcagcccacgtccaagtccagagcaaggggaggctcatcctagaaaagaggccagaggagccataaccaccattgttccttgggttaaggagtccttttttaaaaccatcaaaactaagaatccagtgcattatgaatccaaggggtgaggctcagtgtgccaatgccccagaacagtctaagaaagctccttttccctttccaggcagctcgagctttaccttcccaaattctccattgagggctcctatcagctggagaaagtcctccccagtctggggatcagtaacgtcttcacctcccatgctgatctgtccggcatcagcaaccactcaaatatccaggtgtctgaggtgggttcagaagctcctatgcatctgcttcccaagatctattctgttctattctttctattctactctaccccatttcattccattccattccactcaactccactccactccactccactccagttcactctattcaattccactccactccactccagttcactttattcaattccactccactccactccagttcactctattcagttccactccactccactccactccagttcactctattccattccactccattccactcctccactcctctcatccactccactctactcctccactccacatctccactccactcctccactccactcctccactccactcatccactccactcctccactccactcctccactccactcctccactccactccactcatccactccactcttccattccactccattccactcctccactccactcttccactccactccattccactcctccactccactccactctattctattctattccattccattctactctattctattccattccattgcagtcaactccactccactctctactattctattccactcctctcccctccactccattccattgcagtccactccactgcactccactcctttattctgttctgttctattctattctattctattctattctattctattctattctattctattctattctattctctccctctccctctcttttcccacaagtagtgaaagtttcactttgtgtcttatccttcatgtaatgggaagccatatccaccactgttccttgagttaaggagtcctgttttaaacaatcaaaactaagaaggcacttcctagctatgtgatctccaaaaaatacttgactctctgagcttcctttctctcttctataaaattgaagaattacaccttgctcaaagatgccatgagaattcaatgacagacacatgcgaagtcaccccccagcacagtgcctggggcagagtagctgctccattgttccatttcctacttgctccatggctcagttgaacagatacttagaggttgatgcccataggcagaagctttgccatttgctatgatgacttcacctgcccctggtggcctggtgatgcctggtgtctcccctgcagatggtgcacaaagctgtggtggaggtggacgagtcgggaaccagagcagcggcagccacggggacaatattcactttcaggtcggcccgcctgaactctcagaggctagtgttcaacaggccctttctgatgttcattgtggataacaacatcctcttccttggcaaagtgaaccgcccctgaggtggggcttctcctgaaatctacaggcctcagggtgggagatgaagggggctaagctatggcccatctgtatgctggtagctagtgatttacacaggtttagttgactaatgaggcattacaaataatattactctatgatgattgcttccacccacacgactgcaacatacaggtgccttggggaaatgtggagaacattcaatcttgccgtcactattcatcaatgaagattaacactgagatccagagaggctggatgacttgctcaagttcaccagcatggtagtggcaaagagaggtccagagtcctggcccttgatgcccagctcagtgccacaaagctcaataggagggatgttccagtggatgagggccaccaggaagcacaggtccaaggctggtcccacacttatcagcagcaacaactgtcagttcatcctgcatgggaaaaatgttggaatgggagtctgaaatggggctactgtttcagtcctaatgtgctgtgtgacattgggacaacactttccctctctggacctcagtttccctctgtatacaaggatcagattcttgctgtgacccaagaactcctgaaatcatatagaaaggctggggtgggccctgtcattcgtggttgatttcaatacactcaagtgccattcatcctttaagaaaaacatctggatatcaaggtggaaatggcccatttaatgattgattatatcattttgtggatatagttataatctgatgggcctggctgggagtggaagaagggaagccttttgcaaatagtagagtatcagttgcaggtgccaatgactaactttttgaattctatgttggcattaacaataaagcattttgcaaacactggttataactgtctttatggaggcagctctgggaatggtgacattgatagcttaccatgctccaggccgggtgcctggcccttcacctggatggtcgcatttgcccctcataagactcccatgaagaaaggcaccactgttatcccatctgttattcacagatgggaaaggcaaggcttgaagtggttaggtggcttacccagtcacatatcttctaagtggtgcagccagaatttggcggggggagtgcgaccaagaaccctacactcagtcctgtgctctgtgctgtggaggagagatgaccaggagcagaaacttcattcagggacatctcaggcaccagctcccccatgagccagctaagttccctccctcccttcaccaagcaccatgtgtttcctcatgtgccgaatgaagaggattagatactcaagaatggaatgagtgggtgagtgagtccttcgctgcacccaagtctgattttctgtgcgcctgctcaccccaccctgcatgttctaagcatgcttccataaggctgtgccccaccctctgattctagagtctggactgtatcagaggtgagtgcctactagaggtaacaaggtcaggaccccaaaccttgtccatcccccaaagtactgagcccccaccatgcaccagcccatgccagatgctttgcacttgtgatatcacccatcccttgacaacccagcaagttctattattgttcccattttacaggcaataacataagtgctttcccagggtcccacgctggtgacagtgagggcccagggtctgagagcccagatcgcacatgtgcgggctggtggcaggggagatggcagcaaccagactcagacatttctctgcagttgtgctgtgggctcagggtggctctttatgaaggggccccttcatggggtcatgcactcctgtgtgttttcccttgcatcatgccttgcctgtcttggcaaatatttctctggagtttacccagccagtccaaggtcacagggaagccctgtctgtgtctcacacagaaggtcaacgtccagcactgtccaaactttactcagcaaacagtcacaaagcagctcctgtgtggggggtcaggggtgggctcactgtggtctctgctgcatgtcacacattgaagcactgtgctgggggtcatcacaggctgtttaactcaattgtcacatgagcctgggtrcacaaaatggtagagcagctcagagagagatggacagacagcatgaacctctgaggagtcaggttttcttggatgaagggacactaagatggctttggagcgtgagaaggacytcacctagcaaatgtgggaaaggagtgagacctccaggcagagggactggctggagacgagcgtgatgtggtgagccatggagtgtatgggtccccacagaacttcagtctgggcctgcacagggcatgtggaggagacaaggaggagggaggtggccgtgccggcggttcagtgacagagatcctaaatgggaggccaatcctaaatgggatgatctctttcatccyaatttcagggtagtttggtcatccrcgccacattccaagtgtcccctgggccctttctctccctcacccycctgtctgcacatgagtagatgcctccaygcagccctcccaggacgctcacctctatccacagatgcttctccaaaacccaccaggccctcccatggaacgagctcacctacagggtaaaatcaggtcacggtcacatatagcctgactactcccctcaggaccctcattcacagccactgtattaatttgctggggctgccaaaacaaagtgtcctcatctgggaggctgcagtagatttgctgaaattgatttgctagcgttgctgaaattgattcaagcttgattctggagcttgaatcgaagatcaaggcaagtgcagggctggtttccctgaggcctctccccttggtttgcaggtggctctcctctccctatgtcttcacatggtcctcctctgcatgtgcctgagttctaacttcctctcctctcctcatctmcaccagtcttatagaattagggccccccartgacctcattctaacttaataacctctttaaagkctctatctccaaatacagtcacattttgaaatattgagggttaggacttcagtgtatgaattttgggaggaygcaactcagccaggctcactcttatcattacagctgcactagtgccatgcctggttcccagtggacaccccaggaacagccatccatccagagtgatattctgtgacatcccctacactccacagctcatcacatcacactcgtctccagtcggtctgtctgcctggaagtcccacacctgttcccacatccactgtctgggaggtccttttcatgcttcaaagccagctcagtgtcctcctttgtacaaaaaaatgtcctgacctctcagaacttcattctttctctctttctgtcgatctttgtctgaactcctctatcattttgtgcacccaggaacgtgtgacaattgagttgaacaggctgcaaaaacgaaaaagaagaaagaaatgctgagttaaacaggctgcaatgacccccagcacggtgcttcaatgcatgaaacgcatcaatgacttgcagcagaggccacactcagcccccctctgccctttgagtttttgcagctcttgccaagatcattcttkttcttagaaagcccaccattattttcctytctagccatatggattctaaaagttcctcttgtgagctgtaatcagaatgcagagaagtaatacaaggttagggcccaggactcyttctcccacctctccctgcagagactcagatttttttaaaaaatgaccttggtcttcrggggaagaacttcccaccacagtgaacagccatgcccagcctacacttgactgtgcggcttacttagctcatccatccaaaggctattcctgggttgcctagtggaaatccaggcatggagctagtgcaagcacaatgataagagtgagcctggcagacactgaccccagcaataatcaggtaaacaaataaacagaactacaaactatgatgacaasaattcatccatccacagatattcactgaatggccactgtgtgcctggcactgttccaagtgctgaagaaaaatgaagaaaacaaaaatccctgcccttatagaggagacattataatgtgacaagataacataatgaaaaagaatgaagaataaaatagaaaagtaaaatggattgcatgtcacttgatgacaagtactgtggaatgaggcygtcatctaaayggagcacagaaagtggaacatggcgacatctcagccaaaagacccggcagacaccatcttggccaagggatcgaggttggcatcgccagctgtgagcagtgctgacatcttattatcttcgatatggcgtcatgagcaggctgcctcctcttggtgggatcttcccccaaacccagaacctcagtctaatcacaagaaaatgacagccaatcccaagttcagggacatttggcaaaatagcccaccactcctacttaaaagtgtcgaggtcttgaaaggcaaggaaaccctgggaaatcgtctttggccggaggaaactcagcagacatgacgactaaatgcaatgtagaatcctcggacagaaaaggacattagtaggacagctggtgaaacccaagtaagtccaggctgtaccaatgtccacttcccagttctgaggaacatgctgtggtctgtccacatttacattaggagaagcagggagagcgtatatgggacctctctgtattgtttttataacttttctgtaaatccaaaactgtcttaaaatagtttttttaaattatactttaagttctggggtacaggtgcagaatatgcaggtttgttacataggtatacatgtaccatggtggtttgctgcaccccctttttttaagaaaatgtttcaaaaagaaaaacagccaagtaggggagggcacacgagtggggttgggaattgcaaaggcagaagcaggagaccagttaaggaagaaaacggggcactaagagagacaatcaggaggacctgctgcagccagggccctgaggggctccctgaggtggtgccattgaagcggagttctgagggacaatcaggtgtagacactgtgagtctcagaagtgggaaaaggggagtgctgtgcacaaaattgagagacggtgcctgtggcagcagctgaggagggaaagagaaggtggggtgggaggcccatcccttccttggccacaaggacactgagtagggtgctgagatgggagtaacagtaataataacaggcagcacttggaggctgcgtcccgtgtgtctggcactcgcctaagccctttgtgcacattggctgagttaatgcagaggtgaactgagaggcacctggggtaggggctgggggacaggaagcaggtgacatctccagtcctctccagcgtccttagagcaggtctacagtactgatccttctctgccacccttctccaagaccaccttggtgggagtaaggggctctaaggtgacaacacacacaggagccacagacacaagacacaagacacttttgactcccaggagaacctagtatgggcatccacacacccttcctgatggtgactttttatgtagacatgcagagtgcagttaaccagctgttcctgcacacatctggattgctactcacacatctgtgcacacacacacacagcctcctggagcactgtggcttctgggtggctaacacagctaccacctctggttgtgctgagctgagcacccattgcctgctggggtggggagagggcaggcactttccctgcgcgaccccgtttaaccctctctgccccactgatgtggtccctgttgtccccgatgcacagaggaagaacctgtgtcaggacccccagagcggtgtctccactaagcagaagtctctgtttctctcctggcctctcccagaggggctgctctgaagcatgtggatttgatcaggataatcaaggtaaatgatccttatcttgatccatcacaaatgttaaggtacaaggctgtggagatggagagtgggtggagtctctgctgcccggtatcctaagctgggtgatcgcaagcagacacacacatgaccacctcttgggccatgcagggggaatgaatgtaatgaggccgatgttacagggttattgaaggctcaggggagaccaggccaaaaaaaaaaaaaaaaaaaaagctatgacctgagacctccctatagcagtgtttctcaaactctgattaacgttacttgaggagcttgttaaaaatacatactcctggccctgatcagataaatcagaatatttgacacagagtctttaagctccccctcgggattcaaatgcacacagatttttggtgctttgccgcctacagtacaagagagggcaggactgtcctgttcagtgcactgtgacccggacgctcaggcccacggaactcccctactccccctgctccctgcggtgccacccacctagctttcgtgcctgagggtggtcctcagactcctcctagaacaggcccagaggctcttagctatgtaagtattcattcctccaatcactgcagagcactcaccaggtaacaagcacgcacacccaggcgagttccccatgctcgtccccacgttgatatctcagactctacaagtcttcagctgctgcctaggactctgtaagtccttgagcttgggacccctaccacacacaagcgctgggcgtgccccacaggcggggaagtgctggccatatacacccagtgaagtgggaattccagataatgagtaactttttagcaaagtacccatgccctttgaattgtgaggtgtttttgtttgctaaatctgacaattctacctgtagggaacagggatgattgagaagcagctgctccgatggccagaagccaacagccttccctgcagagatgcgggaagtcccagggacagcaggaaagtccaggcactgcactggcagtgggattggggcttgggtcagaagagggtcagggccacaaggaaggaccctgggaggcttcctgctacataatatgagggccgggagcataacaaaggattgccttatccatgattgcatcatcaaactgaagcctgagacagaacattctgtgaggtggccttgttcactgcagaggagctgactcacacagttttgtctgggaagttgcaacctgtgccaggagtagccagcctgggagtaacaaagaggcttttctactgcaggttttcctagagctcctctccctccctcccctggccaaaggtgagctctgcagggagggtccggctctaggggactttgctcctgggcatcctagctgcagagattggtggggcttgtccagaaaggggggtcttctggacctggggatgatgcagttgggcctcagggtactgggaggccagtaggggtgcttcaaactggccagtaacctgaaggactcatattcttaaggatatcctggtggccacgtagaaaacagtcaggtggggtgagggtggaagtaaggaccagctcagaggtcactgagggtgcagccagacaggctgggacccacgtgggcagcagaggtggagagtagggatgtggagggggagacccagccccacgctgggggccctgaggggaggtggaggctgagccaggagaagaggcaccacccactcacttcctgcttgctgaatgactgtgaggagcaggagaaggagcaaaagagcaagtgaggaagtcaagggggttatttgggggcaatgctccatgtgagggtagctaaggacaggtgccaaggaggcccctgtgtcaaaatcccaggtcaaaatgttagttaccagagacctctgataaagacagagccacaggtaaaacgcagcggcacaacccctcgaccctaaaatcagaagcctatctgtgtcctggcaaggagagaagcacgagtgatcatccacaccgccaggacgcaagcccgttatttctgatgcaaaacccaggctccctccagggctggcacagaggactgccagaggagtcagggggcctccaccttccccagctgcgcaacctcagagggtgtctccttatctctggggtcactgtgtcttcatggccaggctgggcacaggtcagctgggagtggagctgtgtttgcagggaaggaacgagggtggacgtcgaagccaacctgcctggttcagaatcctggctcagcttggcacttaccagcagtggtggtgaggccttgggaatgagctccgcctccctgtacttccgtttcctcatatctaaaattgagggagtaatgggacccgcctcagtgggtgttcatgtggattccatgtgctcttaagcataaagaacagagcagctatgatgaccatcatctatgtcactgggcctccggaagtgagggaaggagaggcagatttgcttaagtagaaggaaggcggaggaaggtagtaaggcgtcagccatgtggcacagattgtattatgagatttactggttttcttacttcgtcctcaaatttccctccttacccacttcccatgattcctgagagtcaagaggacgggagctgtggaatgtgttagtcatctactgctgcagagtaaatagcccatgattatctcacggagttcctgagggtcaggaatccaggattgctgttggccagggcaatcccagaaggctcacttgtggggctgttggtagaaggtctcagttcctccctatgtgggctactcacagggctgctcaaatgtgacttagagagagagagagagagagagagagagagagagagaggcttgtttgtttagtgtccaggaccgagagaggatatagagagaaagcacaaaagagagagagaaaaaaagagaaaggcagagagagagatagagacagagacacagacagttgttgaatgtccaggaccaagagagagacaaaagacagaaagcacaaaatagaggggaaaagagaaagacagagagagtaagggacagagagagggggacacagagagagaacccatggcagaagcagcagtcttttttttttgagacagagtctcactctgtcgcccaggctggagtgcagtggcgtgatctcggctcactgcaagctctgcctcccaggttcacaccattctcctgcctcagcctcccaagtagctgggactacaggcgcccgccaacacgcccagctaattttttgtatttttagtagagacggggtttcactgtgttagccaggatggtctcgatctcctgacctcgtgatctgcccgcctcggcctcccaaagtgctgagattacaggtctgagccaccacgcctggccagaagcatcagtctttttataacccaatctcggaaatgacaccccaccccttctgccttagaaagaagtcactaagtccagtccaatgtgagagaaagtaattaagctctatctcttcaaggaagtggtatcagacatttgtggacacatttgtaaaatgaccagagcgttagaacctcagaatccagcagactaattgccctcatagtagattattaatgttttaaaaaatggatggactagctgaaggaataaatgaacgagtgagtgagcaggatatttctgtctcatttcacatgcagaaaaggcactgaggctcagaggaattaggacatgtgtgaggttctctaggcagtaaggggtgggggctggcctggtttgccagaactcggagatgcagcatgcagcgtgcagcagttctgaaatggaagccagggatggcaagctacagcagccactccctcccggagggagaacggacccaacaccaaggaggaagggatgactcagcagccctcaaaacagagtcaggagttctccctgcttttgccaaaccctctgcaggcacctcttatccatacagggacgcagccaaaggcctagctgtgctgaaggaaatttgcaaatcctgcctcaaatctgcagccagtatctcccccagcagcctccaaaccaggccagcacgaacccagccagagagcagcataggtgttgggcaaaaacaggctattgactccatccttttctaacagagaccagagtcctctggccttccacagagaaggtggggccttctcagggttctctggatctgctggtgtcagtcagtatctatttcttcttcctaagaattcttttttttttttttgag

SEQ ID NO: 8889 - DNA, 13815 bp, Homo sapiens
caatcacagatgacctatgtggctgatcttaggtccacaccctcccagaagtcaggttttaactttagcctctagttctggaagtttctggcctatcatagatcacagatctatcatagttcgtatttttaggctgtccagtggccaaaggacccaagcaaacaaagacactaccattagcaagatattccagaagcccagagctcaccctccattagcttgaacacaaaggccaaaactccctttgttcaattatttactatacaataaggacttggcattttctacaaggtgaaagtctaaaggaaatctgtaaactccaatccaagtcctgttcagacaatatcactttcaactccctgtctccaaatctatattcaaacaccagttcagctatctgttcattgagaaccatttgaaagtcctggaatcctgccatattcccaggatgtctaggttttattccaagttaaatccagactgccacaaggctgaaattaacttgtgttggtccctgtgtttactgtttgcttagtctattccgtaacagtatataaggagtccttcaagaaacagccacaggaaacctgcatctgaatttatgagaaggctgctattctggacaccatccaccacatcaactctaggaagaaccactgaagaaatttcctgagaccaaagtgccatgaaataatggcaacccccaggaagtaatctgttttatcttcaaaaacaggacataccatgtaaattatgattttcttgtgacattggctgtcagagatattagatgcaagctgacagctaatataatccacaggatcctccagccatgcatggtgtcacaaaattcataatttagtgttaatgctatgaacattatattccttatcctactattttgcatgatattgagtttaaaaactaagcttacttctctccagatcctgctttttgaaatttatactttttatattagtgaaattgatgtttataggcttctacaaatctattatggaacaaaggaaagaataaaacaaaccaaaagtcagttacctgggcctggatcattttcttctgttcttggaagacagcattcaactgggatggtctgtctttgtatcttctggccttctcttcagaagtctcagttttcaatcaagtgtgccccaagaaatggtgaaccccaaatccacttcctccctcttcaggttatgttttttgctcctgaggagtcagaacctgtgggttgaagagcaaattcaatgtaagtggtacattttttccaggcccagatactgtcactgctgctaggcactcatcttaaagcaatgcccccaatatagttaactatatacctttgtttggagccccagcggattttatacctgtggccaataatgtctaggattcttaatgtggtggaggtatgcctttcctctgtgacgtttccgtggaaggactgtgaaggcaggtaggaaatgagacccaccatagcaccagcctcaggagatggtgaactcttaggcagattagttttagaaaagagacaatcagcaaggagaggacctggtctttgttttcctttaaatcatgtgtgctcccacacctcttcaaaagtctttgtacatacaccctgtgaagacatgtacttcagtttgaaagccaatgtactgggcaaatcataagcattgtcataaaaacagtactgacaatattttaggaggttttaaatacataaaaagctaaaatacacaataatttactggataattaggtggtgaataaagttgacgtgctctaaggtttctgtagaatggaaaagtgccaattagcagaagaatatgacaaaggttgcacactacatgtaatctctagttacaattaacactagtaagtccaggcacagtggctcacgcctgtaatcccagcactttgggatgccgaggcgggcggatcacctgacatcaggagtccgagaccggcctagccaacatggtgaaaccccatctctataaaaatacagttattccagaagctgaggcagaagaattgcttgaatccgggagatggaggttgcagtgagacaagcctgtgccattgtactccagtctggtcaaaaagagcgaaacctcgtcttaaaaaaaaaaaaaaaaaaaaaaactagtaattgttttaaagtacgtaagttccatgccaacaaaagggggaaatgtaataacaagaaattcatccaaaagaagagaatcaaaaacagagcaaaaagagcaaatacaatgcatttagatagctgttttaaaataaaatgtactaagaaaattacattacattaagtattttatgctaagtaaaaacagagcatggatcccagttaattacattaaatataaatgcctcaaaactgtcagaatggattaaaaattaaaatccaataacatctggggtttattttattttattttaatttttgagatggagtctcactctgtcgcccaggctggagtgcaatggtgtgatctcggcctcccgggttcaagcaattctctgccttagcctcccgagtagctgagtttacaggcacctgctgcagggagccgaaggctcgtggcccgtgggacgtgaccaactcagcattccactggaggctacagatcaaacagcaaactgtttatcatgaatgcaggatgtcagcaaactcatgactgctccggctgatgaaggtttgctggaggcaatcactccctggcgccgttatctactgcgacatctagagaatgcagtcttgcaagactactctggacccctggcgccgttatctactgcgacatctagagaatgcagtcttgcaagactactctggacccctggcgccgttatctactgcgacatctagagaatgcagtcttgcaagactactctggaccgagcagctgaccccttcttccacctccccttctcactgtctcttttgcctaataaatatgaagggctgtgtaaagctcagggcccttgtcccctagaggcaaagcgcccccgatcccttcttccaaatacactcttttgtctcatctttattcccgtgttcaccccactttgtttagtccacctaggtccgtgcaggttacaaatggcaaccagaacagggactccaagcacgcccaactagcagcatccaaacatgggacttcaaggacgtgaatgaagaaggtctgctggagcagaggaactgaaattgacaaggcgaaaggggaccctgggaagagtctgccggcagcagatataaggtcagtgccctaaagaggtactgggagcagtgctttaaagaagtactgggaagttttctgactcagggtaacaagggaaagaatttgtctattgaagaaaaacattatgtgcagttgcttaaagttctgttgagacagtctgcagctcaggttaattcgcagacactaacctcctgcagaagccacaaaaggttattacacataacccatcgtttccacaggcaggcactcttgatgtggaaaattgggatacagcaggagaaggattaaaacaggctcatcaaaaaggtcttaaagtcgattcttctgttttctccacttggagtttagttcgtactgtacttctgccattatctcattattattctgcaggacagcaagctgaatctaaaaatctgaaagaatttgttgacccacccacagctccaattaaaaataaaaaacaggagagggaggataaaaattggcctatactgcctccttcagttgcagaaacatctgtactgcctccttcggtggcagaaatagaaaccctaatacaaagaatttaatgctctgctgccatagctggagagcccttaggacattgtgcttttcctatttccatcaggcctgatccaaaaaatccacagcaggttattcatgaacacaccccactagagtttaagttgttgaaggaattaaaagcaagagtggtaaatgatggcatacagagcccattcaccttaggattgctagaatctgtgtttggtgctatgcgttttttaccctttgatgtgagacacttggcgcgaacttgcttgtctgctagtgcatatctgacatggaatttaaattggcaagaaatgtgtgcagaccaggctaaacagaaccatgctgctggacacggagacattacagaggatatgctgttaggtcatggcccttattcagatgtagaacgtcaaatggcactcccagatgctgcttatcagcagtgtacacaggccgctaaatgcgcctgggccacaatcctgaagagggagtccctgtacaatcctttttacatatcatgcaagggttgcaggaaccctatgcacaatttcttgcaagattacatgaggcactgaagcgtcagattcctcatactgtggctgcagaaatgctaaccttaactttagcttttgagaatgcaaacgtgtactgtaaacgtgcactggcaccagtgaggtgtacaaaaaacttgggaaattttctcagagcttgtcaggatgtaggaactgagattcatcgatctgcaaagttagcataagcaatggctaatttagcagttgacaaatctaaaaggagccaagggtcaaaccctaaagtgggaaaatgttgtaattgtggaaaaactggacatctaaaaaaggaatgccgccagatctcaggacagaaaggatattacaatgcagttcactccctagcagaaaaaacagcaggactctgtactcgccataacaaaggaaatcactgggctacccagtgctgctcaaaatttcatcagaatggcaccccattggtaaatgagatgggggcctgcacccgggcccctcaaacaatgagggcattcccaatgcagaccacaaccccacttcagggatgggttcctggaggcacattgattccctcaacccaggaacaccaggaagtgcaggattagatctacccaccagagaaagaatcacattagttaggggagacaaacctatttgggtatttggggacctttaccgacaggatacacaggactaattttaggtaaaagctgccttaacttgcaaggcatcactgtagtcctaggaatgactgactccgattatgaaggagaaattcaagtagttttaatgtcacaaaatctttgggtttttgaactgggagaatatattgctcaattattgcttattccctgtgaattacacccttccccatgaaaagagaaatgaggaaataaagggtttgggagcacaactacatgggaaatctatctttcccaacccatagcctctaatagacctacctgtgtagtacacattaaaggaaagaaattttatgggcttatggacatgggagctgatgtgtcagtcatatctataggatgggcacatcaaacattacaacgcatgttgaaaaaacaaaaagggggtataggaggccaactaccacctcaatcaaaactacatttagccttatttactttaaattttctgactcccggtatggatggtaagactccagcagaaagacattggcaagtgttagaggaaaaaagcaaagtttatctgaaagtgttatggaaatccccagaaggacaacaatggaaaggcccggtagatttactgacctggggaagagggtatgcttgtgtgtttacaggagatgggacaagccatgtgggtgccctcaaggtgcatgcgaccatggaatgggagactggaggaacccagggtggccaaccatgggcccagtccctcctgtacgagctatgagtcagctgagcctgagtgcaaagatggagagaaggccaaccagagtcatgatgacatcaacccccataacctggggacaactcaagaaaaccacacaggaagctgagaaactactggagtgtcagggacaggcaaaacccctgattccatgctcttggccatgttagccataatgtcctgtgcactacgttttccctgtgcacaggcaaaaacatattgggcatatgttcccaatcccccagcagtatggcctatactttggagctcactcctcctgagatttatcacgatcagggagagtgggctccaggacccctaactccccgtgacatagaaaagttagactctcagaacaatgtcattaattataccactccactggaaggactccctttgtttatcaccacaaagacgtcgctcagccatagctgtcttgcaattcaagctcaaacatggttgagtcactatggaaaaattatgtacttattaggtcttggttctattaatgtaactggtgtgctaaccaatcattcccagtccagtcaccctaattgtgctgattatacagaatggattccattcaatagttcctaccccactctgtggacccagtgtcttgatccactggctagtaaacaatatatgtcaactgaagacactgtggattgggaacctaaaggtcaattagatggaaaaggtgaaagtcagaaatcatggcacaaacttcactggcattggcggcaagcttttaatgcttcttctttatacaacagcagaatccaatcccagtctgctgctcagattgcttggcatggagcaggctttagcccacctcttcctcagttgcattatctggggaggaaaggaccaattcaagaaactatatggaaggcagcactcccatttatgaatggcaacatctggattggaacactgtctaataatagcaatagtaagcaacacagtcttaatgttgcatttgtaaagaatatcaccactcagtttacagtttgtgtttttaatccttatgcctttttggcagctaagaagaaccagcttcaggtaaacaatacccaattgacctgtaaatcttgccagttatatcacactgcattaatcatagcacattacgaacacataatatctctactttgataatgttgggttgcatccctgggctatggattcttgttaatctgtctgagccttgggctgccacacctgctttgcatttttgtaacacttcttctaactcascttactcactgtgtccatagagccttaggcataatttttgctattgtttccttggtcaaactaataacttctgttgtgatatcttctgtaactctgcataattctattcaaacatctcagtaggtggagaactggacacgcacagctgaccaagcgaggctacttcagaataaaattaacactgagttacaaactgaagtggcaatgttgaaatccatggttctgtggttaggagaacaggtacaaagcttgcagttgcagcagcaattgcgtcatcattttaatcacattcatatttgcgtaactaactcagaatataaccaaagtgagtatccgtgggaccttgtgaaagcccatttgcaaggagctttcacatccaacatcacctttgatattggtgaattacaaaacaaaattattgatttaaataggcaaactcaagaatttcagccttctttagaagaytggaccgaattccaggaaggcctggagagcctcaacccttggacctatctaaggcaccacattaacatcttatatgtagttcttggaataatgttgttttgtctctgtcttcggtttatagtctgtaaaatcggatggaccaccaattggagaatgagagcykcccagcccagccttacattctttcaattaatacataaacagaaagggggatatgcagggagccaaaggcctgtgggacgtgaccaactcagcattctgctggaggctatatgatcaaacagcaaactgtttatcatgaatacaggatgtgagcaaactcaggactgctcctgccaacataaggtttgctggaggcaatcactccctggcaccgaggttatctactgcgacatctagagaatgcagtcttgcaagcctactctgaactgagcagccgaccccttcttccacccccccaccctcctatctcttttgcctaataaatacggagggctgtgtaaagctcagggcccttgtccactagaggtaaggtgctccctgaccccttctcccaaatatactcttttgtctcctgtctttattcccacgttcacccccatttgtgcagtcccatgggtccatgtgggttacggcccgccaccgcgcctggctgatttttgtatttttagtagagatcggatttcagcatcttggtcaggctggccttcaactccggatctcatcacacacccgcctcagcctccccacatgcggttattatagttgatatgtctgaaccaaaatgatatgggaagcttgagaataaaaggttggagacaatatgccacagagagagtaaccaaagataatctgttataactatatctcagacaaaactgaccagaaatcctaaagaattaacagagagaaagagaaacaatgctcactgaaaagaggtgaaatttggctcttcattcatagaaatacaccatatgtatacccctaacaacagtcttgaaatgtatacagcaaaaaatagaaccaaaaacaagaaatagaaaattcagactaaagactttaacagacctttcctagtaactgacagaacagaccatcaacaaacaaaataaaatttataaatgagaaagaaatgaatcttttatctgaggaatgtgactccctttaaattatcaggtctagagaggcattaaaatgtgacagcagtctttctgataggggttcccctgaaaaaaagaaaaaagaaaaaattaaaaactaaaaaaaaaatttaatgtgacaatagtcacatctcatttccccctcaagctaaataattatctcttaaagccacttgctatgtaggctctagactaactcacactgagtagccataaaatgccattcactggacatcctaactcataaaaccccatagttaacaatgtacagccaattgttaattgatattatttctgtaaaccaatgagaattcttgccaaacaactttatgtcagctcacggtttgttcccttttgactttaaaacctgtttctaacaaaatcctaacagagcacttaaccaaggcaacctgaaagtattttcccaggcagctgtcctcattttggctcaagtaaactctttaaaattgtattttgtgcagtttcctcttttaggctgacataaacgatatcatttagaagaactcgaatatatttttaaaattagatttactgagataaattttaacagttttaaataaatgcaaagatgtactataaagatgggctggaaaacaaagcattttaaaaatgtcaagtctcccaaatctacagattcaatgaaatcacagtcacaatcccaaactgatactgaaaagtttaaatagctataaacttttttttaaagtttgaaaaaaaagttagaagacttgccatatcagttatgaggacttataaagctactttaattaggacagcacaatattagtacaataacaggcaaataggacaaaggaacagaataaaatccttataagcagaattaagcacatatagagactcaatggcaatgatagcactacagggaagtagataaaagctgtcttttcaataaatggaactaagggcgccgtggctcacgcctgtaatcctagcactttgggaagctgaggaaggtgtgggggaaagagagatcagactgttactgtgtctatatagaaagaggaagacataagaaactccattttaatctgtacaaagaaaagttcctctgtcttgagatactgttaatctgtaaccctagccccaaccctgtgctcagaaacgtgtgctgtgttggctcaaggtttaatggatttagggctgtgcaggacgtgctttgttaaaatgtgtttgcaggcagtatgcttggtaaaagtcatcaccattctccagtctcaagtacccagggacacaatgcactgcggaaggccgcagggacctctgcccaagaaagcctgggtattgtccaaggtttcctcccactgatacagcctgagatatggtctcgtgggaagggaaaaacctgaccatctcccagcccaacactcgtaaagggtctgtgctgaggaggattagtgaaagaggaagacctctttacagttaaaataagagaaagccatctgtctcctgctcctccctgggaatggaatgtcccggtataaaacccaatcatacattctatttactaagataggagaaaaccaccttataactaaaggtgagacatactggcggcaatactactctttactacactaagatgtttgtgtaaagtcaaacataaatctggcctacgtacacatcaaggcacaggacctttccttaaacttatttataacacagagtcctttactcacatgttttcctactgaccctctccccaccattaccctatagtcctgccacacccccctcaccaagatggtaaaaatagtaatcaataaatactaacaaaactcagagaccagtgccggtgtgggtcccccatatgctgaacaccagtcccctgggcccacttttcttcctctgtactttctctctgtgtctgatttcttttctcagtctctcatttccaccttgcaaaaaatacccacaggtgtggaggggcaggcccccttcaggcaggtggaccacttgagccagagttggagaccagcctggccatcatggtgaaaccccatctctactaaaaatacaaaaattagccaggcaaggtggcacctgctggtaattccagctactcgggaggccgtggcacaagaatcacttgagcccagaaggcagaggttgcagttgagccaagcacgccactacactccagcctgggcgacgagagcaagactctatctaaaaaaattaaaaaaaaaaaaaaaaatcaataaatggtactggggatggggacagaaagttaaaacccccctcacaacatacacaaaaaccattttagaatcaactgtcaatttcaatggtagaaacatatcaataaagctttaaagaacattaatataggagaatctctcaatgttattagggtatggccagatattttaaagaggccacataaagcaccctataaagcaaactatatcctgctaggggaactgtaagtggtacaaccactttagaaaacagtttgacatctatttagacggagtttatacacactctatgaagcagcaattttcctccgaggtgcacatctagatatacatctctgcctcccccatatgagagcacatatgaaccaaaagacatttacacaaattttcacacatgcattattcttaataatacaagctttaggtaatacaaatgtaattaataatagaaaaaactgctatattttacataatggaatgtgatagaaaacctattatacctttggtccagcctgcaagaatgctttttacatttttgaaagactgtaaaacaaaaagcaaattagcatatgcaagagaccatatgtagcctgcaagccctaaaatatttactgtaaattcgcctgatccttgtcattgagcaaagaaaatatactcagatgcaacaggaaagaccctcaccaataatgagcaaaagaaggctgacacaaaaaaagagtgatgtacaattccactgatatacagagtttaaaataggcaaaactgtattaactacaatgataaataatgattaattatataaagaaaagcctaaaatacttttcggtgtgagaatggaaaaagactcacagaacaccactggtgtgctgaccatattctatttcttgacctgggcaatgactgcttatacatatattgcctccatgataattaaattgtacatttaaaatatataaatgtagaaaaattaacaaagtaaaggaagagatcaaccataccaaacagtttacctccaggaaaggtgttaactccagacaacacaacgggtgaattttacaggtgggtaataaaacaagaacgtccactaacaccctattttcctactttatactggaaagttgagccaatgcattaagataagaatgaattataagcattacaaagtaagacagaaaattaatgttattttcaggcgatatcatcacgaacatggaaaaagagattcaagaaattacatatttaaaaaagaaaatgctccctcagaaactcccaggcagattttcacatacatagttggctagaattgcaccatacgcctaagctcatttccatgtcaaacctatcactagcaatggcaattggaaccagcaagattggctaagaccaacaaggccttactaagaaactgggatttgggtcgccttgccacagggatgaatacttcacgaaatggagattctgttaagaaagtgtgaatataaggcgggcaagcaacactcactatatattaagaagtgaaggccgggcgcggtggctcacgcctgtaatcccagcactttggaaagccaaggtgggcggatcacctgaggtcaggagttcgagaccaacctgcccaacgtggtaaaaccctgtctctactaaaaatacaaaaactagccgggcgtggtggcgtgggcctgtagtcccagctactcaggaggctgaggcaggagaatcgcttgaacccgggaggcggagattgcagtgagccgagatcgcgccattgcactccagtctgggagacaaaagtgaaactccgtctcaaaaaataaaaaaaataaataaaaaataaaagaagtgaatgcagaggttggcaacattttcgattttgccggccacgaggtctctgtcacaacaactcaaccgctgcctttgcagccatagacaatatataatcggagggtatgactgaacttgaccccccgatctgtaaatagccaccccaaggatcagaagagtagatatatggtttcgaactaatgctgggggctgtgtcgccttttgccccagtaaccgaggttcgaacctcaacccaggacccagggctccaaagtctcgaaagcttcagccctcacaagcctttgtaccacagacactggccccatgcctcttactcatccgaaccacggaccagacactctacagcgatggacatcctcccagactccaacatcactgagttccaaattaaatcctgaacccgaagcagacgccgcatcgatcctaatcgccacctccatcctttacaagcagagtgatccataccttgacagttaggacacggccgttgatcactacagacccttagtcactgtactcacaccaaaggcacgcggaccacagacagggggatcacagactcccaccaggtacctcccaaatgcctataccccggcgctccccagtcttcctgccaaaaactatgtggtccagggtacaccacgtcctcagatctcccaaaccttccactgagacaaaacctgaactaggacaaaaaactttcagggacaaaaccacacactgacctctattttctccagatacacaagaagggcctcaacgttacacttccgtaaactgctcctacttctggagtcctcgcacgggtttatggtccacctacggcggccgaggagaacctaaaatgtttaaaagagcaaggacaagcgcatttacggcatttcctactctgtaaaatggccgcgcccatagccgtggctcctgacggcagccatgtttgaaaattggacgcacagaaggcagtggcaggtttttgagccaggagccagggaagaagagaagtcactgaaatcgcctcgtttcctggcacttaaagtcttgcgaaagggggcagattttc

SEQ ID NO: 8890 - DNA, 12429 bp, Homo sapiens
aaaaggcagcattactgcctgctgatcaggtgatgaggaacctgcaacccttcccaaatttataaagaaaacagaggaattcagtaaattctctttctgctcttggagtaggacagaccagtggtcagttctggggacagtgctcctggtgtggagacagtgttggctggacacacccagcttgggtgcactggggtcaggtggtcaggtctaactgcatccccctcctgtcactccatctcaacaattccccaacccagtcctaccccatctcaacccttcctcaacccaacctctctccatctcaagtcctccccatttcagccactatccgtctcaagcccttcctatgtcaacccttatcaattaaactcctcctcatctgaacccttccctaactcaacccagctcatctcaaccccttcccatctcaaccgcttcccatctcagccacttcacaactcaaccccttcacaactcaaccccattcccatcatggccccatcacaactcaaccccttcccatctcattcccttcaaaactcaaccccttcctgtctcaaccccttcacaactcaaccccttaacaacagaaccccttcccatctcaaccacttcacaacttaaccccttcacaactcaatcccttcccatctcaaccccttcccaactcaaccccttcccatctcaaccccttcccatctctacccctttacaattcaaccccttcacaactcaaccccttcccatctcaaccccttcccatctcaaccccttcacaactcagccccttcccgtctcaacccctgtcaatctcaaccccttcacaactcaaccccttcctatttcaaccccttcccatctcaactccttcccatctaaaccccttcacatgtcaaccccttcacaactcaaccccttcacatctcaaccccttcacaactcaaccccttcccatctcaacccttcacagctcaaccgctgcccatctcaaccccttcacaactcaaccccttcccatctcaaccctttcccatctcagccccttcccacctcagcttcttcacatctctaccccttcccatctcaaccccttcacaactcaaccccttccttactcaatcccttcctatctcaaccccttcacaactcaacccctctccatctcagtgtctccccaacttgacccttcaacatctcaaccacactcatctcaacgcctccctatttcaccctctccccatctcaagcctacctcatctgaactctacccatctcaccacacccatctcaaccctcacccatctcaacctctgccccatctcaacctcactcatctcaactccttccctatctctacccctgcccgtcccaacccctcccatctcaattccaccgccatctcaactcctcccccatcttaacccctcctcacctcattccttctccatctcaaccccctccacctcaacttctccctcatctcagcctcttcctcatcctaacccctcccacctcaacccttccccatctcaagacttccccatctcaactgctctctacctcaactcctcctccatctcaacccctccccaacttcaacccctcccccacctcaactcctctccaacttcaacccttcccccacctcaactcctctaccattgcaactcctcccccatctcaactcctcctccatctcaacccctcccccacctcaacctctccccatctcaactcctctctcatctcagcccctcccccagctgccatctgttatggttgcttctttcccctgtgtttatacttaagctgggaaaaattccccctccctccctccctcctccccttccctctttctgtgatgaacatgaaattatattacacatataggtctttgttttgctcttattcttttagtttttaaaaattacaggatatggtgtgcatctttctttggccatttctggaaagatgtccataacatctctttcacgctgcagagtattcctcagcatgactgaaccacagtttattccagcaaccctatcaatggatgttcccagttgctttgcagttaccagctgtgctgtagtaagcctcccctacatgcctttaggatgtgcactttcatttctgtagggtcaagtcctagaagtgggactgtggacaagtctttcccacgctatgccctcactctccggaggactggcacttctctcaacacccctcctcagcatctcagcctcaaattgaaatgtgaactttcacagtctgtgttatctctctggccccactggagaggcccgatgaattaataatatgccagcaggaaacagagagatggagttattaattgtcagtccatgagcccaccctctcaaggtcctaattagcatgctgacagcttcggttttatccagagctagggcaaggctctggggacactgtggctcagctaggggcatccggcacagagtggagagccctggtgcctttctgggtggggtggaggggcgcttgcaagaggcttgtgaattcagaagttccttcagggatccctttgtgcctgctgtggggtaggggagagaaacaggctgggagtgggggcaggaatgggagttttagtgtccaggtggtggtgatggttggtgtgtgctgctcttgggccccagtggtgggtttgtgattctggttctgctgcaggacagtgacactcaccaagctgtgttgggtgtagttgtctcagggaggtgcctgctttcaaaccaaagttcctttgatggggaggactgaccccaggaagactgattgcgtatcaatattactctaacccatggccctctttcataacatgcacactcctggaaaggatatcattaaatctggcattggtgcatggccaggctcacatagggttgctcaagaaatgttgctgtaaaggaggccgggtgcggtggctcatgcctgtaatcccagcactttgggaggttgaagtgggtggatcatttgaggtcaggagttcaagaccagcctggccaatatggtgaaaccccatctctactaaaaatataaaaattagctgggcatggtggcacacgcctgtaatcccagctatttgggaggctgaggcaagagaatcgcttgaacctgggaagcagaggttacagtcaaccgagatcacaacactgcactccaacctgggcaacagagtgagattccatcttaaaaaaaacaaaaaagaattgtttctgtaaaggaaactacctataggaagctgcgtgaccttggccaggcctcttcacctctctgggccctttttaatgtggattagaggtggtccttattttggtttgctccatactgggcagccagaaccatctagaacaccagccaggacttgctccccaagggtgctcctctgttgcggtgcctgcctctctgcccaatctctctccacacagtggaggctctgagtctttcctactttgagccctcatctccaccagcatctatgcgtagctctgctgtctcaggcgcctctcaagaagtttcaggcagcagagttggtggaagctgaaaagtcatttgaattagtttgcctgggtctattgctcaggagcctgggcacatctcttaacctttctggggctgaggacaccagcattcagggttgtgtgtgaggtgcttagtatgattattactcatgtttgttattaggctctgtcctgcttcccccaggctgtggccgggaagacagaacagccatttacacagtaagctgcccaatgaccctgcctttcccattcccagtctgcttttaaaaaatatgggtgtctagaccccaaccctcaaagattcagatcagttcatcttaggtgaagttttaacaggaagatgtatatagatgtatatattttacaagctcttcaggtgattgattagtttaagaaccattgattgagacccatggcaactgggcgggcaggtaccttgtgctcatggggcctgcccagccagacacagcctttttcaggagcaaatccccctatctcccttttgggacacagcagactgtctgagatcatctgatgacctctacatactcttttctgggactaagctgcctttctggatcagttagaaggcaactggaacatctctgaaaggttctggatctctgtgcacatacagtaaggggacagagctcattctgtgacagtcttaccaatgcaccacaatgtagcagtctctcgttgtaaggcatcacccggagttcttcgtttcatgaccaaaaaaattaaggagtgtggacaaagggtgaggttagaacgaaagtttaataagcaaaagaagaaagtcctctgccacagaggggacccgaaagagggttgcctttttacagttgaattcaaaagcttttataagaaactcccctcatctctgtagctgtttgtgtaattccccttatctgtgcagctgcgggcatgtccttaggcaagcacaaagcacagcttctcttgttcgggttactgtggttatgttttgggtaggtcccccacctccctgtgcaagttcccatggagcccactgtgtacatgcccgaaaagaggaggaaacctttctgtgggagcccactgattacaccaagaacaaaggctgctatgttgggccttacttgcttgtctgtgcagctgcagcctgagttttccccaggctgctctatttgtgcctgtagcttgatttttcaggctgtctttcattttgaaagaattttaccaaagacaagctttagctgtctgcccaactagtttttccttttctcctccctcaactggatcataacttatgactctgaggctgagtcctgggatagttggatgtagagggggcattatctggatttgaacccagtaattcttagctgtctgatattacataagttacttagccttcctgaacctcactttcaccatctataggacaatatgtgctttgcaataataacattagatttctagaaacacacacacatgcataacaccaggaacaaattttcctataacttattttattgatttcttttacatatatgaaatagaaaaatgatattccaaagaattatacctctcaattttttttaggaaaaatgtttaaaaaataaaaaaaaaagaattcaaattgtgcaagtaaaacaaaaggtaaattggagctctgctttaaagtaaatttcaatagaagattgttgttgttttctttaagtaagaagctgaaattgcggagtgagttttgatgtggcagtgtgtatgctgtcttggttatccagctgttttgactcggttttgatggcaacatatactgaccatgaaactcagaggtaagtaatttcaccattttgaagacacccacagctcttgacattttcaaagggtggttcccaaaataggagttcttttgagatggcattggtatattccagggtgatggatgccagagattggctgggtggcttgatctgggttgcagacagttaaaagttaaagaaaagtagggtagcttctacttccttcatgacctggtccaggatattaacagacatgccagtggacctgggtgcttgatgttacttaacacaggtatcatttccactttttccctctgctccaagccacagggaaactcagccatttccagggcccttggtttcaggaaggtctctgcagttgcatggagcctgctttgcctggcattctgcaggattctttagtacaaggattttgactgggtcaaatcagagatttgggcaaattcctgcattttaaaatagtcttctcctaaaaccctttcattctatgtgatggacagataagagatacagggctcctgtatcagaaattttatttgacttttggagtagagtgacctgaagaacaaattgcagttttatttttctcattacagcaagtcaggaggaggcagcctgggcctggtggggcacttctctgatgtcaacagggtctgcccaccctgccatctttagtgtggcttcctgcatcgccgatygaccaagtggcagacctgagggcaaaaggaagcctgatattggagtcagccccctttggaagaactttccctacagcccacctagtaacttctgatgatacctccttggcctgatttaattcagtgcaccaaaaatattatcatttcaacacaaaaccaatgcaaacaaagaatatgcccctaaatgaaatggtgggatctagtttaatttttatcaagagaccttcctgaagccaagggccctggaaatggctgagtttccctgtggcttggagcagagggaraaagtggaaatgatacctgtgttaagtaacatcaagcacccaggtccactggcatgyctgttaataaaaaaattttttaatgttttcattcatgtatcgtttcaactgaatcacatgtaccctaaaacttaaagtataataaaaataaataaataaaataaaataacaaaaaaatgttttcacaaagacagttttcaaagtaacaaaggacattgagaaaaaaaatcctttggttgttccaagtgtacagaacatcagataaaaataacatcaattttccacagagaaaccaaatatgtcatttaaatgcttccagaattaaacatttgatgtgtatgttgggtgaggaggcaacaggattggatagggtggtgggaagtctgagttttggtctcccctctctcactaactagctgtgtggctttcactaaacaactccagccccttaacctcactagctcagttttatcatctgtaaaatgaaaggattggtctcgatcagtgctgtccaataaaaataatatttgagccacctgtataattttaagatttttagtagccatgttaaaaaagcaaaaggaaacaagtaaaatcaatatattttatttaatccaatgcaccaaaaatattatcatttcaacacaaaacaaaattattgagaaagtattttacatttttttgcactaagtctttgaatgctgtgtataatttacccttccagcacatctcagtttggactggcacagtgtcaggcgctcagcagctgcacacctctcctggctactgttttgaatggtgctgccctccagagctccaaggtttctttcagtcctgacccttgaggattgtcacctttttttcttgactcagctttgagtgtcttggcctctctttccatcccccaacctggggcttctcttcaggcatggggtgaagggatcaaaaccctgagggccacccccactccatgatttctttctgcactgtctgctctctgtcctgtgctttcctgatttggaatcacttccctcgctttttctcaggctgagatccctcccagcttgccttatctctgcctggtccctgaggtaacccatttgcagcctcccattcctgctctgtctaggccatttcatgttctcttaattttgcattccattgcctttaaaatcttcaaccacttaaaaatgtaacaatatacatttttttctttcattacaaaagacgtgctcattgtgaaacaattgggaaatataggagcttataaagaataatataaaaatcactcataatccactcactccaacccaaccactgctaatgttttgatgtgcttatctttggtctttttctaagcattacgtatacatgtaaatgtgttttaaatttctttttctggagattttacagaatatatagttttctattctatttctttcacttttcattatactgtgagcgttataacaatatcattaagtatcgtttgaaaacatcatttgtaattgctaatggctgaggttcagggagagattttgataatattatgtcaccattaagctagggacttagataaacttagtatctgccctgcttctcattcctccttgttgaagagctcttgaccaatgtaaaaagcaatagccaaatgtgaaataaagaactaccttattaacagctcagcaagcactggagaccggcatgtttgcatttccacgctcattggtctaggtgaggcttcctggtccccatccctggaatctaagatgagctgggcttgtggagcaaccttgggcttgactttcctacttggctcagactggctttggcaaattgcttaaccgctctgggtatgtccttatctgtaaagtggtgattataatagtgctcacctcataggtctgttgtgcaaattaaatgagagagacatataaagtgcttatcatagttcctggcagatagtaaatgatccataaatgttagttttaccatttccctatttttggacacttaagtggcttaattttttttactattataaattaatcagtttatcagtaacaaatatttattgagtacttactactggccaattttttttttttttaaatactagaaattacaggggtaaccaagaccagacaagtgtctgatctcatggaatttaaattttaatgggagacatgatcaataagcagggtaagtttggatatggaaaaggctatcaatcacatacaacaagatgatgccctgagcttcaggtagggtgggcagcgaggagctttctgagttaggtgatgtgtgagcagacatctgaatgacaagggggagatctggggaagagcaagttaaagaccttgaagtggaagtgaacttgaggagttcaatcaaaattcagaagcagggagcgcagggggtttggtgtggtgggaggagctacgggaggtgggcaggagccacctggtcagggaacacttcggagctcagggtgaggactgtggacttcattgcaaggtgtgagacatgcactggaggcttccgtgcagcggagggatgcctactcagtggtgtgctggagcgggctcatgggagcttctgagagcctcttggcacgtctcttcccagctccttattcagtgaaatcatgttgataagtggcttgatctgggttgcagacagttacagattctcctcgatttatcaggacacaatctgatcaacccattgtaagtgaaaaatatcatcagtcaaaactgcatttaacaccatctaaacccttcctaaagtcaaaagatcataagtcaaaccatcataagcccaggactgtctatatttataacacaggagtttatagcagatgctactcttcccctagagagctagttgttaaatgtttaccagcacaccactggaacaaactaatctaggttttaaaaaattctctttgcctatgctctgtgaagaatgaattacagggaggcaatatgcagttttgactgtagttttgagaatttccttaggataaattactggaagtgaaattactacagaaaattatctaattgctccccctactgaaaatgttcatcatttatacctccactagcagcaaggtaccatttccttgtactcttactcacacttagctttagccacccccatagaatgttccttctatctagaactttgcattctgttctctatgtgtagctgattatttatttatttatttattaatccttcaggtctggtctcacatctctcttctcagaggactttcctgaccactctatttcattgtaattacttatttgccagaaccatggccatttatttatgtctaggacagggtctgccacatagtaggctcccaatatatattattgaatgaatgaatgcatccgcctacctttctgaattctcaaattgatactaatacagtcaaaggagttcctttccttggaatgtctaggattggcttttttcagcttaatgatatttctggagttgaggtatattaagtccaaagagttcaataattgataacaaaatactgtgcaataacctaacattataacaagatattttgcaataaaatgcagctttaaaacatctgttatccaagtgaagtgatgactcacagagaaaatatttccaaaccatacatctgataaggagttaatattaaaaagatatgaggaactcaaacgacttaagagcaagaaaacaaataaccctattaaaaaatgggcaggggacctgaacagacatttctcaaaagaagacacacagatggccagcagatccatgaaaagatgctcaacatcactaatcatcagggaaatgcaaatttaaccacagtgagatatcagttcacacctgttagaatggctataataaaagagacaaacaatgaatgttggtgaaaatgtagagagaaggaaattcttatgtattgttggtagaatgtaaattgatacagccattatggaaaatagtatggcggttctttaaaagctaaaaacaggactaccatatgatccagtagtcccacttctgggtatatatccaaaggagatgaatcaatattttgaagagatatccacactcccatgttcattgtctcattattcacaatagctaagatatgcaagcaagctaagtgtctatcaatgggttaatggattaagaaaatatggtgtgtatacacaatgaaatactttcagccttagaaagaagaaaattgtcatttgtgacaacatgggtgaacctggagcatattatgctaagtgaaataaacaggcaccgaaatgccaatatcatatgagctcacttatatgtggaacccaagaaagttgaactcagacatacagagtacaatggtggttacagaggctggggacgaggggggtggatgagaaaggggtgaggttgttcaaagggtacaacattttagttagacaggaggaatgtgttttagagatctgttgcacagcatgttactatagttaataatagcagattgcgtatttcaaaattgcgaaaacagtagattttaaatgttctcaccacaaataggtatatgaggtgatggatatgttaattagcttgattttatcatgtaaaatctacaatttaaatatatatgaaaacatcacattaaaccccataaatatatacaattattatgtcaattaaaatgaattaaaataatagaaaacccccaaaaaagcatgttatccattaaaacacgaaaaaccaagagccgtcaataactgcatgtttctagtgagactacagcaatttctctgtgcacttgccagaggcttctctgacatgtggtcaccctggagcccatgcaacaccctcttattgccacagacttctgtgctcactgcatggccaatatgtgtagactaacttctgacagttttatattctcttttaaaattttccacatttgctcttgatctcattctttcttttttctgtgctataaatttctccagctctactagatcatcccaccagtgtaaaaacatgcaatagaatgtcacatataagaacaaaacacaagaatccttgctacctcatacgcctctttatcctcggtcccatttctctgctctcctgtatagcaaaacttctcagaaaagtggcgaatgttgtccccactttctcatctcctgcccctcctaaccactctaacaggtggtctgctcacaaaaactgctcttgttcaggtcattagtgatgcccacattcctgagtcccatggttctttctctgtctttatttgatttgacttctcagagtacttagactctcattcttgaagcatttgcttctctggcttttgtggtagcatgctgttctagttttcctatttcactggctgtcccattccagtctctgttgctggttcttgctcctctgctatacccctgatgtaggtgtgccccagggctggcttctgggccctcttctcttctctgtctatgctcactcccaggatctcacccatttttgtaggtttacataaatccacatgtaaatgactcccacatttatagattcagccttcatctctcctctgagctcctgaggctgaaatccagctgttcccttgacatcttaactcaggtgtctaatgagagtcttcaactgaacaggtccaaggaacttttgacttatgccatcctccagtctattcctcctcatgtcttcctttccccacaaatgacactaccatctatggtgtggctccaattccagattatactaaacagttaagggaggtgtgtggtgagaatggtggccatactcccttggggtgctgtcaccaggaccagtcttgagcccagttcagccctccttgtttagtagcatatgtctcagaacatgatatgcacggccacttccacccactgctttcacttccggccccttttcttaggagttttggtctcataatggctctagaagcagaggaactgaaggctagagtgggcaaaagtattctctctacttccaaaattatattcatgcaagagaagttgacttcctggttttctgggtagta

SEQ ID NO: 8891 - DNA, 12917 bp, Homo sapiens
atacaaaaattagccaggcatggtgggacgtgcacctgtagtcccagctactcgggaggctgaggcacgagaatggcttgaagccaggagacagagcttgcagtgagccaagatcgcgccactgcactccagcatgggcaagagagtaagactccatctcaaaaaaaaaaaaaaaaaaagaaaaaagaaaagaaaagaaaagaaaagaaagaagaaaggaaaagaaaaatccggctggaattggttggaaccaagatggccaaccagaatctgtgcagaatgaacttggtgacgttgtagcctgaatttccaccgcgtgtttcatactaatgccccttaaattttgcacatgcgatccatgaggaggcatgaagagataactgcacgtgctcaaggaattttcttttctttctttctttttttttttttttttttgagatggactcttgctctgtcacccaggctggagtgcagtggtgcaaactcggctcactgcaacctccgcctcccgggttcgattctcctgcctcagcctcctgagtagctgggattacaggctccggccaccacgactggctaattttttgtatttttagtagagacagggtattgccatgttggccaggctggtctcaaactcctgacctcgtgatccacccgcctcagcctcccaaagtgctgggattacaggtcaaggacttttccagacctccccttcccttcttcctgtcacctactaatctcagaatctaccacccgcacattttctaataaaaatactgccttgaagccagcacggggagacagatttgagctggactcctgtctccttggagttgacgagttgacttgcaataaaagctcttcctctttctttctttctttcttttttttttttttttgacaggttctcactctgtcacccaggctaaagtgcagtggtgtgatcttggctcactgcagcctcaaccttctgtgctcaagtgattctcccacttcagcctcctgagtagctgggacaacaggtacatgccaccatggcttgctaatttttttgttgttttttgtagagatggggttttcaccacgttgctcaggttggtctcgaactcctatactcaagcaatcagcccacctcggcctcccaaaatgttgggattacaagtgtgagccactgtgcccagctgcaatgaaagtttttctattctcaagagcccaattagtattggcttctagcacactgggcagtgagcccgttttgcttggtaacactagaaaattcaggtacctcaacaggatacaatcctaccacctagatcatcgttaactaacatcttagtattgtcatatccaggtggcttttgctagacatacacattaatataatgtagttttgtaacattctataacgtgcttctacagtactctctaggcagctctgtaggttgatacctcttttgcatttgtgatggcacagtagtctaggaatggaagtaggagaatttaaccagtcccacattgatagacatttgtgttcttcagtttctctgctaggtgacacctcattgccacagcctcctttcatttatttatttttttgaaatggagtctcgctccgttgcccaggctggggtgcaatggcgcaatctcagctcactgcaacctccacctcccgagtccaagtgattgtcctgccttagcctcccgagtaggtaggattacaggcatgcaccaccacgcccagctaattcttgtatttttagtagaggcagggtttcatcatgttggccaggctggtctcaaactcccgacctcaaatgatccacccacctcggcctcccgaagtgctgggattacaggcgtgagccgccgtgcccagcccagcctgcttttagcagctgaacacaggcctgccttgggaagttaatggccgtggaagaattttcctccttccaagcaggaaagggaggagagatagggctgacagcttactctcttcagagtttcctggggaaggggacacctatatggtggcccggccctgctgaaggtcaagatgctatagtgttatggtttaaaggtaggtgcagggtctagggggcctaggcactaacagaactaatctctcctccccccaactgctgtccaggttcatggatagtcatgcttggtcttgtcttactgttctttctggtctcagccatacccttgcttccccaggcactcctggcctttgttttcctacctctggactcaccctagctgtcctgtacaacctgccccgcacctctgggcagtcctggggtgctcttggacctctccttcccagcctcctgcaagatgctgaaggactttttgctggttgcactggccttcactggtgtcactctgttgctgctcctgtgaccctgaggaaggcactcgaggtcttccagccatcctgccctctctgcagcttaagaggctctgttttggtgccctgccagctgggaggcccacaagatggggctggtgacttgcgcaacagagagactctcttctgaggaggaaattgatatggaatctcagtctattttggaggaagacctggaggcagtggccccttcagaagacaacgaaaaaataacccttgtttctctctctatataatctataataatattattatatataatctataataatattattatatataatctataataatattatatataatctataataatattatatataatctataataatattattatatataatctataatattattagatataatctataatattattagatataatctataatattactatatataatctataatattattatataatctataatccataatatatattattatatataatctataatatataatatataataatattattatatataatatataatatataatatattattatatattatatattattgtatattatatattttatatattataatataatatataataatatataatatattatattattatataatacataatatattattatatattatataatagatatataatatattattatatattatataatagatatataatatattattatatatcatataatagatatataatatattattatatattatatattatataatagatgtataatatattatatataatatattatattatataatagatatacaatatattatatataatatataatatattaaatatttaatatataatatatttaatatttaatatttaatatatattatatttaatatttaatatatattatatttaatatttaatatattatatttaatatttaatatattatatttaatatttaatatataatataaattaatataaatattaaataatataatatataatatttaatatattatatataatatattatatatatttgagacggagtctctgtcgcccaggctggagtgcagtgatgtgacctcggctcactgcaacctccacttcccaggttcaagtgattgtcctgcctcagtctcctaggtagctgggattacaggcatgcaccaccacgcccagctaatttttatatttttgtagagatagggtttcaccatgttgccaggctggtcttgaactgacctcaagtggtccagctgcctcagcctcccaaagtgctggaattacaggcacgagccactgcacctggcctgtgttgccttaaccttgtgctttttggtactagttgttaggggaaaaacctgatgtcttaactttgtgacatgcatttgtggtctctgaaggggccagtgtggtggtgggttcttggggaaggagtaagaggcagggctggggcctcattagcaccagcatagtgttgcccaccggtgtccctggcctgaggtctacacggttgggagcctcgccttttggcctcagcagaaatttgactcctctatgggaaatggcctgtggccaccaactctagcttcccaagaacagtgagacttttccttccctggctctgccttggcatttctgggctgttggaacaggaacttctaagttaactttccttctcacacaatggggggcctgcaggccttggttttcctgccctatgctgctagcttatcacttctggaatgagggggctgtgttagtccattttgtgttactataaaggaatattgggccaggtaaggtggctcacgcttgtaatcccagcacttcgggaggccaaggtgtgtggatcacctgaagccacgagttcaagaccaacatggtgaaactccatctctactaaaaatacaaaaattagccaggcatggtggcaggcacatgtgttccctgctacttgggaggttgaggtgggagaattgctttaacccaggaggtggaggttgcagtgagcctagattgcaccactgcattcctgcctgggcgacagagtgagaccctgtctccaaaaaaaaaaaaaaaaaaacaaacaccaaacacgaaaaaaggaatattggaagctgggtaatttacaaagaaaagaggtttacttggctcattgttctgcaggatgtacagaaagcatggtgccggcatctgctcagcttctggtgagggcttcaggaagcgtttactcatagcagaagaggaaggggagccagcgtgtcacatggtgagaggaagggagcaagaagaggggaggggtgccagcctcttttaagcaattgtagaataagaactcactcattatggcgggcaggcaccaagccattcatgaaggatctaccgccatgacccaaacacctcccactaggccccacctccaacatcgggggccacatttcctcctgagatttggaggggacaaatatccaaactctattagtgaccattggccaaagctacaaagtgggtctctttccttccccaatgctgcctcctggagattcaggactggagctgagcatctagaccctgagtaagactggaggctagaagctggagcttgggaagcctgcctcttactggctgtgtgcacacagtgggagctggcttgccaggggtgggcatcagcggatgctgatgggcactttgcagatctcagctctggccctggccttaggttctttgcactgctccacctcctggtgcaagtcccctccactcagctgccacagaggagctctggcaacagcactgctcatcttagtcccaaaggcacaaagggtccacactctctacctcagaccctgcttcaacatcgaggcctttcctttggtggtcaagggtgagaccaccctgtcccccgaccctgcatcacccacactaagccatcctctcccaaggattccatgacatcattggcccaaattgtgggtgctgccaccgtcttccaagaaggtgaacccatccccctctttccatcctcctccctttcctctctcttccctccatcttccctcattggtaggattgtcagataaaatataagatgcataggtcaattttaattttagataaacaatggatacattttaagtatgtcttttttttttttttttttttttttagatggagtcttgctctgttgctcaggctggagtgcagtggtgtgatctcagcccactgcaatctccacctcctggattcaagagattctcatgcctcagccttctgaggagctgagattacaggtatgtgctacctccccaggctaaattttgtatttttagtagagacggggtttcaccacattggccaagctggtctcgaactcctgacgtcaagtgatccgcctgccttggcctcctaaagtgttgggattataggcatgagccactgcacctggccatgcttttttttttttttcctttctaaatctgacaaccctcattttctcttctcttccttcctttttcctttctccttcctcctccctcctccttccctgccagctcaggaagaaggcagtcttgtcccattctgacaaattgttatagaagagtggtgggggtgaagaggtgacggggtaaggggcagccttagctccaggactatttctgycacctgtaggctgaagatacaaggccagtgcctttgggagctcagtttcccatctataaagcagatatcagattttgcacccataagtgcatgtgggaaagtgcttgctgctgctgaatatttgcttgactagcctgagtcagacctcatagcctgcccacggatgagctcagccctccgtttgtttgtttccaaggagcctctcatggcaccagcctttggttcccattcatccccattcccgggtgtgatccggctcccctggcaagagttgtgtcagggactggggctcaagccagcctcttcacgtccccgaatcacagcagaaagttggraaggaaactctggagtcctggcctttgccctagtcacccagggtcatggtgagcgtcagggggttgtgcttcacagatgccatgtgagcagcggacaggatgctgagctgaggaacacaagccctgccccactctgctgtgartttccttggacaagctgcttcagtattgtgggtctctatggcctatcacctcctctacccacaaacagggactggagagggtgacatgcaggacacttctactggaaggtctagaacaaataaatcatgccttctcactgcctttgtaaaagtggaatcttaggaggtcatattcttactatattamatttttttgatagagatgtggtcttactatgttgcccaggctggtctaaaactcctgggctcaagcgatccgcccatctcagcctcsccaagggctgggattataggcaggaggcrgtattacaaggcaactgagagcaatgtcattggagtaaacaaagcaaaaacaggccaggcatggtggctgaggcctgttatcccagcactttgggaggctgatggggggtaaatcacttgaggccaggagcttgagacaacatggggaaaccccatctctacaaaaaaatacaaaaaaattagccaagtgtggtgatgcccacctgtagtcccagctactcaggaggctgaggtgggagaatggcttgagcccaagaggtcaagactgcagtgagccatgattgtaccactgcactccagcctgggtgggcgacagagcgagaccctgtctcaaaaaacaaacaaacaaacaaataaacaaacaaacgaacaccccctgccccaggtcctggatctgccacccaagctgtaagatgttgagtgagtagcttcacccctctgagcctccatttccttatccataaagggccttggggatggcatgagaataaaacatgctaaactcacaaagctcttggcacagtttctggtacacagagagcactcgccaaatgatagttgttttctttattatgattatgccagatgtgactgcctttgcttccaggaaagtccctaaaacataagctatgtgcaacaagggaagtgggttagggtgggaagctgagcgtgcaagtcagacaaagcctgatgtaggcagctcctatcagaggcatgtggcctttgtggctggggccctcaaaagacagccactgccagaaatctggagactgaattgtctgggtctccagaagagagtccaaccccaccacacatctgctcctgtccaaggtgctgaaatccaccccacataggctcctcctaatcatgtacagctgttgagtcacctgcaccctaccttctggtcctccattcaatgccacaaatatacactgagcatctactatatatagggagtggaagtaaaaaggatttagatatgtctccaacccaagttgctcacagccatacggaaggaattcaagcatacacacctgccttagggtaggtgaggacaaaggctaggggattcattttgctatttattgagtttcatgacacccacttcttgcctttacccttgctttttcctcttctgcaaccttggtaccctccaaggttgtgcctctcatacctttcttgatctgaccacagtagatgagttttccccagggcatctctttctgtactcactaacgtcacagagtcaggaggactaacaatcaatttcagggagggagggagtgtaggatataaacagagaaatcaaagggttaggaggtctctgagaaatgagggagccacctagacaggggtgagctccttatcatatttctgcatgccctcgtcagggagcaggacctccactgtgaagctgaccttcttggcgtggacaaagctataggtgttgtcgaagcgtaggacatctgggggacagatggaaagaggggcattgggcttggctttacacactcttttttccacccctggccatggaggaggacaggcttgtgttcccactggctttgtttgccaagctgggccaagctcccaccacgcctcttcccttccccatgggaactgccaacccaagcaggtcctgtaaacagacaccaacctcctcttggcatgtgcccaggcatggctttactggcatcgagaacaatggtcattacatcccattgtctcacacctggagacgcacatgacggggctgtgaaggcacatggttgggttcatcagagacctcccagcccccttggatgaagtggggttctggggcaggcctgctggacactgtttgcctcctcacaaccaccccaaaaagcaggtgttggccgggcacagtggctcacacctataatcccagcattttgggaggccaaggtgggtggatcacttgaggtcaggagttcgagagcagcctgaccaacatggagaaaccccatctctactaaaattacaaaattaagtgtggtggcacatgcctgtaatccaagcgactcagaaggctgaggcagcagaatcgcttgaacccgggagggggaggttgcggtgagcagagattgcaccattgcactccagcctggacaacaagagtgaaactctgtctcaaaaaaaaaaaaaaaaaaaaaaagagaaaaaacaggcattgtaactcctggctcacaggtgagcaaaccaagggtccttcccagattggtcagacttttgcccaggactatgtagctaccctgaggctcgggtgggaccctggaaccacactcagctttgtggctctgcacaagttgatttatttttcagagcctcggtttcctcatgtggaaaactacacctgccctatcacttgttgtctgtgttctgtggtccaggtgtccccaattccttcagggcctgtatgtctctggctcctggtgcacagtaggtgctcatgaatatggactgagtgagtgactgtatgaatgaatggtgctaacctaggctgtgtgtccctgaatgggggaggtgtgtcactgcccctctgtttccttctctaaagcatgggacaggtggctctagcctttcagagccaggtcccagctggggcagacttacagacgccggcctctgagcaggtgaggttcccatcctcgggcaccatgtgggcgttatagcgctggctgggtagaacatctgtcatctcccctgcccgctgtcgctcccccatcttggtcttcaggaaaactccgaagccgatgtccgcaccatcagatgagaactgccacctgtcagggggagggggaggagacaggttgctgctcagcctgatgggtctctgaggggttagggcctgcccctacctgagaacgcagcctggaaataggatctcgtattccacttggtgtgatgagccgcggttgatctgcaccgagtgctcgtactgagtcttcacctggtcccgcacgtacatggacttggggatctccccgccatagttaatctgcggacatgggatgagatgggcttgcttccgtctcctggccattgttcatgtttcttctgcctgagacactttcaccacctcctggaagtatcctcttcatcctagccccactctcccacctcctcaagccttctatgaccctccaaactgggccagtgcgtctgctgggagcttcccctcccagctcatccctctgggttaaaattcgcctatttcttgtttgcctttacagctgctgagagctctgtaagggcgagggttgtattgactagcttaacacccagttcttggcatctctctataggtaattgtggatgaatgactgagtggaaagggaatccagcttaattcttgaacctctcttgtcccagggaagggctctttgtaccttggttaaacatttggggttcccatctgggtcagtcagggtgcccccaaactgggcaggcagttcctcaggactgatgagtttcagcaaaccttccttccagttatctgggagcagtgggattcaagggtggttagcaagcatggggggcaccaattagcctcccacacccaccaggatgacctgaactgggggagaagccctataggaggtaggctgccaggaccaattccccagtgtcctaggcctggggctacagtaagtgtctttctcagcattgtgttgctgtggaaatgtgtttcccgccttgatagatgaatcagcactttttttttctttgagacagtgtctcactctgttgtccagtctggagtgcagtggaatgatcatggctcactgcagcctcgacttcctgggctcaagtgatcctcccacctcagcctcctgcgtagctgggactacaagcatgtaccaccatgcctggctaatttttatttggttttgtttggtttttttttgtagagatagggtttcactatgttgcccaggctagtctcaaactcctgggctcaaatgattgtcttacctgggcctcccaaagtgttgggattacaggtgtaagccaccatcaccatgcccagcctatggcacattctttttttttttttttgagacggagtcttgctctgtcacccaggctggagtgcagtggtgtggtctcagctcactgcaacttccacctcatggtttcaagcagttctctacctcagcttcttgagtatctgggattacaggtgcccaccaccatgactggctaatttttatatttttagtagagacggggtttcaccaccttggccaggatggtcttgaactcctgaccttgtgatccacccgcctcggcctcccaaagtgctgggattacaggcatgagccaccacgcccagccaacagcacattcttgaagatcttccagtcatgagcagtgaaactaagagttatctaattgcctcaaggagagtttagagctcaatgacgtcaacggccttgttgggatcactctgtaagtaagtggcatgcccaagtcagacctcctagtgggggatggacagccctgggcttttggagggaccctccccacttccctctgcctaatcaccatgaccataatgttcttcatgccctatgtaaagctctaagagttctgggtcctggctgttaccatgccccagccttatggctaatccaggctacccggtcccccaaccccctcactttggccatgggaggttccttctctacagtggtattaaggggaagaccacaatgtgccacataccagagccaaatgagcagagtcacatggggcagaggctgtggacttaaggcctggactgtgctggtaacccacactgctctaggctttggaaggcgtagaaggcatgagcctggacccttcaaaccaggccctcataatctatcaagttccccatcccagtggaattgggtagaggcagaggctcaggtaccaggaagaaagagaaagtaaggatttataagctccccctcacccctggatcctcagttctcctaattctgtgatctgactatcctgcttgggagaagttttcctccaagccagggtcattggtttgggtttaagaactatttcccttctctctctttctctcagcctgtcacttgtaaacacaactattctcctatttgtaaaattaatacatattattatacagtttagaaatcatagacaatacaggtaataaaattaaaaaccacacgatctctcactatcaacaaaaaatattttgttgtttttccttgtagaaatatgtatttattgtacatatgttttcataaaataagattatacttttagtttaatcttattttagtttatgcttatgaagataagtttataatctacttttaaaaacttaaagacatttccatggcattaaatattcacatatagccttatttctcatggcggctccagaattcatcaaatgcatgcaccattatttatttatccagtcctttcttgttgggtctcctttctctgaattgtgactactctttctgctcgtctgcctcatcctcttctgccaaggttgcctttggaagcactaagcttatgagtgttgaaaagaaaccgaggcctatataccagaaattgactgcaaccaaactgaaaccagtgaggtggtaggtgtggaggccttgtccaccaaaggggtatggcagggaaaagagcaaaggtaacactctttagggtaaaacccacttcactgttgggaagaaggagcctctgactaggtgatgtgtagagttctgttgtttttgagataggttctcactctgttgcccaggctggagtgcagtggtgtgaacacgactcactgcagcttcatactcctgggctcaagtgatcctcccacctcagcctcctaagtatctggaattacaggtgtgcaccaccacaaccagctaatttttaaattttttgtagagatggggtcttgctatgttgctgtggctggtctcaacctcctgatatcaagcaatcctcctgcctcagcctcccaaagtgctgggattacattcgtgagccactgcaccc

SEQ ID NO: 8892 - DNA, 16626 bp, Homo sapiens
aagcacagaaggccacagccttacaatgaaagtgctgaaacatgtcccctgtgacagtaaacatgcgctggcccgagctcaccccagtgctcttccaggcttcctggaactgggagccagcaggaccccagatggcctccagcctgtcagtattttcaacttcatcatctggagtctgtaatggcaagagccagattgcaggtgactctgagctgtctcctccttctcgacagctgcaggcatcacccagacacactgcagggctcacctgtgccatggaggcttttaaagtagattttctgttgcttataacagaatacctaaaaccgggtaatttataaagaaaaggaatttctcacagttatgaaggctgagaagtccgaggttgaggtgttataggatggaaggtcctgactgagttgtccaggttcttggtgtattgaacaaagaagtgaacaaaactcacaaagtaacaaaagaatgaaacaatgacagacaaaacaggccagtcgcagtggctcacgcccgtaatcccagcactttgggaggccgaggtacctgagaccagccttgccaacatggtgaaaccccgtctctactaaaaatacaaaaaaattagctgggcgtggtggccggtacctgtaatcccagctacttgggaggcagaggcaggagaatcgcttgaacccaggaggcagagtttggagtgagcccagactgtgccattgcactctagcctgggcaatgagagtgaaactccactaaaaaaaaaaaaaaaaaaaaagacaaagcaacaagaaaacagcttaccaaaggcacagattgattgaagcgaacgtgcaacccaccgggtgggagcgggcccaagcaaacggctcaaggacctcccaattgcaatgcttctcagggtttttataaagaacaccccagatgccctttagaggcctccaattggttacaccctatgaaggattagcctgggaccaatcagaggctgaagtggaggattggcccagggtcaatcagaggttgaagtggaagctcctgacttgttatcacagcagtgaggatgtggcctgtgtgctccccaatcctgcctagaactggctgcacctgctgttctctggcttatgagaacgggctgcacctgctgttctctggcttatgtgaacgggctgtacctgctgttcctttgcttatgccccaacccttggcttccctaattccctctcctcctgcctcagagaggctgcagcaggtgaaggccttcttgctggtggggactctggtgtcccgagacggtactgggcatcacgtggtgaggatgctgagcctgctcacatgctagctcaagtctctcttcctcttacaaagccaccagttaccctcccatgataacccactaacccatgaatccatgaatggatgaatccatctacggggacagggcctcatgatccagtcacctcttaaaggcagcacctctcaatactgccacattggggattaaatttcagcatgagttttggcggggacaagcattcaaaccgaagcagagggatggcgggtgcagcccagaggtagaacacgcttggatccccacagcccatcccttctgacgtggcttggccatccagggatgtgattttctgaatgacagacatgactgtgctttctctcaacaagagacgggtgccagtcccaagggttgggaagaggcactggggtcccaggggtttctcccacagtgctggaggcgcctgagagctgactccacaggtagaaacacaataatccctgtgggtaccagtgtggccaaggaagggacacatcattgtatcctcgggcttccgttgcccaagagaacagggacagtcactgggagaggcccacattgccgggcagctccatctcactcagtctttgacagggagtcccctttttacaccagagaccccttgaccaacccaggaagcccagggtggccaaagtggtcacagccagccagggtgtcccctgcttctccaggggacagggttcgtcccggctcagctctgctgcatgaggccacaggacttgtcggccctgagccttatcctcccacctgtaggctggaggggcagagagagtggctagctggtccttgggtgcttctgccctccaccgcggagccccccaggcaaagttgctcaggattccagaattttctctcatctaagccccaccctgccccacagtgcctgtttagaaggtaggtgaggagtggggaagaagacccccaacgttgttccaagcactggctttggagtcagggacctgggttcaaatccttgctctgagtgaccttgggcacgtgatgccctgtcagggcctcattttcctctaaatatctataaacgtctaaaaggagggtgtacaccatacccacctcacaaggccatggtgaggtcaggctggtcaagtgctcagtgatgtgcctgggcttagacccagcagaggcaggagtactcctgactctgccttctgccctctgcccctgccccgtcaactctgccagagccattgggcaccccccagaggcccaccacccagcgcctactgcccagcaccctccccatcctctgcttccaaccttctggtgtgatgtgttattctttcttccacttgcatccggctggaggagcagaatccctttcttttcccaggcgggttccccagaccccagttagaacacagacttcactccctgcacccagaggatgtgggtgtggctgggatcccctagtccagaggcagccacagcctgccagaccccagctccctctctgactgcagctgccaccagcccctcccaccatctgggacagaatctagcccctgggagccagcagcctggttccattcagggaagggcaggctctggagtgacctgtgcctgactcccactcctgggcctgccaatcaacttccctgggcccacctcctccactcgaaagtgaggatggcaccatcaacgccccagagcctggggattgtgccaggtgatggggtcacaggttgggcccccacctggtgctgtaagggtaactgaggtccactccttcctgcagcttagccttgagagcaaagacgccagacaggggaatgaggttttattcaggaagagctcaagatgggaggggagcccctggggttgcaccctctcggcctcttgagaccaaggctgatgggacactagaaactaatgactgcagcatctgagcttcctcggagtcatctgtgggggacacaggggcggcctcagagtcacccgtagcggggatggggcagcctcagtgtcacccaaggtgggcacgggcctcagagtcacccgtagggggtacgggggagcctcagagtcacctgaggggggcacgggggcagcctcagagtcacttgtgaggggcacaggggcatcctgagagtcacccgttgcagggacgggggcagactcggagttgcctgtcgggggagacgggagtggcctcagagtcccctgtggagggcatggaactggcctcctggtcggtcactgtgggcagcgccagataggtgagggtccagtagcgcaggaagttggttctcaggctccgcttcatggagctgctgcccatcttcttggtgatctccaggtagccgctgttttccgtagtgtagggttcccagtgtgtgggcacagccgagtggcccatgttggggtccctgcagagtgagaagaggctgtgcaggggctggggactcccagggggctgaagccctgctctgcacctgcacgcctgagccatccccgccctctgagctggccctgggcaccatgcccctcactgcatactgggcactggctgtgcacgtgcacgggattggggctctgccagtaactctcatcctcaaacacacatggattccgatgcagggggaggttaagtgacttgcccaaagtccctccactggcaagtgagggaacaaggcctcgtggtgggaggcccttctcggctgtggccctccgccctgcactcaacccacgtcttaccctgttttggcaaagttggtccagtaggcggtcatggccttagagactgtcctgtcttggggccggtagcccggagtggggtggcaaagggctccccaaagatgtactggatctcatctctatggtcggcccccacccatttggggtagacgggcatccgagagggatgggaaaacaggtaggcgtaggtcttggcactcctggaggggagagaccacccaagtaggcagggtgctcactggggaccgatcagcccagagaccggacttggagggaggtcccgggcagtgggcagggaagtgtctggggaattcacatgaagagatggggcttcttacacccagggaagggaaagctgagaaccaaattcatggattcatgggttccacaatttcagctgaatttatacttcacctccacaaaacattgtgaggcaccttccttctagaattcagtatcaagaaatattttgctctccaagtgaatgtgcattcttcaattagattggacaaggtataggccctcaactgtttccctttttgccttgactgaaaggaggctcacagctaaatgtactgcttagttgctgcaaagctttcatcctagacttctaggtatacttttatcttcctatctttttcagattgctaatttatttttaatttttattatttatttatttacttatttattcgagacacagtctcactctgttgcccctgctggagtgcagtggcgtaatctctgctcactgcaacctccacctcctgggttcaactgattctgctgcctcagcctcctgagtagctgggatcacaggtgtgcaccaccatgcctggataatttttgtatttttagtagagatggggttttgccatgttggccagactagtctcagactcctgacctcaagtgatcctcccaccttgacctcccaatgtgctgggattacaagggcgagccactgcactcggccttatttttccttctaattggctattattacatgaaggtctttaatgaggccttgggctgaaattattttgtaaggtggcaaagttgaggcccatgagagtcagtggatagaaaccattgtccagtgttctctcagtgcacacagcatgggggatggaaggtagctcaagaactctccagtgggaaggaccatggggtgcagggctgagcagggcagaggatcatagggtttgtaaagccctgtaggctgggaggtaaaaagaggccctcaagtcttgccaggcctcagcaaagtggatcaggcaggcacaggtggggactcaagcaccactttcccagacaacccagacacctgagagccacccacagcgaggcctcggctggaaggtgcagcaccccaggaaggcccccaggagccacccgctgcccagatcctcacttggcattggctctgtgctgggctagggcaatctcggtgggcaccaggaagaggacatcggtctcaaagtccaccacagtcttcttcttattctcctgggatgggtcctgggcccaggactcggtgtagacatcaaaggtcgtcttggcgcctctgagccccttggtgattgtgaactcactgaccagcttgtagaagtcctccctgggggaatcaagtaggcactgacactcagcctgtgccaacaggaaggtgtgtgcatactcaccccgaccggtgctaacttcctcactcccagtcctccactcaatgccttcctcctccaggctggccccctcgccagtgctttcccggcggccctcccgcacgggtcgcccctgagtcctgtgccccctgcttactccgtgactttcttgttgcccttgttgatggcaggcatgtcgatgctggcgaagatgtggccgtccatgttgttggtgcctgctatatagtcgatgtcggcggcgttggcgtacaggttgatcgggtcagcggggatgaagtctccatcaatgacagggacgaagcccacatagtgcagcatggggtctgggtgggagagccagcaggttagcaggttcttgtacctcccagtttcccctgagccgccccttgcctctcagggctggaattggctatgtcctcccttctctgatctatggacacttggggcagggttgattctgcaccatcaggggcatcctgtgccctgtaggatgtttagagcatccccggcctcgacccacgaggtgccaggagcaccccctccccagctgtgacaatcacagatgtctccaggccctgccacacgtccccaggctgagagccactgtctagggccagatctgtcctcttcagcggcagcccctccctctcctctctctctttgctgggcctgaagcaggaaggaggaaacttagaagccactgagggaactgatggagaaggagctccctctctcagggctgggttccagtccatcagccaaaaatggtgsgaggtctgcattgtactccagasccctggacgggcccctagaggacccagtggctgctgaggcaggcggggcctggctgtcactgggcccagcacagcaggytttgcttctagcggggccgtgggggttgctttgtttgggcttgtccatcctgagggcctcagggtggggaaatggggaggggtcgtgatgacctgccgaaggcctctcagcaccccaagaagagctcgcccaagaagaaggtgacctstcctttgagtcaggagcccaggaccactgcccaaacctcccggtcccagggccagggagtgtggagagcaggcagcagaggtggagacaggagtccccagggcctgagacaccgcaggcggcagaacagcgtggttgggatctggggtcccctgtgtgactcctgctgggggcagggactgggccgggcaccgacaccggcttcctgtggggcttggggtttctgtggcttctccttcacaggcagagagggtagaatttatggatgcctcgagagagctcctgcctgccggctctctttctggagggacccggacccgggtgtggagtagctcggctttcagcttcctgcacaggaataggaggcagcagctgtgccatgctgggcaaactgcctgcctgcttctctccasccgtctgcctgctctccacactccctgcccctgggcccgtttccccttctgtaaaatgggaacaacagagaggttggtaggtggaatcaccaggattagcaaatgtaaattcaagaggcccagttacatttgaatttcaggtaaacagtgaattgttttttagtatgtttcatttttttctttttctattttttgagacagagtctcgccctgtcacccaggctggagtgcagtagcgtgatctcagctcaccgcaatctccacctcccagcttcaagcggttctcctgcctcagcctcccgagtagctgggattacaggcacccaccaccacgcccgattaatatttgtatttttagtagagacggggtttcaccatgttggccaggctggtctccaactcctgacctcaagtgatccacccacctcggcctcccaaactggtgggattgcaggtgtgagccactgcgcccggcccatagaaatttgtttcaaatattgcatgggacatacttacacagcagttcttggcagtttatctgaaattcaaatggaattgggcatcctgtgttctacctggcacctgtccccatagaaatgagcgtgagtgcccgggatctgctgcggggctgtgctgggctctttctcagcctggcccgaagtttccagatctgattgagcgagagagcagcaggacctgcccctctgctgggctcttaccttcgcggcactcgccactgcccagcagcaggtgaggcccaacacaaccagttgcaggcgccccatggtgagcatcagcctctgggtggccctccccctgggcctcgggtatttatggagctggatccaaggtcacatgcttgttcatgagctctcaggcactccctcccctctacaccctcaggtgcagggagatccagttttcccmaaacccacagtgcacctgtgcaggttaccacttacctgggagcagaggcaggtggcaaggtggcgggtggtaagggggatggtggggccgggcagggtgcacagtgccctgccttctggtttgttcacrgggcttggtgtcactgtcagagaaaagggcatactttgtctccatgccctgcctgtcccctaggtccccaraggggcttcacaggggaccaagcacgtgacttctgggacagagagggtgacatgctgtgggccccccacccaagtggckkaccttatctgtacgagcttttcctggggccatggagcaagcagtccaagctgggtgcgggtcccagagcagcayaaagccgtctcattcaagggtggggagatgtcaccatccagcctgatgcatcctgggagggaggactagaggctcagggggtgtgggtgggggggtgcggaggcatctagcccaaacttgtggtcttccctgaggaaagaaaggacacagccaaggccctggggcatgcccaggcagagtgacaggagagaaaaggaggccagcgggagggaagggagaaggtcstgtgaggttgtggaggaagaggaggcsactcgtattttctgtgaacaggtattaatcctggagccaggaaaggctctgagaagtgaaagaacaccacgaacaaagtcttkagatggggcctktaagctcagccagygtgaggtcaccctcaccgagacgctcggtggcagctccagccaccgcacagccctctgcagtgatgggaacagggtgagggcagccagagccttcccacccaacagtcccccaggagacactggrgcctgtgcttcccacaccaaccacactcccgttctgccacccctgmggccggtgccagggaccgagtggacctgcagagccacgtctgtccctctgtctgtcgaccacagccggtgccagcaattcaggaggcctagtgggcgagggaggctggggaaaggmckggagggtgggaggaggagctcggccacaggaaataaggggcctgcaggtggctggggcgccccagggcaaaggcatttgcctcagacctttgcccggctactctagttctgagaacctgccctaaataaaggaggtaattctgaactgggagacatgccctytgtgctccaggatattcactgcagtgtcatttacagtggctaaggaggaaaggggarggcagaggggaggcagcagggagaggaaggaggtgggggagagggctggggcaggggagagggaaaggaaggccccactttttatatatatacatttttagagcagatttaggttcacagcaaaattagaagaaggttacagagakttyccgtatgtcctcgccccaacccagtctcccccattatcaacatsccccaccagggggtacagctgttatactttatgaacctacattgacatgtcataatcacccagagtccacagatttaggggtttttttgtttgttttgagacagggtctcactatcacccaggctagagggcagtggcacaataacagctcactgcagtcttgaactcctgggctcaagggatcctcctgctttagcctctcaagtagctgggattacaggcgcccgccatcacacccggctaatttttgtatttttagtagagagggagtttcgccatgttggccaggctggtctcgaactcctgagctcaagtgatctgcccgcctcagcctcccaaagtgctgggatgacagttgtgagccactgcgcccagcccctaacctagttttggccatgctctgagcccacattctttgtggaacctcaagatggtatctaagctctgtactctgttgagaagttgggtctccatttcaaaggctcccgtgtatacgcattaaacaaatatgtatgcttttctcctatgagacaatctgtcagtgatttttcagtggtccttcagagggagaaggggaaagctctcccttggtccccatagtatcatcctgaatagtttgaatgctctaaaacccccctgggctccattgattcattccttcctcactcaaatcccttgaagcggctacattgtctggtctacatacccggggtttgtygtcatgcaccaggaaaatttaggacagggacaaacacgaggactttaggagcggaggtttaatagatagaagagargaaaaagagaaacatctctctcttctccaagcataaaggactggtgggcagcagacacactgaattttatattcaggtttgtccttgcccagccctgccagccgactgcaggagcaggagaactaaggaagggaaaaggaagcagatgaaaggcttaagaaaaaggcggatctgttggcagcagcccttatagaaagagaaattagccatgtgagaggatgtggacgcagatgtggacgtggaagaggtcaagttagacaaggatttaagagctgaccaaggctagagagggatcaatgtgagagatgyaaaaaaaaaaaaaaaaaaaaaaaaaagggggcactggaaggatgaatgtccagaaggcaatgagggaaatggccaaggccgtgagacaaagaggccattggccaagggctgccataccttagaggaaccagatactaatctgattgggctggcaggagctgaaggatgtgaggactaggacagaccgggctccttctcactgggcctccaggagtctgtggtcacattagaagttgaaggcagcaggattctgccgtatctggattccagatttctcgctgatggctgagctattatatgaagttacaaaaagaggagaaaaggaacccctcctctgggaaacagaacaggagaaggagccatgccttgtgaaaacttccttatagacttaaacgaaatgccccgtgccagaagctatcggtatattctagtgtttatttgcatctttttcaggataggttgaagctttccccaccaggacagaaaaagcacgacaaatgactaaagtactgttaaaagatattatccccaggtttggactgcctctatctttacagtcagacaatgggccggcatttgtagctgaaatagtacgagatttaacaagactgttaaaaataaaatggaagttacacacagcctattggctgcatagttgaggaaaagtggaacgcatgaagtggacactcaagcagctactgaagaaatattgccaggaagctcatctgagataagttcaggttttgcctatggtcctcctccgagacaggtgcacccccaccaaacaaactgagtatttaccctatgaggttttgttcagttggccaaccccaaatcataggtcaaattaaaggtgatctccaggaactagaggaattaaccttaagaaagcaaatgcaggctttaggaatagccatgcaagaggtccatggctgggtacaagaaaggatgcctgtaagcctgatagaccagtgtgcccctttaaatctggagactctgtttgggttaaaaagtggaatccaacttctctaggacccatatggggtgggccctgtactgtcatcttgtccactcccgttgctgttaaagttgcaggtgttatgtcttggatccaccacagtcggctgaaaccggcagctcaggacgagtggaccagccagcaggacacagatcatccaacccagctgatcctgagaagacaacaagctgctgctgaggacgatcaccctgctctggtcactcgtgaggctgaccagtcaacgcacggctgaagcttaaggagacaagccccgctctagtcacacacccgaagctgactagtctacgcacggccgaagcttgaggactcgtcaagcaagtaaatgtggttagaaatcttaggactagtagtcttccttataatactaactgttttactattgttccgttgctgtgctcaatctcctcccccaggcaaggccctcttctgtccttgctggatatgaatacgctgtacattgttttgctgttatcaccccccttgaccatgttaaaataagtacccttagaaagtgtccccattgtacacacactacagggtcaggaaacagtataactaggactctattattctatacttattaggagtgtacagggactcacctaggaacttgtacttacaatcggatcacctattcaatttgtgacccaggaaatggccagccttatatatgctatgaccttctaagtctttacctaggacttggtttgaggttcatactgagtcaaagaaaggaagtcttataaatcaaagccaagcctctaccccccagggggggctatagccatatactttgatatttgtcagttaacatccgtgaacccaacctatctcacaatctctggtcctacagggtactgtacaaactgccagtacaaaattgtatgtgcataccctgtttgcccctccaaggccctagcaatagcttgctggaaccgcacaacacagttcactgaccgatcatcactgaggctaaagccaatcttgctcatcaaagcgccagcaaaaccggactgtaagacaagcacttgcaatcctgtaaatcttactatcttagagccggatctacctatatggactacaggttactccatggcattacaaagcagcagtcaaaaagctaaagtaaatttatatatcataaagaggactcaaaccaagaagtcatcccagcagcaattccgagtctttaagtcattctatgagcacataaatcaaaagttgccgagcctccccctttagccaaaaacctatttgctcagatggctgaaaacattgctggcagcctaggcatctcctcatgttatgtttgtggagggacaaacatgggagaccaatggccttgggaagcaaaagagttaatgcctcaaaataactttactctgactgacccttcctgcaaactgactcccacaagttcaagcgtctggctcttaaaaacttctattatcgggaaatactgtattgcttgctagggaaaaacttctacagacccagtaggggaattaacatgtttggaacagaaacatgttaaaaaattaggaaaaactttatggcgcggcaaagatagtcccaaaccacctcatccaaatccattctcccgtttctctgctctaaaccacacctggtatcagcttgaagctccaaatacctggcaagcaccctctggtctctatcggatctgtgggccacgggcctaccgacagctaccagccaaatggacaggggcctgtgtacttggaacaattaggccgtctttcttcttaatccctctaagacaaggagaagccttagagtatcctgtctatgatgagaagagagaaagatatagaaggagcgtaaagaaagacacagccataggggactggaaagatgatgaatggccccctgagagaataattcactactatgggccagctacctggtgggggacgatggctcatggggttactggtctcctatttacatgcttaactgcatcatgaggttatagatagtgcttgagatcatcactaattaaacagcaagggctttagatctattagcccagcaatctacaaaaatgaggaatgctatctatcaaaatagattagctttagactgcctcctcgcccaggaaggaggaggatgtggaaagttcaatcgaactaattgctgcctggaaattgatgacaatggaaaggcaattataggaataactgcaagaatgagaaaattcgcccatgttccagttcaaacttggaaagggtggtctccagattctctctttggagactggttttcatttttcagagggttcaagactttaatagcagtagttctggctgtactaggaagttgcctaatactcctttgtctcttacctctccttgctagaagcattcaatcagctatagaggcaatagtagctaggcaaactaccactcagctgacggctctgcataaatatcaacctttgcccaaagaagaaaacttgtctcttgacgcagaattaagtaatagtgaggccttctattaaacttcttttataaaaggacttgaagtggggaaaaatgtagtgagggttaaaaagaaaaagaaacaagttttcctctgcttagcagctcacttcgaggacagttataagataacgctgtccaaaaagccaaggccaaaggaatgagctccagacagccccccacctccagagcaaggctgaggaaaaaaagagagaaagacaaattcctttactgttactcctttccctggcctcttaagcatgactatgtcttgcaaatatttgtatttagccagttcttgtttttcttttgacacagctacaaggccaccagctaggcaagaccacaagttatacactctatgattgactgcctttgtttttcttttgtaagcctgcttataaaaaccccactctgtctttgttcaaggctcacctttttggatgtgaatccactgagctggtgcataccttaaaataaatatcctcctgtattcacctgtactggtctctctagtcctctgcgtcccgcaacattagacctgaaaaagattccattgtctggatgtattgtatccattcacctgctgaaggacttcttggttacctccaggttgtggcaatgatggataaagctactataaacatctgctatgttgaccaaaaaacccaaactgtaaaatatttgacgagatttatcctgagccaaatatgattgactgtaaccagaggcatggtgtcaagagttcctgagaacatgtgccccaggcagttgagttacagcttggttttatacatttcagggggacataagacataaatcagtaatgtgagagggtttgggatggcttaaaaatcacaggtgaattcaaagattttctaattagcaattggttgaaagagttattatcaaaaaccctggaatcaatacaaaggaggatcttggttaagttaaaaagttgtgaagaccaaggttctctttctttctttcttttcttttctttctctctttctctttcttttttttttttttttttttgagacagagtttcactcttgttgctcaggctggagtgcaatggcatgatctctgctcactgcaatctccacctcccaggttcaagcaattctcctacctccaccctctgaatagctgggattacaggcatgcgccaccacgcccagctaaatttttgtatttttagtagagtttgggtttctccatgttcgtcaggctggtctcaaactcccgacctcaggtgatctgcccacctcggcctcccaaagtgctgggattgcaggcatgagccaccgtgcctggtccaagatttttgttatgtagatgaaatctcatagatggcttcccttagagacaatagatggcaaatgtttcctctcagacctctaaagggtgctggactcttcagaaatgacctggtaagggaaggagattctctacagaatgcaaatttcctccacaagagacagctgtgcagggccattccaaaatacgtcaaagaaatacattttggggtaaaatatttcaatttgtttcatgacctgctatctgtcatgtgatgctatacttcagtcaggttggaattttatatcttatttctacagagtctgttctgtcagtcttaagatctctgttttaaagctggtcagctgtgcctgaattccaaagggaagagagtatgatgaggcatgtccgacccctactgcccatcatggcctgaaccttcaggtccctttgggtttccctggccaagagggcgttccattcagtcagctgccgggcttggagttttatctttggtttacagctataaacatctgtttgcaggttgagtaaatcttaaggaatcagagtgctggatcacatggaagaaataggcattatgttttgggaaactgccaaactgtcttccaaagtggctgtaccgtttgttattcccaacagcactgaatgagagttctggttgctccacgtcctcatcagcatttggtgtttggccaattttctggattttggccattcttacaggtatgcagtggtagctcactgtttaaatttgcgttttcctgacaacatatgatgtggatatctttttgaaaaaaatacagatggggtcttactatgctgtccaggctggtcttgaattaactagcctcaagagatcctcctgccttggccgccgcatgtgatgggattccaggtgtgagccactgcacccaacctaggttaacttttcagatgcttatttgccacctgtatagcttctctggtgaggtgtctgcctttgacccattgtggaatcaggttttttttttatttattgagtgttaaaagctctttgtatatttttggataacagtgctttatcggatgtcttttgctaatgttttcccagtctgtggcttgtctttgttttcctaacagtgtctttgcagagcagaaat

SEQ ID NO: 8893 - DNA, 32745 bp, Homo sapiens
gaattgatcaatcttaattctgcttaaacacagtggcatttaattgatcagaacctactaaggcaaaagtacttaggcaagaattgttaaaacagactactgtcaaaaacattacaaatttgttcaatgctgtattcagaaataagtagctataaaaccacaaagatattttggagtttcaaaggttttctgccttttcttttttggcaatgattttactagcttgctttctaagggcaaagatatctgtcagaaaaaacacaacctgcagtgatgtcgttcattacatcttttgccttttccattggctttaaaccaaagagagggaggactaccctctgaaagtctgacttgtaaccactctcataaacacctagctcactcaccttggagaacctagtaaaacaggtatggctttagctgactcagaatctataacgaatttgacaaacggtcccttctaaatgaggatgacctgacactgctctgaatcatcaagattcttctgtgtgcttgctcttctttcaagtgtagttcaagtttttatacttatggcctctgcattctgtttgtcagatctacgggagataattaagcaagattctaaagagttggaagttgaggggtgaaatgcaaagtgatcagtggagtcaagcagaaggtggctttgttggggtgagggatgccagatacaagtacaagaaaaataaagacggccgaaatgaatgcgagctacagatgagtcaccaatccagggctgcgtaagttataacttagatgcattaaaaggaacagtcaattccagaaatatttatgaagcgcctactaggtttaaggaactgcacggctattgtaggggacaaagatgaatcagacatggttcctgccctccaggggttcacgatgatgcaagaaccctgaagtcgtttttctcttatatgcggtactaatgagaacattattaaagagctgtattcagttttaactgccaccatttttttaaatagggagaaactagagagagttcagaagagagaaaggagatgctttcagtgacacaaaaccggctctgtgaggaaaaagctaaagagacccagttattatctttaagtatatgaaaggttttagagaaaggaattgagtaaaagaaaacaagtttgaatgacagcaggcgagatttcagccaggcccaggaatttcttgacaatcaggttaatagaatactggaattggtcactcagggagttccaactgccctttcctggaaaaaataattaaataaataatgaactgacaatttcaagtcacagacattcaccttcctgaagacgggggtgaactatatctgtgtcaaggtcttctgctctggggctctatgcccctgaagctaggtcaggcttttctttttccacaattccctgaatgatctgctctgggtaagtagccactgaatgcttcggagtgacagcccgatctatatccccaccaccaagtgccacacaactacctggaatacaaggtctcagccaggcgaaaaggctgggaatcaattctccaacagccacatatgatgcaagagtccactcgcaacaaagcctacgacacaccaaatatcagaaacgaaagtctctgagaacttgtgcaaataagaaacgtatttgcattggcaaggatataaaatttaagtaacaaatagaagaagacaggatcttctgcaagttacagacagtaatatttatggacatttctaagaaagcttgtaatgagtattttctacactcagaaacacttttttgagtctacgtaaagaaaacacttcaagagagataggaaaatggggtcttcccactctttatttatttattgagaaagactctcgctccattgcccaggctggagtgcaatggcacaatctcagctgactgcaacctccgcctcctgggttcaagcaattctcctgcctcagcctcccaagtagctgggattacaggcaccaccaccacgcccagctatttttttttttttttgtatttttagtagagatggggtttcgccatgttagccaggttggtctcgaactcctgatccacccgcctcagccttccaaagtgctgggattacaggtgtgagccactgtgcctacccaagtcttcccattctagctgaagaaagcataggcatgttagaagtatgaactgccactaaaaaaaaaaaggagaagaaaaaattccatcttgaatcagacccatggtctagtgagtctatgcttctttcacttcccccaccctgtaaagtcagggacagggattaagattttgtcatttcgacaaacccagaacctgccacagggcctgacacacagcaggtcctgcataaatgtttgctgaatgaatgcgttaaagatgggccctcgtctgtcaagaggtggaacatttgagttcatgtgggtgaagggcgcagggcggtgcacagcacaaagtcaatatggcctaagtcacagtgatcaccgtgaccctcaagcatctgggtttcttttataggaaaaataaagatctgcctatactgtaggtttttcttttcttttttcccccaaaagagaatagctatatgaaatggaactcttgcgagtttgggcctttcaagttcacatcccatcggtggttatataaagtctactgccattattctgaagcccgtctttgacaccaacccaaagtccttgaattgtcatcaataagactaccagaaagcacaggcgaattacacgttcagagaacaataagaaatgctcacatatcacaccctcttgatcatcactactttgctccacacaaacctcaaaggtggttccccaagactggtctctatgggaggaagggagagagagagagatgaagaaatataaaacataaaatacaaagaatctgagcccctgtaacttacagaaagcaccaaattgtcttttgtaggaaaatgatgtttaatgcatggtgaggcagaccctggcttgtggtgggcgaggagcctccccttggaggaggctcttggtgaaccacctctgggtgctcccttgcccagcctgctgccttgtttaggaatggatcttggttaacggcaaaggttatctttcatacttggggatactttccaagaggcacagctgcagcccctgaaactctgccccagcagtttatttccacatttttcaagtagcacagaaagtgccactatagaagagaaattctctacctgaaaccagcagaagctcaatgcaaataaagaatctggaaaggtcacagagggagtaaaaagaaggttctttcttctatggctatagggggtttattgttgctggtgcccaaactggaaagggaatcgcaggagattaataattgaaatgttgctattattggttttcgaaactatttgtgggttattctttccctggagtcatcatgtctgtaagcatctcagaagatagagggatttaacacactctgagaagatgcctactacagccagggactttacgtgcactagtttctaatggagttcctgcacagtccaataaagcccaaagtcgtatcactagattcaaactcaggtttctctgattcaagtatcatagcacattgtctgaaatcaaggataaaattaaggcaccttactcactactcaaatgtggcgagaagaaaagcaacatttatacttactcatttttaaaatataaaacctaaacacaggaacagatattttagggcatgtgtcatcaaactctgctaacccaagatgattcagaatctcatttcttggtagacagcttggtagataggcatcttcaggtccatctgatgatgaattgcagcagacagtttttggaagtctgtgaagtgttcctttacataagccaatagtaatcaacacagcatatctcagggagaggaaaacataaataacttggaatttaggctcctctcattcagaacccataatagagaccttggtggttggcctttgcactagatattgaaaaagcctcgcaaagcaagttgatggaggaaatacaatcacaaggcaaatgtttaaccttctaaagaaaataaacctttttataagaagttcagttccaaaccaccaaaaactaacatgctatttataaacctatccttcaagcaagccctggaagactgattctctttgccacccattaattggtattatcaaataccccttgtttcaaaaacagcatttctgtctaaatctctggcggttcagaacgctccattaatgtatctgggccttcacctggtattccaacttggtgcagcagcaccccattgaaacaattccctctcgtgtcgttatacttttcctgagaagaatcatgcacactctttaggagctcaaaacccacaaggaatccctcttcttatagaaatctacaggaaaagctctgctcgtttagcatgcacacagggagtccatgtgctctgattgagacaggggaaaaatcaggtttcctgaacccagaggatgtcaccacggcaggagaaaggaggtcatcagagtcttggcacactcatcacagtgagtgaatgcgggtcctagcaacctaatccttgattctagaagtcacctgtctgttttagagcatgtccaacaatctctttcaaaaacacccagatctgggcttttggcagactgatgtgggccagttgaggtgggatggggaggaagattagaaaaataattataaaggtgcacagataaacatccggaataaaagggtgcacagcgcaggaacaatgaagagggcacacggacaagatggagggaaactgagggctgaaagaggccaccgcggaggtcacctgagacagggaaggaaggctggcaaataaaaacagttcatgagacttttgagatccatgattattcttaaaccgtaacaccctacacacctgcagttctttatctggcgtaaggaactggaagaacaatgtagcaggaacggggagagccaagtctcagcctcgggggcatggcctaccttccatatggatttaaaatgaaaggagcaggaggagaacagtgcagttcccaagatggctttccacaaagttgacaaaatacaccccaactcacatacccggtccctagtaacagggaaaccagccgtttactatagttctgaattcaatgccaagttccttctctcaactcaccgggagtgtccagcagagggagtctcaaggaggtacttaataaagagaaaattgtttcattttaacactctagacagtgggagcattgactgtagccccctcctgtagacgcagatgaacaatgaacgcccgacatgggttctcccgcatgttcacatgtccacyggcatgttctattctgcgtggtggagtgatcagaaatttcgttttgttttgtcgaatggttaaatggaccttgtgttcttcagaatcaaagaggaaagcccctggaataacatctctctgttgccttctaaacagcccctttgtttctaagagagtctgaaaaaaaaatatttacagtctataggttatttacagcctcgttatccagggcctgactggtaactttattccggccagaaacctaattcatttggagccctgaaactaataacagattttcttttaagtttttttttttttaatcagcctcttataacagagataaaactattaatgccttccctgtctcactggccacaactgttctccggatttacaggaggattacattcccccctcgtgccctcctctgtgccacacaaaccctgtcccctctcatttgcgatttcatccacagaatatctgaacaaaaccgaaagaaagccgggggacccacgctaaaagtatgtgaaggctgcgatttcaatgatttcatgagacaaacatttacacgatgaaacgactgaaaaatcagacacacttgggtttaaaatttctcctactacaagcacacaaaaacacatcgaagtgtaaaaacttagttgattctgggttgctttctggctggaagctgacagaacggactgaagagaaacgaaagacagtgtgcgaggcagacctactgcttttctgccttgcgttcttttctttcttgctaaaggcagtcaaatggggaaaaataccccgatgccaggtgaaggtgcacaacacagatcgacccagaccgagccagaaaaacgtctccgccgctcccccggctggaaaacccaaagtccacgtccccttccacacgctaatgaggggagattttcgcctatttcattgttctgcctggctctgacatggacttttcatctctctcctctctccccacctagccccgtgcattccgattccacagcccccccaaaatcggaggctcgcggagaataaaggagcgtggggtgggcgcggaaagaaatgggaaggggcgcggggcggagagcgaagtggaaaggaggtgctccgaaaggtaatgtgggggggcggtggaagctaagccgcatcaccttcatttatcgcaaataaataaaaagcacagtcaccggtccgccttccccggcgtccctgccctccccgggcagccgcccaccctcgcacacgccccctcccctcctgcgcccccggcccctctccccgccctggaagcaagaccctgccggcgccgggtcccggtcatcttccgggcgagggagggggtcgcggccccctcgggccccgggtgggggctggggcaggcgccgggggctgcgggcgcggggccgcgggcagaacaaagctgcgggggccgcggagggcggcgggcgcggggtcggcggggccgggcgccccttaccttcgtacacgggggccatcggggccggggtgtccgcggttcatggcaacggggacgggaaagcggcgcgcgagctcggcccccccagcctcagtcggaatctgccatcttgagcctgtgtctccgctctcggcgcagccgaggccgcccgcgcccgcatcaccgcctcccgtggccggcgccgggggagggggccgggcgcgccgccgccgccgccgccgccgctgccgcccgggcccggcgcggggggctcggggctcggggctcggggcggccgggcgggcggagcggccgaggccgaggcgccgagcggccgcggcccccgagcggatccgcggaggggcgggagccgggggcagcgcgcggccagggccggcggggctcagctcagcatggctgggcgcgggggctccgcaaaagttgctggcggaggggggcggcgggcgggggcgggggcggggcgcggggccgggagagccacagggagtccgcgcgcaatcgagcgccgatggcacggatgcgaggcggggaaggccgaaccgaagggcagagccgcgccggcggcccgaggggaccgcgctgggaggggctgccgcgcagcgcggggggactgggcgcagggcgggccccgggtagtgggtgagagggccggcctggacccggcgggcgcacggctccgagtccagcgcagccgagccggtctgcagaggggcccccagaactttgtgtgtgtgtgtgcacgcgcgcgcgtgtgtgcccaggtgcgagggtgcgcgcgtgtgctggcggggagggaaccgacccgaaagagagccccacgctggcaaagtggctcgcccatctcacagccggttggcgctcgcggaggtaggagtggaatgaatgaatgaaggagtgggcgcgcgccgtgctccggaggagggcgggtgagtggaggagcttcggaaagccacacgaggtcagaggcaccgaagccctgccgtgcacgccgcggaaatgcagcccccggggtggtcgctgggttcctgccggagtctggcttccacgccaccctgatcttctcctcctcgcgtctacactgtcccgagggccgccactccatcacttgaatgggagctcacaactctctgggtcctcgcttttctcagcgctctctcctatcagggcttccgctaaacactctccagactctccccagccgggagcctctccaggtttgcttctccagctgcctcccggatgcttggataggatgccctgccatcccctccaacttaggaagacttgttgagtctcctcttaggcactgtttttaaaactgtgggtcgtgacacagtaatagatcataaaataaatgcagcggaaggcaaccagctttcaaaaagaacgaaatggaatccaatagaaaatattagagtccattgcccttagtaagggcaactattgtttcataaaccttttgtttcgattataggtactggacaagtgtactggaccatgatgtcaattttatttccgtctgtgaatcgtgggtttaaaaaagttgaaaagctatctgtgtaaaataatgatctctaacactgtataactttcttaaaaacaacctcgtgattttctcactacttcttatcctttccggtctccatcctccgttcccatccttcagtccttcccaaaaaaggcaagctctttcacacttttttagtggtacatcacgacaccttcctctgtgtgatcttgtactctgcggtcttccttgcccccataatcaatgctacacttcctatcccttctcttaacctaatgccattcacgtttgcagaatcctagactactgttgctaaaaggacctcagaggtcatctgggccagccctgcccttttagagttgaagaaatggagtccagagaagtaaaatctgttgcccaatgtcacacagtattgaagcttaggaataggtctcgtggctcccactctagtgttttttgctccacaccggtcatttatctccttcccttctatcctccctgcaatctttaactttagtcttggcccaggtcatcctaaatattgccatcttcataatacgtggttctggccatgccacgctcctggctaacatcctctaaggactcaacctctgcaggtggggctgagtgccttggcttttcatcaaggcaggcgagtcctgacttagctttctaaggacatgagttcagcaagtcactgcttctctagccaaactggtttacttgtagcccagtgccagcttcacccatctctgtcactgtgcctttgcccaagcggtcactttcccacccactttcccagaggggtaccttctccatcttctctctttaagcagattctacctgtgcctggctcacctcctccacaaaacagcccgagatagcgtgggagtaagtcagacctaggttcaaatcctagctcttccacttaactatgtgatcttggtcaaaatgcttaacctctctgagcctcagtgtctgtattttgattatgagaaggagaacaatagtaatgttctccttttgcatctgtaaatctctatcatagccttcaccacacaggtatgtaactccctgttaatacataccctacatgcatgtctctctgcccctttctagtgctggccattagaacttgctgccataatggcagtgtagctacttatgtctgtggagcacatgaaatgtggctagtatgactgaggaactgaatttttaattttaataaccatgggtggttagtggctaccattttggacaaggtgtctctagactgtaagctcagtaaggacagaaaccatgtttttcttgttttggattgtatgtccaataactgcattgcctaacgcatggtgagtactgcacacatatttgttgaatggatgatagctgcaatttgttgcatgctcccttgtgtccagcacaacactacaaactcgataaaaggcatttcatatagtcctcatcacagcctctgaggctgggttagattagagagagagttttatatagagggcagacacatagtaggggttcaataaaagttattattattctaactcctccctctgaccagccccactgacttttgtctcatctttccttaggctcacagaacatttcctgcctgttgctcacactctgttgtccacagcatacccgcaccctagatggctgactcttgtcttctgtgtaggtaccctgtgttcataactggattggcagcgtcttggagcaaggccctgctttataggactgcccctgaattcagcactgaccagtgttcagtaactgcctctaagtccatcccagctgctgtctagcagtgagtgattctaggcagtcttaaaatgaatatcacttgtgtcaaccgaaaacattttacaggtagtctcctccccataagaagggaacaatcttgggcaaggaaatagagtcccatggaaggggaacaagatggagccatacagacagaggtccaccttctcttcagaccaccatgactgaagctgtatccatgagatgcaaaacatgcattcaattgagctagcgaagttcgtatgatataacggaaaaatattcttgaaatgagcttagattttccttcatgaattggcagactgagtatactaattgtctcctttccttccggtgactgcagtcaagtggcagcaaggtataaacctaacagtgaaatgtcactgaaggagagcatgggagctgggaggagagaggatctgtgacagaacctggggagtaccagtatttgagacatgggaagaggaaaaagagctccccatggacaagagggcagagaagttggaggacagccaggacgggggattcctcaacatcccagcaaggtcaacagtgctgcatgctattgagaggcccacgtcagatgaaagcagaaaagcagctgggtgctgtggctcacgcctgtaatcccagcactttgggaggctgaggcaggcagatcacctgaggtcaagagtttgagaccagcctggccaacatgatgaaactccatctctactaaaaacacaaaaaaaattagccagacgtggcggtgggcacctgtaatcccagctacttgggaggctgagataggataatcgcttgaacccaggaggcagaggttgcagtgagccgagttctagtgccattgcactctagcctaggcaacaagagctaaattccatctcaaaaaaaaaaaaaaaaaaaaaaaggcagaaaggcatcaattggatttagcaacaagagttgcattagtgactttggtgaaactagtttggagggaaatacaggtttcttaaattctacctgaatatgtgtcctgttttatgggtggagatagtagaaggatggggagggctaaggaggtaccagaaaagagcaccagagattgctccaagcagagagggccttaccagtcatgggcctgagacaatgagaggggtctgggagctgtcccatttggctagagatagtgtgcattgtattttatttatttaataagcacattagcagtcagtgttctaaggagtttaatcaatcatttaaaaaaatcacttttttttttttttaacagtacatggaactctaggttgccaaaataccatttaacttcagggtgcattgaagaacaataataaaggcaagaaaactggaaaggatttagtaaccatttataccagttacctctccttaatttgcctttctacaaaatggtgcaagtcatatctttctcaggagttggtagagtgaacatgggggagctttgacctcatttcaagttcattttgcttacaggacatggaacaaagggtcttttttttttcatgtatgcctatagttgtgaaactgcacaacatcacaatatcttcaaggccacaggatagagataaccctctttttggtgtatgcatttaggtgtgtatgtctctcttactctcagggtattcttagcatgatgtctgtgtggcttgtatcttattctcacttggtgtgtgttgctcttattttcctgacagctctttattttccatgtgtgagcctgtgcctgtggtttatctctggaggatgtgcctgagggaggtaggtcactatctcaagttctgtcttttgatatcacacctctcttttggtctcttgctgtatctctattttcctctctttctgactgtgtgtctaattttctttttctctgtatctttctatcttttccacacattctttatttcttcttcctctccctttattttaattctgtttcttaacaagtcataatagagacctatttttgtttggattattcttaagaaattaccttgtctttctgctttaaacctttgatcggtttcaatgatacagtttgtaacagagtagtatttaataacaaaactctttaactgaaagcttcagtaacaagacattacactcacagagaatttaaaagagtagacatttcattcaaatgaggaacaatagagctgtggctttaagggcaaaggggagagcgaggcttggcagggtgaagggaatctgattgtggaaatggcagtcttggagaaattacactggcaaaatcaggggaatagggaaacatcattcatttttctgcttttgctcctagaagaaaaatgatcagacacctgaacaggggtgcaggaaaagcaaagcgatgccataagagcattgagcagaaaggaaatatggcaaaaaaaaaaaaaatgcaatcagcctatgaatgaaaagaagctgtaatgtagatgcacagaaggtagggcgattttgttggaggttgcgggaatggcagattaggatggatttgcacatgagaagcagttcagagaagcaacccaaccctgcagagaaatttctgtgattatgggaggtaggtaatagcttggttttcctgacctgcagtccaggctgaacttggacagactaggtagaaatggtgcagaaagaagcttggggtggaggcagaaataaaggtagactgaggagagctcttttaaaagcctgcaggtcctgttaagcctacctcagccatgaatcagtggacctgtgcatttctgtacagtgtgaagtttcaattgtaaggtttcctcccactgacatgaaagagcttgctcctatctggcaacccctggaggggcttgactgtcacggcagagggcagttaggactgactctttgctctgaggttgccagtggcttcttagattgcaaatcgcatgccctttcttagcccctcccctgcttgatctctaagcaaacatgagttagttagacactgttaatcacctcactcttcttgaatcactcccctcccttcacatccttcacatgcatgcttgtttagttttttttgttttttttttttttgtattttttcccaaaattcctagtccttcctcctttcacatgcttgtttaggtttttgtttttgtttttgttttcaatactcctagcctgccttcctgccttcctgcctgcctgcctgcctgccttcccccttccctccctccctcccttctttctctttctttctttccttctttcgtttgttctttctttcattctttctctctctctctctcttccttccttccttccttcctttctttcttcctttctttttttcctgagaaaatcaattcatcaaatgttcagctacagcttactatgtgctagattctgtagcaggacctgggagtataaaagggaataagccatagccctggctttcaaggagctcaagttcaaagaaaaaccaccaagcaaggagcatgatacaatataatgagtgcagcagtaaaaaggatgcacatggtcaaaagatagtacagagggacaaatggcaaggagtgtgtttggggcaggggaggtggcacgtctgtgcctggcactgcgagttctggcaggtgacagcaaataggatagaaagatatgaatgtctaggatatgtaagaaattataatattgctaaacatgcaaagcaaggccgagacagtggtcaggaatgacgctggagattgtatgccaagctgaagaacttatactttattctgaatgcaccagatgtggggaaaaatgaattcaattttgaacatgttgagtctaaagtacctatgagatattcagatagggatgctcagttgccaggtgggtgtacaggactggagctcagccaagggtttttaataggagatagagattgttttgagtcatcagtaagtgtataatgcgtggctgatccataggaggtgagatcacacagggagaggttacatggcagcatttctcaaagtgtggtccttgggctgcctgcatcgaaggggctttctaaggatgcagactcctcaggcagaaccccaaacccactgactcaggaatctctgggggtggcacctggaaatctgcattttgaatttactccctaggggatacatttacacaaagcagttccataactacaggtgtggagagagaggctaagaggctaaaggagggaactaagaagagagagacctgatcatttaggggccgtgtccttctcccttcaccctgtttcttgatggactggacctaagctctcttctgttccctttctgcttgttctcttggcaagctgatctctagatctctgaggctggtatttgaattgacatagtctcattagctcttgtcccacatttccacctgctttccagacactgctaccaaatggaactcatctcctcccaaacctccttctggtaaacaataaccacctcctagtccttcagctccagccattgcaggtcaactgccaggacccattgtttcgttgttgttgttgttgttgttttttgtgtgatagcttttcacattcttccattcctcttcctttctactgccagtacctgattgagcctatccctacctcctccttggactgctgcgctatttttttaacagatgtccctgactccagtctctccctcgtctttaattcacataactgattgttgacaacattggcttcctgcgcactgcataccattgctcagagatgttcggagtcaccatattactgcacaacaaccttcatcaccttaacctgacacctaaatcccatcatgatctgcccaaaatccccttcccaatctcatctcccactcttgcatctcgtgcatcctaagcaatagctgcacagctttgtctttgtacatgccagcctctgcccagagtgtcctgaactccacgtcttccccatcctttaagacccagttcacatgctatttccttcatgaagcctttcctattccccagcccacatccccagaggtcatttatcctttattctccccaaagcatattttaggtctgtttctgctgcattcattttttcctatctagtattagagggttttttttttgtttgtttgttttttgtttttttaatgtctcgcctttccctctatgggagcaatgaaagagggactgaccatcaggaacattaggtccatcacttttaactggatgatgataagggaaatgatttcatttctctgcacctcagttttctcatctatagagtgagataataatgtctgcctcatcagtagaaattattcatgtgaaggaaggggaagataaactatacaaggcaacaaaacaccgtagtgtcaggtatgaaggagacacttaataaatctgtactgaatccatgagaaagggtatacttctagacagctttgaaccgttctgggaatataataattaagtgatagaatgcaaggaagaatttagttttgggattacctgtttttattttagtgaaaagtttcacagatagaccttttacttccaacaacttcaaggcttaattttattttttaagcctagggttcttttttctttctttctttttattttattttttcatataatcctgaagcttttcactctatgtggaagacacacgtggttgcctgctgcctatctctggtgccttcttcctcagttgtagaactctgattttatttaggcagtactgtacctgcccaagaaagtaaattatgattggtttaagtcagttgcagcaaatcagtcatgtttccagtggtggtcatgtggcccaatgagataaaaggtaaaacttggagacttctgagaaagtgtctcctttctcataaaggtgtgttccatgggaagaggtggtccatttcctttccctcttttcagccatatcctagtaggatgggatgctttaggtgggatcaattagagtgatgtcttgcaagtaaggaagtaaactggctttggaaccactgacctccagccttattgagaggagagctgtctttatgaagacacctttagcaaggatcccattacctacagctaacagcatcttagtcatttttaggaagaatttagttttgtgatttccttatgtgttttatcacagtctgtgtatagatcttttaaaaataattcaacagcttcaaagtgtaagttaagaaaaaaacaaataatcttttgtcatagaattctgaggattttcgtttgtatgtatgagatgaatttgaatttttaaagaatttcttttggaatatggcaatatcttcagcttgcattccacttgccctaggtggtacacttcatcaactttcagaagctgctgattggttttgcttatcttttctttaggagacatatactgcctggactgcctggctgatgtgagctagtttgtctggttgagttggatgtttaaatagaaggcagaacaacaacaggtaagatttttaaaaatatcctttaatttctttgggctctattgacattattacattcattacaaacttctggatgttaagtcctgtgtttaatagccagagaggggaaggtggtgggcagctgggagagtggtgactaacaagatggcaccaccgggttcctgagtttgagggttgggtaaagccagggcaacgactgggatggccaaggagagcaagcagtagaaactcaggtccaaagggcattaggcgtgaaacctaacctgaccaccctatttcatattgcaacttgcccctctacccatgctgtcctctactgcaccccattttcccttacctggtgttcttaaccttttttctttttcctgtggatttcttctgcagtctggtgaagcctgggattgccctctcagaataatgtttttaaatgtattgaataaaaacacataagactacaaaagaagctaattatattgagatacagttactaaatgtgtatttctttattgatacaattttgagaaacagttactaaatgtgtgtttctttattgatacattaaataacaagatttaaccacaggtccaatagctacaaaatagtgatgaatgtaaacaacagttcaagaaatctgcaacaattgtcaatctgatacaaaatgtctgtgatttcaattggtaacaaagttataggtattgctgtggcttctgaggttgttagcctacagtcaggtttgaaggtttaagattaatgaaaataaacgtgccatttttccccctatccaagttcacagatcccctgaattctatccatgaagatgctatgagtctggaactccaggataagaatccctgctcttatcttattctgctatatctgcatagtatttattctcttctaacatcatttattatttacttatttttaaagttcatttttatggtctgattctttctattagaatgtaagtttcacaaagtcattgtctgttttgttcactgatacatttcaagtgtctagaacagtgccttgtacttacttgtggctcaataaatacttgttacatgagtaagtccagaatgcaccagcatctgagtctagacagaggagccaggcccatggtccttctgaatgtggggcaccatgcagctgcacccatcaaactgcccaccagccaattctcttgtactttggagggagccagactgctatgtggaggtggacttggagacactgagttctgcccatggcaccattgggattggatgtgtggaggagaagaggaaaggcttagggctgggaatgaaaaatgcacatggcacatggaatggccgtgccctagggttggcctgccccagactggggccaggtgttagacaacagttaatacaaaatatgtttagacaaatagatcgggcctggactggggagggcctttagtgcccagcagaagtatttacatctatttccaaaagcaatagagaagcactgaatatttttgagcaggagtccaagttggtagaatgaaagaagggctggaaataagggctataagattttgagtttaagtgcccaccttataaatcattagcaaaagcagaatataaccctttctccaattctgtatgggtgacacccaccagtctggtaaatggaggtcgttagtgtgatggggtgtcattctcactttgtttagcacccccactagatatacatattcactttttgccttttttataataatttgagaagttatagaaaatgcttatacatttaatatgtttaatctctctctctctctctctctctctctctttctttctccctttctccacagggtcttgctctgttgcccaggctggagtgcacttgcagtagcataatcacaattcactgcagcctcaacctcccaggctcaatcattcttcctgcctcagcccccaaagtagctgggactacaggcatgcaccaccatggctggctaagttttaaaacttttttgtagagacatggtctctctgtgttgcccaggctggtctaggactcctgggctcaagcaatcctcccacctcagcctcccaaagtgctgagattacaggtgcaaactatctcacccagcctttaatctttttattagtgagatatctgacccaacggctaggatctgatggtctttttagtatggcctcaaatcactgtatcctgtaagcatttttttttttttttgagctggagtctctgttgcccaggctggagtgcaatggcacaatctcagctcactgcaacttctgcctcctggattcaagtgattctcctgcctcagcctcccgagtagctgggatcacaggtgcctgccaccacacccggctaatttttgcatttttactagggatgcggttttgccatgttggccaggctggtcttaaactcctgacctcaagtgatctcccctcctcggcctcccaaagtgctgggattacaggcgtgagccaccgcacccggcctaaacatattttcttctagagtgtttttaggtctgcacacggagtcctaggtcaatgccaacaccaactcacactgagccctaactatggaatcggagcaacatcattatttaggcccatggacaaaataccaaagtaatctgtttctatgttccattatttcctcctctccatacattatacatacaacaatttccctttatcacacgtacctgtgactacgtgggaatcattctatcccaaattgctgcagcacaatctgaggcttactaaatatttgcctcagccataaagctgatagagcattagtttaaaatgcaagtagggaccatgaggatcttttgggtttcatgttgaaacattcaagctgctcttcctactacggctattactactaaatgcattatatgatttttgaaaactagaacaatccaagtctggctaattttttaaaattcccatttctttcactttcccaactgttgtctattcaccctttattctacctttaaagcaagaaaaactgaaataattatttggaaagttttttcacttctgtcaaaacaacaaaacctatatcgtttgagtgattagtcaaggacagttgacaaaaggacagtagtcaaaaagaaaaatggctccctaaactcttagagaaaagaaatcaagcttgcattgtgatcaaactaaatgaatgtacatagtaataagcaaaaattcaaatggcagaccatgtttttcttgcacctatgaattcattctgatggataagatagatggcttaggactccatattacatttgtatgaattaatagatattaggggaatgtgtaataagtgactgcatgattgactgatacaggttttggatttttacttttatttttctgagacagggtctcactgtgtcacccaggctggagtgcagtggtgcaatcttggttcactgcaacctctgcctcccaggcttaagcaatcctgccacctcagcctcctgagtagctgggactacaggcacccaccaccacacccagctaatttttgtatgtttttgtagagatggagtttcaccatgttgtccatgctggtctcgaactcttgagcccaagccatcctcctgccttggcctcccaaagtgctgggattacaggcatgaaccactgtgcctgggcttaggttttggatcttatatctgattatccacaaaaaagaacccagaaacactaatatagtggaagccattgcctcagttaggtaacactagttgtggtgacagataaatgctaacggtagcctaacacaatgaaagtttatttctcgttctgacaacagtcagcataggggtttagtgagtggccttccacatagtaattcagggacttaggcgtcccctacctgtgagtgggagcctcggaggccttcacttccagctggcagatagaaggagagaatggaggatacccccacgggagatttttacgggccaggcctaggtgtggagtgctggttccctttgcactctatgggccacaactcagtgacatggctacctctaaccaaaggcaggctgggaaatgatcacatatgatgcagctactaaaaataatgtctgagttatacccattggccaaggggaagtgtccgtgatatattcgtgagaggattaagtttcagagtatgttgtattgtgtaatatttataaaaagaaatgtgaaaatccctaactatagtgcatgtctttgtataatcctagtgaaaggtgcaggcggctgtataacccaggccccgcacatctattaccacggatttgggtatggaggcagtggcagagacatgaaattattaactttttctttacatatctttggaatgttttgttttttttttttttttcatttcttgcagtgatctcatacttactttggaattaaatttttaggtataattttaaagtatgggtggtagtttttgtgaaatttagaaaaaagaagtgaagaagaatgtgtttgtgcatctccacactgttatatttttttcctgtgggaagatatttttcgaagtggagcagagcttgtgtgtgttccagggtatgctatatcccatagaaagcacacctcaagactgattccatgtttagcaagttatctccacattaaaactttaatttatcagtttcgtgcatatcatatcatgcacataagtgccctgaacctgaatattcctgtcctaaaaggatatacttctcattctaaatcaatatattgatattctgatttgggaaagataaagccagtctggggttttataggaatagatcagctcatcagatcctgataactcttgagtaaactggtaaaatagagttaccaaaaccacaaggctaagacctggactcctggctttacagagattcatccaatatccaccccttccaaggagagccagccagcttcacccatggtcggcttggtggtttgtttactggcctgcattatcacctacctacttgtctttattctctctgcaggtcccagaggtttgtcttttatgtcaaatttttctgtagaacttcacccagcatctagatacagtttattgacaatgaaaacaaaacaaacagacatagaacacagtgatgggaatacaggtggttattcttgagggactgcatgaagcacagttggacaaatagccagtcctctttatctgcagggatgagggcagggacagaaatcagactccctgtctgcttttactcataggagactgagtttgcttttcattgggtcctagacttccaagtcaaccctactacatccaagtcatcaaaggatgaatgagggaggagagaagggtatactttcatccctgtcctccaaaagagatatcctggaaaatgcacttttaaagtcataagtatcatttgaggcccaggtaagagaacatcaataggaaacaaagcaagatggtaaaggaaaagaagagcaataagaatgcttggtgcgaagtagggtcatgtggctgtttgtctgcagcctgcctgattcatggctaactagacaaaatgttcagaccaggtcaccagtttttagatatgtaattgaatggttatctactatgggaatggtataaactaaaaatattataaaacatctctctagaaatcctgtgtcattaatacaatttaaaaagtactaactgggccaggtgcagtgggtcacacctgtaatcccagcactttggggaaggctgtggcgggcagagcacttgaggtcaggagttcaagaccagcctggccaacatagtgaaaccttgtctctactaaaagtacaaaaaaatttagctggacatggtggcgcactcttgtagtcccagctactcaagaggccaagccaggagaatcacttgaagctgggaggtggaggttgcagtgagccaagatccaccactgcactccagcctggatgacagagcgagaatccattaaaaaaaaaaagtatttattgaacacctactctgtgccaaacaccgttttactgagtggcaaacaacagtgaacacctttgtagtgaaaggcaagacagagacccagaaaaaacaaacaagggagtgtagtttgtgatactggggccaaatgaaagactcttgttataaatttgatggacttttaggggatgggaagatcacaatctgctgaaagagtcaaagaaagcttacatgttgagccaggcatttagggatggatttgatttacaaaagcagagaggaaaaggaaacatatttcatatgagattgaatagcataataatgaaaacatttacaaagtgctttacagtttgcagagcattttcgcattcatgattcagagtgaaaataagccaagcttttcagagccaagtgttgagaccaatctgacttagtagaaagtaatcattccttcttacctctctctcctgtcttccctttcctgatcagggttcacggtttcatattgacttcttaatccaaagcccttttataggggatttcttctacaaagaagtggcaaagagaatgagaaggctgcatttcttaaagaaaatgcatcttaatgcttgtatgggtgtgtgtatggtgcacgtgcatgtatatgtgtttgctaacagttggcacaagacactttcttttttttttttggtctgtttatttgagatggagtttcactctgctgcccaggctggagtgcagtggcatgatctcggctcgctgcaacctctgcctcccgggtttaagcaattctcctacctcagctcccaagtagctaggattacaggcatgcaccaccatgctggctaatttttgtattttcagtagagatgaggtttcaccatgttggccaggctggtctcaaactcctgacctcaagcaatccatctaccttggcctcccaaagtgctggtattacaggcatcagccaccacacccagccaacactttctatatgggatgaacaagacattttgtgctttataatcccagtgtagatatcttctggactttgaagaacttcccttttctagccaatcttctgtcttctccctttcttttttttttttattatactttaagttttaaggtacatgtgcacattgtgcaggttagttacatatgtatacatgtgccatgctgatgcactgcacccactaactcgtcatctagcattaggtatgtctcccaatgctatccctcccccctccccccaccccacaacagtccccagagtgtgatattccccttcctgtgtccatgtgatctcattgttcaattcccacctatgagtgagaatatgcggtgtttggttttttgttcttgtgatagtttactgagaatgatgttttccagtttcatccatgtccctacaaaggacatgaactcatcattttttatggctgcatagtattccatggtgtatatgtgccacattttcttaatccagtctatcattgttggacatttgtgttggttccaagtctttgctattgtgaataatgccgcaataaacatacgtgtgcatgtgtctttatagcagcatgatttatagtcctttgggtatatacccagtaatgggatggctgggtcaaatggtatttccagttctagatccctgaggaatcgccacactgacttccacaatggttgaactagtttacagtcccaccaacagtgtaaaagtgttcctatttctccacatcctctccagcacctgttgtttcctgactttttaatgattgccattctaactggtgtgagatggtatctcattgtggttttgatttgcatttctctgatggccagtgatgatgagcattttttcatgtgttttttggctgcataaatgtctccttttgagaagtgtctgttcatgtccttcgcccactttttgatggggttgtttgtttttttcttgtaaatttgtttgagttcattgtagattctggatattagccctttgtcagatgagtaggttgcgaaaattttctcccattttgtaggttgcctgttcactctgatggtagtttcttttgctgtgcagaagctctttagtttaattagatcccatttgtcaattttgtcttttgttgccattgcttttggtgttttagacatgaagtccttgcccatgcctatgtcctgaatggtaatgcctaggttttcttctagggtttttatggttttaggtctaacgtttaagtctttaatccatcttgaattgatttttgtataaggtgtaaggaagggatccagtttcagctttccctttcttaactcaaagtagacctgttcctcctcactgtttcaccaccccgcctccctttcacacctctcctggttctgtccactcctctgcctacgtaaccaggccctactaccacccttctgttttcaggccaagccctacctccttcacaagctcttctccagttacaaatgcaactgattatcatttgcacccctcttcatctctgcagtagttcttaatttcgtggggggcatattatatacccttaagaatgtgatgaatgccttggaccctggacacatatacacaaaaaatatgtgtctaatctcaggggatcatgttcccctgaaaacattgcttttctagatcacatttgtttagaacaaaccatatacttcactgccttaaaatatacttttatatcattttgcctaatatatatcttcataattagactaaccttgaggagaaagctgttgtagaattttttggtatcctcatagaacttggttaaatgtagagcacatagcggtatttaatggaaaaggaatgaataaaccaactagggttcatctatgcaatggcatagcattcagtgataaaaataagctatcaagccacagaaagacatggaggggccttaaatgcatactgcactgtgaaacaagccaatccaaaaaggctgcatactgtgtgattccaactatgatattctggcataggcaagactatggagacatgaagaagacagtggtttcccaggatctgggggagacagaggggatgaacacgtggagcacagatgattttcaggccagtgaaactatcctgtctggtactgcaatggtggatgcatgtcattaaacatttgtcaaaactcataaaatgtacaacacaaagagtgaaccttgatgtaaactatggtcttgagttaatgataacatatcaatattggctcattgattgtcataaatgtaccacattaatgtaagatgttaatgatagaggaaactggaaggagggccaggtttatatggaaatgctgttttctgctcatttttctaaaaatgtaaaacagctcttaaaaaataaagtctattaatctaaaaaaagaagagaagtttccgattttggctgcagcctctaatgaccattgggataaagaagaggcaatgccttaatacaatgcatgtattttaactttttgaaaattgtatccgtcattgttaagctcagttaaacttgcgcttgacatgtcgacacaatgtccatttttaaatgaactaacagaattggtaagatatgctctcatgatagagactcagccaattctaatgtcaatgaaaggctccacatttaatgtacacgtttcaacatgaagaaaatccattaaaatataattagcgagttttacacataaatagaaagaaggcctacctagaccttgctgccatttaaaagagttctttcttctttgtctgtttttgtatttttcacagaagctttgaggaagagccataactacctggagcagaatgattatttggagccacagaaaatcattttagggagcagtgggtccaggttcagtgttgtgtgttcaactcggaaagaacacagttgggtggctgaccgggttacttctcccctgtggctctgcttgcattggtcattgaggtcaggcaggggtttggccacagtgttagccattggccctgcattgatcctcacatagtaacatcttgtttggttattaaagtgactgaattgttggaatgaagcattgcaaagtcttgttattccatccatcttcacaaagactataaactaacttcaccatgtagtgactcagctggttggctagaaagtaccttgtaagatggcctattctgccaacatttcctatcccaaacaaatctcccaactctcaccaactctttacattcctgtgtagtctttagggtgaggggctgggagtgggatggaggaaaaggtagacgaatgaagtaaagggtcagtgcacaggcagtaagtactgctgaccactgtaatgtccactcacagctgagatacagtgttcaaacttccctcaaaaaagccacactgccctcagagtgactccttggaccccagccatggatctggccacagcattcatttgattccatgcattacctccttgaataattataaaaattatgttttccaaatagaacaaagagatgcttcctgaaattcttctccttggaacactcatgatatgcattcaaagtgcttagcctgggggtcgccattgtgtacacacaataaatcttagtgtatcaagaattcaggcagtcatgaagctcaaatgacaagaatttttatttttattttttttaacagacagaagtcagggagggcagtcattgcttagacaatgagattcaagcaagtgctgttctaaatctctgagctctgtaggggagaagatggatgaagcaggcagcttgaagagggagacacgccagccagaaggaaaagaaagaagccggtgaagcaggaagagaagaaaacacgaaagggtaggaagatgagaaatggatgccaaggagagggagaaagagattgtcagcaagggaggcgaaccgaggagaaaacagggagattcccgcatgggtggagccaagtttccactgtgctgtgagcagaggaagccaggtgtattgttcctgaaactacgttattaactgcctaacatatggctcacaaggtacacgtggaagcgagagcaggaaacaaaatgcaagtcagctgggctaacgctgaaaaatagtgatctgtgtcagttttgagaagtgtgagaatagaaaccttctatgcaggagatcagcatctttgtctgtttcctacaccgaggctcaaagagaacatttgctcccaaaccatggtagttctgtttcagataaagttgtctcataccaaccataattcatgttcctgatcgtgaccctgaagcacaagaacccaaggaagcttcggaattttcaaagaaaaatgaattacgtagagtggtgtgaccagcaaatgcagtttgaattttaagtgtgtattctaattttttagaagattctgattccgtgtgtgaaagattgaattaccctccattttctaggatgtggcccatttgccagccagtctggacctcagatcttagttctggttctgtaacttcagttgcctgccagacatttccatctgggagccctgtcctcactctgaaacattctcagaaccagcctccttctccacctgccgtcagacattagcaccattcctctcccattgtcacctttgattgtctcttctttacttccatacactgcttttttttttttttttttccgacagtctcactctgccacccagagtatagtggtgcaatccctggtcactgcagcttccacttcctgggctcaagcagtcctctcaccttagcctcccgagaagctgacaccacaggtgcacgccatcaagcccagctaattttttttttttttgagacagtctcactttgttgcccaggctggagtgtagtggcacaatctcggctcactgcaaactctgcttcccgggttcaagcaattctcctgcctcagcctcccccaagtagctgggactataggcgcacgctgccatgctggctaattttttgtattctagtagagatggggtttcagcgtgttgcccaggttggtcttgaacttctgagctcaggcaatctgcctgcctcggcctcccaagtgctaggactacaccatgcctggcctaatttttaaatttttttgtagagatgggtttttgtcatgttgctcaggctagtcttgaacttctgagctcaaaagatacacccccctttggcttcccaaagtgctggaattacaggcatgagccaccacgcccagcccaatatgctgccaaatttttcttcaaatgatttcctagttccttccttgccattcttgctgccctgaattaagcccaggtcctcatttattggcttcccacttgactccttctattttagccagcacacatgttgtagaacaacttccttaatgtggctttcacttggcttctgactcagagtgtatgaggtctcctaatttcctagggcagtaggcctggccctaccccacaagcctcattaccgttttatctgcccatatcccatcaccctctatccacatcttgttatccagtggagagtttccacttctaggttccaagccagaaatgtgtggatcattctgtcttccctcacttccttaaacaacccgtcggcaagtcccacagactggatctccagagtttccctgtagctcttttctccatgctcaccaccctagtttagggcaatgccaccctttattgagactctggaagaacctcctgacagttcctgctcccctctggccccgtcaatccattttctacacagtggcccagaatgtttaaaaatgcaaatcaggttgtatcatgcctccagtggcttctcattgcacctagggtaaaatccaagatccttatagtagcttccaaggtcctgcatggcttatcctctccctccctcctcgaagacctcaatgcacctgactgaactgatctcagcacgtttccacctctggccaggctctctacctaatgaccctcctccctgctttttgatccattccacctctcatctcctaggtcttggcttaaatatcttcagagaagcccttctggacttccttcagtagtgtcattcccacttcccgccactattcttattacctgtttatttccttcatacctttttatcatttgcaatgattgtgtttgtttcctcatcttttttctgcctcccccagacctgaagctccgaaagaccccggagtgtttgtcttgttaaccatcgtttctccagctgtccacgcaatggtcaatatgttagctattataattactattttaatattactgtttcttgatgatttcagactctttggatagaatattctcccttctatctgagagtgtttgtgaccttctcatatttcctcatgtcctctggaatcctgacctaaatttttagtcttttcctatcagttatcaattgcttacttgttgttttcatgtttaaaaactcattcaactccatccaaactttcttcttcttcttacaaaatagtttatagctaactatatttccttactctcatttgttccttccctgtattcagtgtctccccatcaatatcttttattactccagaataatttcagaaacagtttgagacagttttaaaaataatgccgctggcattttactagggatgacattaaccttatcagttagtttgagggaaatcagtatctttgcaatatcaaaactcttcctaatcaaggacagaccacatttttccatttatgtgtttttaaataaaataatgttttctttgtattggctttttaacattattgttaaattccccttcaacatttaactgtttcactacaatatgtctaaatctaggtctgttttttattaatttgggctaacatatgatgagctttgatctacaaatgcaggtcttgcttcaacttaaaaatattttcttttctaatatctttaaatagctcttctgttctttttttctctctccttcaaaactagatttctatcacctgtctttctatgtctagaccttgtttctgatagttttgatctctttgtcctttttttttcttttttgtgaggcaggttcttgctctgtcacccaggctggtgtgcagtggcacaactcagctcactgcaacctctgcctcccaggctcaaacaatccttctacctcagcctcccaagtagctgggaccacaggcacttgctaccatgcccagctaatctttgtccttttcttttgcattacagaatacagtcctatgcttagctttcttttcactgattgaattatcttccattgccagttgtaaccactgtggttgctaagtttatttacaattcttccatgtcattattattattatttgatacagagtctccttttgtcacccaggctagagtgcagtggcctgatatctgctctctgcaacctctgcctcccaggttcaagcgattcttctgcctcagcctcccaagtaggtgggactacagatgcacgccactgtgtctggctaatttttgtatttttagtagagatggggttttaccacattggccaggttggtctcaaactcctgacctcagatgatccacccaccttggcctcccaaagtgctgggattacaggtgtgagccaccacgtccagtcacattattttcttaactgtgtcaactctctcatatcactttgttggcttatctcattcttaccttttatttcatggagtctgagatttttatctgtccctccatcaaatgtagtttaaatattgttttaagtgttgttcaaatgtatttccattttctacagtaacattttttctttaaaatattcaattttaacacttcttgagtgctacgtgtatccattttctcgttacagaatagttgcataggttacacgtgatatagtttggctgcatccctaaccaaatctcatcttgaactgtagctcccataatccctacatgttgttggagggacccagtgggaggtcattgaatcatgggggtgtgttttttccattctgttctcgtgatagtgaataagtctctagagatctgatggttttataaaggccagttcccggctgttcgcagtggctcatgcctgtaattccagcactttgggaggctgaagtgggtagattacctgaggttaggagttcaagaccaacctggccaacatggtgaagccccatgtctgctgaaaatacaaaaattagctgggtgtggtggcgtgtgcctgtaatcacagctactccagaggctgaggcaggagaatcacttgaacctaggaggtggagttgcagtgagctgagatcactccactgcactccagtctgggtgacagagtgagacttggtctcaaaagaaaagaagaagaagaagaggaagaggaagaagaaagaagaaagaagaaggtggtggcagttcccctgcacatgctctcttgcctgctgccatgtaagatgtgctcctcctttgccctctgccatgattgtgatgcctccccagccatgtggaactgtgagtccaataaacctctttttctttacaaattacccagtctctggtatttcttcatagcagtatgaaaatgaactaaacagtaaattggtactggtaaagtggggtactgctgtaaatatacctgaaaatgtggaagtgactttggaactgggtaacagacagaggttggaacagtttggaaggctcagacgaagacaggaaaatatgagaaagtttggaacttcctagagacttgttgaatggctttgactaaaatgctgatagtgatatggacaataaagtacaggctgaggtggtctcagacggagatgaggaacttgttgggaactggagcaaaggtgactcttgttatgctttggcaaatagactggcagcattttgcccctgccctagagatctgtggaactttgaacttgagagagacgatttagggtatgtggtggaagaaatttctaagcagaaaagtattcaagaggaagcagagcatgaaagtttggaaaattttcagcctgatgatgcaatagaaaagaaaaacccat

SEQ ID NO: 8894 - DNA, 22074 bp, Homo sapiens
ggcccactctgccctaggagcccaaggcccaaggaagctgagaagagaaggcttttgttttctgttttgttgttgttgttgttgttgttgttttttaattattagatgggagggcccaaagaatacccaggagtcttacccctattggaccattggctcattcttgagtctacactttcccctccctcatatactgagaaaaatatcaccttttctttataacagcggttgaggagagtgccaggaaactaaaggtattgaggggaattcaaattctgtacccacccccaccctgcctcgttttgtcagctggaaaatgtgctgggtgagacccttccctttctgaggctacccactccctgcatgacctcctccagccccatacctgctgttgtcccagcactgcccctgcctctcaaccccaccctgggagctcctcccagagcccctctggcttacttaccagtgtgactgcgcttgtgcaccatgagcacgttgggtccaatacagaccatgccgcagacgtcacacttgagcttgccattgggcagccggatgcccccaggggagtgaggctctggcccactcccatcacagtagcccaggggctcagacaatgaatcttccacaatcacgctgtcgtccttttccaggagccgctcatctggccccagcagtctgcttgactcctcatcgctgtacatctccaccttgatggagttggctgaggggtgggatggtgtttagaatagagagaggcaaagggggaagctgctcccaggccagaatggcactctttttttttttttttttttgagatggaatttcgctcttgttgcccaggctggagtgcagtggcacgaatttggctcgacgcaacctccacctcccagattcaagtgattctcctgcctcagcctcctgagtagctgggattacaggcatgtaccatcacacccagctaatttggtatttttagaacagacagggtttctccatgttggtcaggatggtctcgaacttccaacctcaggtgatctgcctgccttggcctcccaaagtgctgggattacaggtgtgagccactgcgcctggcccagaatggcactcttaaagtttaagagggtgtctttaggccctgagacattcaagccttaaatggaactaacaccctagtatccctgctgctgatatcagaatcctactggaacctgagacaaccttttctcccacccaccaggcaaataggcttcaagagaaaaaagttgggccgggtgtggtggctcacgcctgtaatcccagcaatttgggaggccaaggcgggtggattcttttgaggtcaggagtttgagaccagcctggccaacatggtgaaaccctgtctttactaaaaatacaaaaattagctgggcatggtggtgtacgcctgtaatcccagctacttcggaggctgaggcaggagaatcgcttgaacttgggaggcggaggttgcagtgagctgagatcacgccactgcagtccagcctgggcgacagagcaagactccatctcaaaaagaaaaaagttgggggtacataggatgtcttctgtcgctgaggagaggaggcgactaaggggagcttttttctctactctcttgtcatgaagaaagatgtctggcttggccctgggcaggaagccagcaagttaacagtggcgggaaaacagatctaggaagactgaagggggacaacaggccaaagagagcaaacctggaagacagacatgcttacagttccctcccacctcattagattgaatccctctaccccctccacctccataaaactctgaggcagggcaggaggggtaaaggaaggaggaaccattgaggagaaggctttggctctagctccgacctacattcctggctactccaaccatttagagaatgtcacagatctagggccagctggggagaggcagtcatggggaccctgtctgggtaggagaatgagctgtggggagatggggaggtccttctactctctatttcctatctaactccatctgatgaccatttctatctacctgcttctctaattccataatttctctttgaaacttttaccttaatcccacccatacctcttttaattccaccctagtctgccagtgactgactattcactctcctttcagaagccagaaaaaccctagacactgggctcctcattgctcttagagactaagcaggagaccagcaggaggtgacgatggggaaatggttgccagtggaaggtgaattgaaggccaaatgcaacagggggtgcctactgccaggaggtggtaggaggttacacttaccactgagtgagcggctaggagaagagtgctggctgttgggggtgctcaccgagggccccactggggccccgaggaactccttctccagagatgagtccccgctaccttggaggagagaacaagagggcaggtaaagctggagctggagatatctactgtccattgcctaatcttttaaaaaaattcagttaaatttcacaaacatttccttcatagccatgtacaaagcagtgttgtatgctgggcaccataccttgtgcccccgccagtctggatgcctggtgctgccttctgtgagctcagtggctgggccttgcctaccctacctttatctaggcctgagggcaagagcatcactgcctgacgtccacaggaagcagggctgaggctgggtgcgccagggcggagaggaaaatgggggctgcagaagggacagatgttcaggacagacattcttccctactgttcctctctggagcccccagccggttcaggatctgcaggaaaggtaactggaattgtccttgaatctaatgataatattagtaatcatcatagcagctaataatattaattgagtacttactatgtgccaggctttattctgtgcacttgaaatgaataatttcatttaatcctcacaacaactatatgaagtaggtgctaatatcatgattttttcagatgaggcaactgaggtacaaaagaggttatgttagttgtctaaggttacatagctgctagtgtggaactgggatcatagacagtaagcgtccatgtccttaaccagcacctacacagccaattggtggtcacaatcttagtagggaagaattgggcctcttagactttctaaattcagcaaaaatttgattactctagaaagtctcctactgatctgattccaatcacgtgtttactatttgatattcattgacagttaagtgatcaacttattctcagtatatttgttttaattttctgataaattgctttgtaaaaatgctttttgaggctttcataatgtttttcaaaatcagataacatacctaaaggaagatatgaatgtcttttttaaaaaaatccctcctccccacaatcttctacacaaatatataggtgaaataaaaatacatgtagataaacacacacagagacacaacacatatgtagatacatataaagagaacatacctattgggataaacatactggtagccttctacattatctgctaacatgaacatgcatggatgtgtgcacacaggcctaaatatggaagagagaaagagaaagcaagggagagtgcaagaaagagagaggaagcctaaaattcatccctgaagtccacctattagtactttacccaattgcccagctatgcacatacttactttcacaaaataaagattccattataaaatggttggagtcttgggcctgaggcaagaaatccggaacacaccctcctgagggatccctctccagctttggtcagtgggaagaaaacaaccactcaggactttgggaccatttcccgttcatatcctctcctaaagtcccattttccccattctatcccgtcaaagcctgaggaaaaatgttcactatctatagaaaaagccttatggcttgaatctgagttttcccagctggggctttttaggtgagccatggttacctaaaaatgttgcccgaaatcagaaccacacacatatcatgaagtgagcatctcaggattgtgggttgagacttgtagactcagagccagttttaaatatatcctttcaactaagtgtagggtttactagggttaaaagggctgaaaatgttatcttcttattccctttattagtgctgaattgccctaaatcacttgatgttactatcagggaagaacagggcacttggctttgaggccttgaccctaaaaggatgagtgaacttgttggaaatccatcactggtcccagcttattcggctgaggctgcctcttgaggccagcgacttgctatgtggaggaaaatatatttaaaagtacacttagaaacactgagggcggccgggcgcggtggctcacgcctgtaatcccagcactttgggaggccgaggcgggcggatcacgaggtcaggagatcgagaccatcctggctaacacggtgaaaccccgtctctactaaaaatacaaaaaattatccgggcatggtagcgggcgcctgtagtcccagctactcgggaggctgaggcaggagaatggcgtgaacctgggaggcggagcttgcagtgagccgagatcgcgccactgcactccagcctgggcgacagagcgagactccgtctcaaaaaaaaaaaaaaaaaaaagaaacactgagggaaaagcatcctttgtggctttcccaattaaggcccagaaacaggaagagaagcaggagtcacaccagtaattcaagaggctctttgatgctgttgccctccctaagattaaggtaaggggaaaaacaggatcaagtctactttcatggggctaaaatatatgtataatgaatctgtttcaggagtcagaaaggctttcttgggcaccaaggattttgaattctagctcaggggtgaggggactagagtaagatttaggaagtttaacagttcctctctcagccccagaaaccccagtgagggaatctcaaaagtctgggactcccaagaaatcccagactgtcaaagccaagaattaaggctgctcttaggtctctgagaaattttcttgctcaaagtcatcatagattggctgaacccccagagggcaaagccaaatcatgaggttcacattagaggaactgggaggtaggtaaaggctgaaaagcaggagggagagaaaggaactgggaaacaggccacaagctaaaggtgtttcatatgttaaaggaggctagcctccactcctgctgcctttccttgagacctttaaatagtggctacatctagggaatagccatgagcttggagaacatggagaacctccacacttctctgcaaggcacctcatcataactgctttccctttcttgaccacgggctccagggtggcaggatcctagcctgctagcagggaatagtgggtacaagagcaaagaaagacgcccatcctcagctcttttgtggggaggaagctgaggcccctcagatctctgttccaggctgaggcatctgcttgccaaggctcctcttccttaccttgattttctccactaccccttcccacccaggcctgtctcggcatttcaccccaggcagctctacctctatccccaaggcctaatcaagatgtcaccataggctcccactgtccaagtcgccgtctttgcttagcaacaccaaacaccctttcccatcctccgcaagtataaggaggaacgccccctcccccgctacacacacacacacacacacacacacacacacacacacacacacagcccccatcctctccatctcctcaggcttgggagtagttactgaattggctccctagccccagcaccccccttcctccctccactagccgccttctgcctgaacttacattatccttcccttgccggtgagaccctggggtgcgaacgcggccgccgccttggaaacggcgagggagtgcgggtggtgtatgcatgtctgcgtctcagtggcaggcaggggtgagcccagccactcaccttccaggaagcgtggattcctggaagtgaggggaaccgccgtcatttcgcaggcagcagcagcggcacggtgagcagaggcccacggctgcagccagcaagagcagctcagcccagggtgtatgtgtgttgagtgtgtgtgtgtgtgtgtgtgtgtgwgagagagagagagagagagagggagagaaggagaggggagagcacgcttggatgtgcttggggagggggctggagagaatgtatatgtgtatatagtgggggagatgctaggctacagcatcccttttccaagacagtgaagggggtgggtggtgggtgtgtgcacagggagggaaaggcagatgctgttgcccctcgtgcccagcagacaaagaggaactgcacaacaaatgcctgagagaggcaagagtgtgtgcaagagagagagagagagatggatgggcctgcgggtgggagggagaaagggggggccctagggaaggcccaatcctctgccagctggggaagccaaggccccagaggtcatggggcccaggacacggacagcttcaaggctctcagagaggcagaaagcccctcccccaccgaactctttccctcctcctccaggaggaaggttgctctctagatgtggggactgacagcctcctcctttccagcagtgagagggcccagcagagtctggtgtcaggctagtgttgctccgtggccctgagacctttcagatcccgggcaaaaaggctggtacggtctccccatttcccccccttcctgtgcccctggggccccagcagccgaaagccctggatgaatccgccctctatcaggacaaggcctctgctcccttccctttcagaggagctgctcactgacaaactgacctactttggaagactacattttctgattccaagaatttgggggtgggaggggctgtgaaacttcgggctgcctacccctgaatccctttctactaaagttctctaaaacatttcacagtctcagaaaacttggggcaagccctgctcagtcaattaatggcaggagctgggtttcagcaactctgtttcccttgaaagataggaaaatggagggggtggttatctgtgccataaattaatagactcctgcttatctcccccttttccctgccccagaagggaatgatctgtacctttaaaaagagaaaaggggagaaaagatggattttctgaatcacattctgtgaggaattcaaatctcttggaagaacaggagagatacccttttcatcaagtggcctgatgagggaaggtcacctggcgtggagcagaagaactatgatggcctgtggaggcccgcagtgtgcttcgggagggctgcatgctgcagcctttccctctgcttccatatgactcttccaggagagatgggtcagtgatgagcgcagctatgcccagtcctaagaggggtacttttcagggctaatggtagccttactttgactttctcttttccctttctaaggtagctgctgacatctaaaattctcaaagtacagaggaggagttcctggcctccacttccattcaaaaaccatcctgtgcagaggccacttcttatctaggacatgccaatctgctgaaagcagggaaaacttggtttcatagcacggtgaagcaaatcacctccatgagtatccaatattctccataaacaggtttgaaaagagctccacaggatttgtagtttctcatttgcctgctttatggtagggactggattttatccatctgagtgttccccagcactaaagcagggtcccaagtgtacttgttgctcagtagtggttttctgaataggcttaactgagcaggaggtaggaggactggctcgctcctcacaaggccatgacttttgttctaataaagtctcttccaattaaatgagtctacctgatccctgtcattctgtcaagcatgtggcagatattgaatgcctttacccattccaactccttccctccttaaacaagaaaggggtcagagtcaacatcttaccttacattacccgggtgttgccaatgactctcatatgtgtgtctgacccatcttgctatctcctttagtgcatgccaataattccttcattggtcctactttagagtaaaaaataagctataggtcatttccaaaatggtgcttgggtttctgatagggatactcatcacatcaaaacccagttttggtttctattatttctttttttttgagacggagtctcactctgtcgccaggctggagtgcagtggcgtgatctcagctcactgcaacctccgcctcctgggttctcctgcctcagcctcctgagaagttgggactacaggcgtgagccaccacgcccagataatttttgtatttttagtagatatgaggcttcaccatgttggccaggatggtcctgatctcttgacttcgtgatctgcccacctcggcctcccaaagtgctgggattacaggcgtgagccacgtgcctggcctaatttttgtatttttagtagagagggggtttcaccatgttgcccaggctggtctcgaactcctgacctcaggtgatctgcctgtctcccaaagtgctgggattacaggcgtgagccaccatgcccagccttgagtcattattttaaaatggagacatttcatataaaaatttggatttctggtatctcttaaaaatttagaagttttggccacactagatacacattcctgcmtgacaagttctagtggacactgaaagctgctgtccctttaagtgggacatatgttctccacttcatgacagcccccaccattcttttctgcttattatcctaaccttacttcactcattcacatgactacctggcccttgcaggcctttgagctttgaaaccttgtgccgctctatctggatagaacaggatttcatgtttggctggtgacttcagagcaaaggagaaggaaccacatcttgtttccatctatttgcttcaaattattcttctaatgatgtctgctcatattcccctcctattcccttcctctataccccaagaagtctggaaaagaaaattactatttagggaatgtaagatcaccaaaataattgcacactaccaagggccaccaagcatgagtgttagctgtgtgactaggacatttagaggctgtgtgcctaggctgaaggctctctgctctgctctacaggagagtgtctgcttccagcccctaacaaatagaacacacagaaggcataccagacacataggagcggccattgcagtcttctatgtccattttaaagagattctgctgaaaaagaaaatagctgctattagaagatagctctgggaagggaggagscttttctttaatattcttgagttagcaagaaacctaaaggagcacttaagcatggtctgatactatcctaaagaagaaaaaccttagccaggcactgtggctcaacacctgtaatcctagtgctttggaaagaaggtgggaggatcactcgagcccaggagtttgagaccagcctgggcaatatagggagatcccatctctacaaaatataaaaataaattaggcatcgtggcatgtgcctgtagtcccagctattcaggaggctgaggtgggaggatcacttgagcctggaggtcgaggctgcagtgagctgtgatcttaccactgcactccagcctgggtaaccgagcgagaccctgtctccaagaaaaaccttacactttgtcctggtgaaagacaacataccctgatttacaaaccccaatatttcctccaatttacaacttctgcaggcctccccagcctctgaggtggaaacactatcttaatccagagtggtccttgattttgagattagaccgtgtatgtaggtggagattacacctcagccctgaggaggcaaagaaacagccccttagaggctctatacctcagttaaagatgggggtagtattaagaagctgggttcagtcattcaagggattctgtcttggagtatgtggtgtgagggagggtgacaggaaaagkagaagatggaggagagcagcccactcagggttcagtgataagtcctctactgaaggtgtaataaacaagttaaacctgtaaatggttatccccaccctctcatcaattactctaccacgcttattttaaaaaagaaaaaaggacggggggggcggggggggagtctgaatttaaaatgaaggttaatgtctatttgagggaaggcaagcagtaattggcagtagagtattaaacaatcgggaactgagaacacttaaaagtgataatttgttgcaatgarttatctctttaggagcctgtgggaggagagaaaaaaaaaatctatctggtggaaatttacatacctccaaaattgcggctggcatggtggctcacacctgtaattccagcactttgggaggctgaggtgggtggatcatttgaaatcaggagttcaagaccagcctggccaacatggtgaaaccccgtctccactaaaaatacaaaattatgactgggcacactggttcacacctgtaatcccagtactctgggaggccgaggcgggcggatcacctcaggtcaggagttcagcctgaccaacatggagaaaccccatctctactaaaaatacaaaaaaaattagccaggcatggtggcgcatgcctgtaatcccagctactagggaggctgaggcaggagaatcacctgaacccaggaggcggaggttgcggtgacccaagatcacgccgttgcactccagcctgggcaacaagagcgaaactccgtctcttaaaaaaacaaaacaaaacaaaattagctgggcggtagtggcatgagcctgtaatcccaggtacttgggaggctgaggcaggagaatcgcttgagcctgggaggtggaggttgcggtgcaccgagatcctgccactgcactccagcctgggcgacagagtgagacccggtcacaaaaaaaaaaaaaaagaaaagaaaaaaaaagaaaattgcattccccactcatctgatgaaaactaaacgccctgaggcagaggcagaagcaagaatggggcaagggaacagtctgagctgctgtggggattcttggtctttttgaaggatctcactgaggcagatggataaagatttggtttgcttgtaatggtatattgagagaggtaggggtgggggtgagggggtgcaggaaggcacacagagtaaagtatctgttttcctgcccccccacccccacccaattcttgtctggagttgagactccttttgaaggctcatgagaaaacctgaaacatgsgcttaccttcacttcacaaagcaattctctcttacattttgtcagagagattcctagtatcaaccctatttccctaggaagccagggcatggagaaaaaaattctctaagtttattaaccctcttttcttgacatccttcctgggatggactgaactttgggactggaccactagaacaagccacacaataagtggttccttgaagggtcccttaggaacaatcattagaagagcccaagtccacagttgttagagaactcagactctctggaactagccacaaaacttgagatagagatcaaaagataaaggagggcagtctggtattgaggggccctttcatttccaaatcattagattcayaattgccctttggtgtttttcaaaatgaatggaaagctcaggctgggtttggtggctcaggcctgtaatctcagctctttgagagggcgaggtgggtggatcacctgaggtcaggagttcgagaccagcctagccaacgtggtgaaacccsatctctactaaaaatacaaaaaaattagctgggtgtggtggtacacacctataatcccatctactcgggaggctgaggcagaattgcttgaaccggggaggtgtaggttgcagtgagcggagatcacgccactgcactccagccaggtcaacaaagggaaactccatttcaaagaaaaaaaaagaatgcaaagttcaaagtgccacttgaagccgggcgtggtagctcacgcctgtaattccagcactttgggaggcggaggcgggcggatcacgaggtcaggagtttgagaccagcctggccaacatggcaaaaccccatctctactaaaaatacaaaaattagccgggcgtggtggggtgcgcccgtaatcccagctactcaggaggctgaggcaggataattgcttgaacccgggagacagaggttgcagtgagccgagatcgtgccattgcactccagcctgggcgacaagagcaagactctgtctcaaacaaaacaaaacaagcccacaaagtgccacttgaaacttccctcacacacctccccatgcaggagaggcaagagtgagcaggattttcctgttttctgcttggagaaactgagagaaactgaggctgagagcagtgaagttacttgtcccaaggttcatggtgagaatagaacaagaacaagaacacaagttgcctgcctctctgaggtgtcctctttctattaaacctttcaaaagccaggctactcaaggccttcatgggttttcttgcttttccctgttttttttgtttttgtttttgtttttktttttgagacggagtctcgctgtgttgcccaggctggagtgcagtggcatgagtttggctcccgggttcaagcagttctcctggctcagccttctgagtagccaggactactggcatggaccaccacactcggctttttccctggttctaacatcaggtaagtcatcttttcctttggtgtgatccctgtgggagtggggtctgttacttaaaaaggaagaacaagtcgagctggctctacaggaagaaatatgctcatattattttgtgtgtgtgtgtgtgtttgtgtgcatgcagcatgcctaatgcctgtgtgaatgaagggctagacaagcactaggtgggtagaacaggtgaagcataccattcagctagcactggctcaggaagtgtatctcattcttggacttttgcccagatggccccaaaacaatttccagaaaggtctgaaggagttgttttctgagctggactttctttctaacagtaaactgagctttcctgcttaattgctcttaacgtgctctgtgacacatcttgggcaaaatcagtacttagctgtacttagctgcctccagctgggggtttttgtttgtttgtttcttttcttttcttttttttttttttttgagacggagtctcgatctgtcactcaggctggagtgcagtggcacgatctcatctcagctcactgcaacctctgcatcccgggttcaagtgattctcctgcctaagcctcctgaatagctaggattacaggcgtgcgccaccacacccagctaatttttgtatttttagtagagacagggttttgccatgttggccaggctgttctcgaactcctgacctcaggtaatctgcccgcctcggcctcccaaagtgttgggattacaggcgtgagccactgctcccggctctccagctggttttaataccaagttggtaaccctggaagtgagagggcattggattgaaactgctgttctcagtcctggttttctgtgcaaaccaggagcaaatcagcagatgtactttactctttgctcaagtctccctgcagcacatcccgcccagccttcccactctctaccccttaaagcacctcctcccctgcctaaccagccaggcagatcttagcgtctccttagaggaactgggtcaaattaggcactgccaattggagacacattgcaggaggaggaggtataaggagagggaagttagttacatgagacagttttgtatcaaagatcttggaaggagattagctttaaagcaacataactgtcggctgggggcggyggctcacacctgtaatcccagcactctgggaggctgaggcaagcagatcacttgaagtcaggagttcaagatcagcttggccaacgtggcgaaaccccatctctactaaaaatacaaaaattagctgggcttggtggtacatgcctgtagtcctagctgcttgggaggctgaggcataagaatcgtttgaaccchggaggcagaggttggagtgagccgagatcacgccattgcactccagcctgggtgacagagtgagactctgtcactaaataaataaataaagcaacataaccgtcactcagtgatggcgggtaggcacatatgtactgtaaattcagctgtgagctgaatacaaagcaactagaaacaatcagtgttccaattcaaaaggaatatctctgtgaggagggaggaaacgctggtcattgtaatctctggagacacaaattttcttccctgttcttatttatttattatatttactagagatgagatctcactatgttgtctgggctggagwgcagtggctgttcatgggcacaatcacagcacactacagcctcaaactcttggcctcaagcaatcctccttcctcagcctaatgagtagttgggactacaggtgcatgtgccactgtgcctagctcttccccatttgtttgaatccacttggcataaacaagagtcctccatggccctggctttctcctatcaacattacaacacatttgaacaggaatgggcatcctttctagacagaagatttcccaccaggctccctgacaggcagcagtgagggccaatcccagcagtttgggaggccaaggcaagaggactgcttgaggccaggagttctaggccagcctgggcaacacactgagacmctaaaaaaaaaaaaaagtaatttaggccaggtgtggtggctcacgcctgtaatcccagcactttgggaggccaaggtgggtggatcacctgaggtcaggagttcgagaccagcctgaccaaatggagaaaccccatctctackaagaatacaaaattagccaggggtggtggttcatgcctgtaatcccagctactcaggaggctgaggcaggagaatcgcttgaacccaggaggcggaggttgcagtgagccgagatcgggccattgcactccagactgggcaacaagaacaaaactccgtctcaaaaaaaaaaaaaaaaaaagtcatttaacacatgcttaatgtggcctagggggtaaaaggtcatgagaagaatattgttgggaaagatggtgaaggtagagagaatggcaaggatccataccatgtttttgttattattcccaaactataacaggcagaagtagaaaaattttctccactttcccttagtacctgggttctgcggtggagagcagtagttattaacaagacagaacttcccatgtgccttgggtatgagccattcaggtgctacaagtagagcaaacccacagcatcatcctctactgtctatgccttcctgaactgagtgaaatstgagcaaaaatatgttgaaatcacatagctggctctgctctctatcaaagctttgcataattgaggagggagaagacgcaaaggggccagggaaaggtatggaattagccactgtctgcaagcccctttccaggaaaaagacctagacatcaagcaatttgcagctctgaaattatctttagggtcaacctagtgctctctgaaggaaacccaccaaccttagctcagctcatgtgtttgtctttacagtggaaaggtctgactcatttttcaccaggctgtagatggtgaccttctgtctacatataatacagttgaagacagctcagcttcattatccaagtgcttggggagcagtgcagaggggataaattcccaggtcatcctaggaatggccagtctctaaaataaaaaggggtaagagctgaaaacacaacacctgggcagggggaaaatatcacctcattgtctccttttagatctcagatggatgcatcttttctcttgttctttgcgcttctctgtcctccccatgtagactgcagaagagagagaaggctaaggtttatgagtgggagaagaaacaatcctatccctcccatgtctcatttcaggacataaggaactaaggaaaagggccaaactaaacactttaaatcactagatatgatacataggagatgatactttttggggtttttgggtgtacccccaagtatagctctctgtttatagaaaggcctcacaaaatcactgctgttcagtggtatgtttgggcaggggtggagaaagtagagcagggaaattcaatttgagttttataataatcagttttaaagccaaagatgcccaaaacagggttagcactctcaagtgaagtttgaaattacagggaagtctcagtgaactattctgactagggtacagtagcaaaaaaaatgtagaagagacaggaacaattgcctttgattgcaattgtgcccaaaagtccctaatacatgctgatcaaaaaagttcactgttgtttgggccagaaagatgttttcaggcttctctgctaatagtcttgctctgataatccaatttggtaagactctcttcttcatgtggagggtctagggcaggggtactccaggaactgagaaatcctggagctgaaatggagttgagagatgatctacaatttcctagtttttaacagaagaaactaagcccagagtcatcaatctcattaacaacagaattaggacatgtagagtccaagttaccattagaagattctttccactggaacactatattaaatcttgccccagttggaagatttgggccaccctgcttgccttctttcttgggttattaaatgaatggtttttgggtctgcgtcttgctgacctaaatccttgaactggaaacacaggcttatggatgggaggataaataatcctcttcctcctatgtctcttttcagagataatggacctgaggaaaacaccaaactagatggtcattaagtctctaaagtagaaacggcctcttagcttgaggactaccccagcataggtattgcatcagagcctacaatgtggatcctccccgcagctggaccaggtcattcatatcagcactaccctttcttagatgcctttgtctgataaactttgaacctatctctctgtttccagaacagagtccataactcttctaagaagaggaagcaaatcaaagcctggaattcaaagctttcttcagcagagtcaacagaccaataaagaaagggagtccctttgcctgtggcattgtccacactcacagggtcccacactcttatttgttcctacagagtaaaacgaggctagaaatacctatctttctttttctttggtgtgtgtgtgtgtggcgagagagagagagagacagagagagagatggccagttggggaaaaaaaataattcctttgtggatactactgtgtgtgggggggcagggggtacggtgaaaggtgggataagtttctcccatgctgggaagttcaagctgcagatttcaaactaagaggacataaagagactttcagttgcattttcactggaaaaaagtcaggacttatttctgagccaagtcctgaaatatgccttacccttaacctactcagaggaaggggattgcccagaagctacaattcaactaactaactgcactcagtgggcaacaaagacattatattttgtgtttgagacatcaacttctattgactagggcaaggtataattctgaagctgccaaaatgagggcagctctcaccattctgaagcccaccccagaagctccagtgaaacttctcttgcttcccaatggtaaagctattttcttcttttaagattttatttttatctcaggagctactcatctgactgttctcatgacccaagggtctgtctggattctctggctttaggctgttagtagggaaagctgaagtcctcctgcaaaccataaagcaagattcacggacctactggcaggtccatggggaggtgagggattaccatacaccccaaccaaacgaaacactatgctttcaaagattgtctgatttggccttttatctggccttgtcctcagaatctgagttatcgttaagtggaaatattctaggtagtcagataacattttcatgcttccttaaggatatgaacatgtatcttcacccaggcaaagtgagcaagtatcagtaaggggagacaggcttcaatggtcatctggttgaccatgacgttggaacatctaaagctgacatgtgagcatgtcaggaacataccatgcccaccattgatgcttcgagggcacaggctggggagacaggcacagtaggaactattagacatataagcgagggttgacaagagtaacaacaatagacagttttgttcatgagagaagggaatggggcgaaataaggtatgcaaaaaattttctggccaggcacggtggctcatgcctgtaatcccagcactttgggaggctgaggcgggtggatcacctgaggtcaggagttcaagaccagcctggccaacatggtgagacccccatctctactaaaaatacaaaaaattagccaggggtggtggcgggtgcctgtaatcccagctacttgggaggctgaggcaggagaatctcttgaacctgggagatggaggttgcagtgagctgaggtcgcgccattgcaccccagcctgggcaacaagagtgaaactccgtctcaaaaaaaaaaaaaaaaaaaaatttcctggaagcagagttcgtaacttcttgaccttggatggggattggggtacaatatttcataagcatatcgaaaggtccacgttccattaaacactccactgttcccagaaaggactagtcataattttttttaaaggcacagaaataatatagaaaatttaaaaagtgagaacctacaactctagcagccatgaggtaagaaaataacgggatggggtttgtgtgaggaggtacagggagggctgtttcggtacacaggagcaggcagcctgcttcccaagtttgcagctcccgtctggatgtctgccctggggattcctctgttgcatttctttcttagggctctcaagcagtgaatctcttctttcccagccttgcttcccaagttccctacacctctcaccctacactgtgcacttctcactccatcctaagtttcttctctacatgtttctcccaatatgctcattgcctcccagatctcacctaggcctacgtctttatccccagattcctgtcttcagcattcctcgacccaacacccgggtccctcgctttttttgttcagataccctctttgctgctcctttctcctcgctgtccttctgctgtatacccaagccacatccccacggaggagccccgcgcctggcagctcctgcctgtcctcggccccttgccttgatctgtctcccgcctttttaggacccccgagtccctgctacctcgctcttaatactggggcctcgggccaaactcccccggccatcttccaaccctccggccccagcccaacccgcgaccctctctcagcctggccccttcccccgcccacgtctcccccctccttcacgccagagcccctcaggccccgcccccggctaccgaggccccgcccccgctttacccccaccaagccccgcccctcactcacctgaggtgtctccgcgcgcgcgcaggctgtgaggggttggggagaggggacagtgttgggggagagggaggcgagggggcgggggtcccccactctggcccgggcggcccagtgcggggggagtggggtcactgaggcggcggcagtcgccgggccggagccaggacccgggcgctcagaggcggcggtggcggcggctccatctccatcagcagcttcacctgagaagggacttgcccccccaaatatccccccccatcacagccgtccccctccccctaacaacttccggtcccactaccaggcgacaggcggcgtggccgaacaccgagcgtccccaagcccgggagactgctgggggaaaatgggagaggagctaggggagagtagccgagcgccgaaagattcaaatccgaaaggcaccatcgtctgccgaaggtaacccaaaaactagcctttaatctgcacccagtttgcaatctaagcacacgctggacgcccgatgtggcctggcacgtcaggccctagagccaagttttccctctgtaccttgtgaatcccaaaaatctgagacaggtctcagtttaggaagtttttggcaaaacttaattttgccaaagttagggacgcacgcccgtaacgcagcctcaggaggtcctgacgacatgtgccctaggtgactggagcacagcttggtgttatacattttagggagacaagagacatcaatcaatatatgtaaaggcgggacaactcaagctgggaggaggcttccaggtcataggtagataagaggtaaatggagcggggcgcagtggctcacgcctgtaatcccagcactttgggaggccgaggcgggcggatcacctgaggtcaggagttcaagaccagcctggccaacatggtgaaaccccatctctactaaaaataaaaaattagccgggtgtggtggcccgcgcctgtagtcccagctacttgggaggctgaggcaggagaatcgcttgaacccgggaggcggaggttgcagtgagccgagatcgcaccactgcactccagcctgagcaatagagtgagacttcatctcaaaaaaaaaaaaaaaaaaaaaaaaaagccgggcttggtggctcacgcctgtaatcctagcactttgggaggccgaggcagacgtactgcctgagctcaggagttcgagaccagcctgggcaacatggtgaaacccatctctactaaaatacaaaagaaattagccgggcgtggcggtgtgcgcctgtcgtcccagctacctgggaggctgagacagaattgcttgaactccggagacggaggttgcagtgagcggagatcgtgccaccgcactcctgcactccagtctgggtgacagagcaagactctgtctctacaaaaaaaaaaaaaaaaaagaggcaaatggttgtattccactcaaagaaggcaatcaggtatgcatttatctcagtgagcagagggatgactttgaatgggaggcaggtttaccctaatcagttcccagcttgacttttccctttagcttagtgattctggggcctcaagatttattttgctttcacgacctcctaagacaatattgattttaaactcctagcaccctttgcctttcctgccaagtgcattggaactgttggggaaaggagttggagggtacatgtttttgtcacctctcctctcttcatggtatcctgaggtcaatcacctaggtgtccctgcagatactgccaaacctcagagaaggaagcccccctttttttgagacagaatctcgctttgtcgcacaggctggggtgtagtgggtgtgatctcggctcactgcaacctctgcctccttggttcaagcgattctcctgcctcagcctcccaagtagctgggattacaggcacccaccaccacacccagctaatttttgtatttttggtagagactgggttttgccatgttggccaggctggtctcgaactcctgacctcaagtgatccacctgccttggcctcccaagtgctgggattacaggcgtgagccactgtgctcagccggaagccctacttcttaacctacaagcctacttcctctctgtcttcctccccagttttgtttgttttggtctaatctcattatacatcccagtacaaatgcatccttcctcctgcaataggctcactccccaggcccaagagttatgatcttaaacagactatttattagaaaagtagaactataaagggagacggttgtgccccttgctctcctcgcaactctctggca

SEQ ID NO: 8895 - DNA, 14293 bp, Homo sapiens
  misc_feature (1)...(14293): n = A,T,C or G, or insertion/deletion polymorphism (see Tables 1-2)
ccgtctctactaataatacaaaaattagctggtcgtggtggtgcacgcctgtaatcccagctactctggaggctgaggcaggagaatcgcgtgaacctaggaggcagacgttgcagtgagccgagatcatgccactgcactccagcctgggtgacaaaagtgaaactccgtctaaaaacacacacacatactcctacacaactgtctctaggactggcttgcaggtgagaaaagttccttgggggaaaaaaccgaggtttccaatgggcgctgtacaaaggctgggtacaacagagggcttttaaagctagtaaggacaaattcaattaataaggtggtagtatgaaatgccccagctgtactctgactctgagatttagaggaaaaccgatttcaaatccagataagcttggagcttctcagatccctacagaaagacacacactgtactccagcctaagtgacaaagcaagaccctgtctctaaaaatagaagaaaagaaaagaaagacaaatacaggggcctcttaggagaaccatcatcatcatggataagaaagggatagtcaagtaatgtgaacatgcagagaccatgaacatccagagaccatgaatttgagataagggtctgaaattcctttctttagcagagatgccaacaattatcccaaccaaaatgatcctttctccccataaagttttgttccatctctttgggcacttcctaggacacccagcacacaacttggggtgtgtgtgtttgtgtgtactcaaggtgaataacacacagtacagccctctgcttgtcggacttggtagaagacaaaatgaactgtgaaaggaacacaataaataacagagtatcatcccagaagggaaaactgtagaaagaataagactagagtttgatgagaacatgaaaacacaattgccttttgtgacacatcccccaaagcaaagcaagattagtctgatttgctgtctctgatccttgaccttcctaaatgaaatatgaataaggtatgtgtgggaggatttacacttcttaaactgctgtacaccttccatattttaaaatatgtacatattaacttttgtaattaagaaatgtagtgatggccgggtgtggtggctcacgcctgtaatcccagcactttgggaggccgaggtgggcggatcatgaggtcaagagattgagaccatcctggccaacatggtaaaaccctgtctctactaaaaatacaaaaattagctgggcgtggtggcgcacgcctgtagtcccagctacttgggaggctgaggcaggagaatctcttgaacctgggaggtggaggttgcagtgagactccgtctcaaaaaaaaaaaaaaaaaaaaaagaaatgtagtgataaaatatattggtagagacgcagaaaaggaggaagtacagtaagggaaaatccaataggctccaatctatgagggactaagaaggctagcagaccattaaaaatatgtggggaggagggtactccactcctctgctttggcaatctttgtcttttttttttttggagacagggtctcattctgttgcccaggctggagtgcagtgggaagatcatggctcactgcaccctcgaactcccgggctcaagtgatcctcctgtctcagcctcccaaagtgctgggattacaggcgtgggctactgcacctctgtatctttttctctactcaccatcttccccagatacttcatagtttgacccaactttctaacagcacagaaatctgggcttttgaagtagacaaagaacaaggggtgatgccaagcttttgaaatggaatttctcactcttccccaaatctcttcctcagtgatatcaccgcatagtttcggacctgttaactccattacctgcctgggaaatacccaagtcaagtctaagtcccacaaaagtttcaccaactatgatcagaagatctcctgatggctgaggatctctaagcccctttcccatgtagataatgaaatagatatgaaatagattctcagttctaggagacatggtatttgctatagaccacattattaagtgggaaagaagtggacaaaacatgcccccaatccaacttcttagctctttcataggacatgaaacagtaagttaagaaacagactgcagtatagaccagctatgaggccaacagaaagtgtaggggctgagtttggagcagccaacagtcatggaaaaaaaaaaattactttgatcttcatccctaccctgggagttttaaaaagcttcaaattaccacatctaaacactaaagggaacaaaagagtgtgtactcccaagacccagagcccccagcccacccttcagcattcccagaagttcccataactgataccaggccctgcttccattacttcaactaccttagtcttctagattaatacagccttcttcattttccccagttctccctcactgaacccaaatctctctcagctcaacaccatagcaccctcagttctttttacaataggcactttccctgaaaagaacgcttcttacccaactaagaacccttctcaggcccttccaatgaacctctctgcagggacccagccccagtcacccccggggctcgggcgacaggtctgaccctcctcacctcccggcaaatgggcttacctcacccgctgccctgttcctttccccagctcctccctcttcagcgctgcttaatgaggcctgcccctgccctcactcaagctccaggcctccagcccccggccctcggcctggccgccgccacagcccagccgccttcccgactcaccaacttcggggtcccaggccgcccagtcccctcctcagcgacccccattaggcctgccggggcccggcccccttctcccctctccggtgggccactctaacccctcgcttaggaccagacccgcctccgctctcaggccaggctgctctcatctcccgggcgcttccgcccctgccctttgggctccatcagctcggtacctggggctccgtctcccccgtcggccccaagcctgtgtcgaacagacaaacagctgcagctcaaccaaaccctcctgcccctccttctcctcctcgccctggggcggggctccagccaatagctcgattacccgcctaccttcgagggtgggctatatgtgcactcatccaccaatcctctggagaaaggcgagtctctttgggcgctgtcaccaacaagtacgagcaagggacgcgacaggcggggccacaagccaatagcgagggagaaacctcgaagatggacgaggtaaggagccattaaagagcaagctcctgaagacagggggcggtacactgccgacaggcgtatgtatccaccaataaaatctcgacaccccatgaccccgccttttgactcataaacatctaatcaggtgagtgatggaggcgggtcaaagtgaaactttaaccagtactgcgaaaatacggtacttgactggcaggcaaggaggggttgaaggaagccttaggaaggccgctactgaccttcgcccctccccctggacttggctggggctggctctagtgccctgccttctatgacaaattcgcgggcgtaaagggaaatacctcttctagggatccggagcctgggaatttaagtaaccctgacatcagcgcttcctccttttagtgaggcttcagtggacaggcgtatttggggtggccgcgggcggtctgagatgttttttggtggaatgagacaatggcaactacaagaagtggtagcttggagacgctttttcagaatcgtatgtaaatgtaaataaaagaatctttggaaaacttttctgtctgtgatatgaaacagaaaggaaaaacggcgggcttactgggaaatgcagtgtcgaaaggcaaattccccgggagccctcttcctgccgctatgtatgtgcatgggtgtgtgtatgtatggggtgtgtgtgcatatatggtgtgtatgtggtgtgtgtgtatttggtatatgtatacgtggtgtgtgtggtatatgtgtgtatatgatgtgtgtgtggtgtggtgtgtgtgtggtatgttggctgggggaaaggaggtttgctggtgtgtggagaaagtgaagtaggaagtatataggcttcagtttccccagccataaatagggatgataataaccactttgttcaccgtcagcactagccaaaatggggtggggtgggcagccatgcacagagagattaggaaaaggggtctgaaatcaatgatcacatacacacattcatattctgtctcccaccattctttcagtaaataagaggaggaaagagatgaactataaaactaggcacatttttttaatgagctacaaactaaattacaaataacgttaatagcaagagcactcaaggacaagggtgacagagacaaatcataaaaaaaaaatgctttttttttttagcactgtcattacaaaaccccaaggtgcacatggcaacaaatccacccactatgaccaaaaaaaaaaaaaaaaagccaactctactattggatataacctgaaatataaatataattgttcatccttcttttaaagaaatatttttacccatgccctcactcaatcacagccctgaaaaagtgtcagcattctcaaaatgatgcctaaaccctaacttctaactcctatggggtaggaggtggacgtcagaggaaaatgggatcagggatccttggcaactgaacaactaagaatactaaaaggaagagaaaaattcaaacatctctcacctgcctcataaggccatggtgaagcaatagattggaatgaagcacaatccctgtctcagggcctcccagattcctcatgcctgtagaagggacaaacaaggggactggggccaatcatttttctgcagccccacccgggctgagtcttcagtctcccagcctattaggtgaggcaaaacactaactagggtataaactgattggatctattttttcaaccgaattctttaaaatagactcctcccagtggttttgttttacttggttctcaaaagcaccaacttagcccccgctatcatttggcctttataaacattgtggcagcaggaggcttgggatcctggtcatcccaaacactggaaataataattatggggcattcagagattggtacggcaaatctaacgtgtaggaaggcttttttaaaattatttttataccaaccctcttcagcaataactaagagaagggggaaagggtggtggaggctaacttaagtgcatctaatactgaaacttcctttcattttcactggttcccccctttcacccctgtattcccagagttggctggccaagactagaaggtgagtgtttaaggcaagttcagagggcccacctgagtccaaatagcccaaggccaagcctggtcaagcccacactggaggagagggtgagattagggctgggggcttcaagaaggctatcagagtcgaagatggggtactggcttggtcacatcctggaagaaagggtgagccagggctgccttggccgaaatccgcttgttagggtcgtagtgcagcatttgctagagggagagatgcatgttgacttcaatgatgtgatagtggactaaatgggcagcaggtgttcccagaaatcaggaaaccagaactccttctacccaaggcagaattctcacttccatcctcccatagctgaatcagtgtgccaacagggagagcaggaaccagggaaatgaaacactgaggcccagatttcagggtctcatccttccttcatcctggaaaagcccttccctgggagaaatgaatgagggaaaacaggtgcccactctcaccgataacaagctccgtccatcttcatccaggggaggtacaactttactaaaatcttgccgggcccacttggggaaacttggcttgtaatcaggcatagaagtaactcctggccacaccacctcatctggggtccccagagtccgaaagatccggaagagctggtcaatctcagaatctccagggaatagggcccggcgagtcacctgaaaatggggaaagaggaaataccaagacccacgttgacgtcagtcaaaactctcctctatacaaaggagttcccacagacagtaaaargtcagcagggccccatgactccctccccagggcctttcatggggtcagtcacacagaacctgagacaatgaagttccttcatctgtctcctygccccctccttccttcccccaaccatggctttgcagatccccaaggctgggtgggtctgggagggggtgaatgtctggggtgccactgacatgtagcaaaggtatcccaagccactcacggggtagggggtagacactgcggtcatcccccaaccttgtgatgcagccacttctagatacgagcacagcgggcagagactctgtcttccatttcttctgtgttccccacagcacctagcatggtgctgggtacccactaggtgcttaacaaatattttttgatgaattgagagaggaatayggacaattgtaaggtaatgcacyggggggataaatgcacattacatatgtataggctaatggtctttaagctcttggttacaaccaagataaaagacaataaaacatattgctgatttgaagacagcctactgcaccactgtactgttatattaaaggagatgggagcttctacataaagccaggcttcaaggatccttcagtctgaaaagccagaggttgaaggggaacatgatctaaatctttttttttttttttttttttttttttttgagatggaatctcattctgtcgcccaggctggagtgcagtggtgcaatcttggtcactgcaacctccatctcccgggttcaaccgattctcctgccttggcctcccaagtagctgggattacaggtgtgtaatcccaagtagccacacctggctaatttttgtatttttagtagagacagggttttaacatgttggccaggctggtctcaaactcctgacctcaggtgatccacctacctcagcctcccaaagtgctggtattataggtgtgagccactgcaccctgcctaaatctgcagtttaaatgaaaggtgtgggtaaagtgaccacagttgtcttcactacattgctggcaccatacaacaaggtctacaagccttgaaatgaaggcctgaaataaaagagkcactaaatggaatcattctcccaaatatatgcagactacagctaaaacagctgcagaaatgctttaacttatttcagggataagagatgtataccaggtactaaggctgtttgaggatatcctaacactgtggttgatatcagggcaacagttgcatcctttcccaccattccccttggtgctactttagagagagaaccctgtgatagaagggccataggtctgggccaagaagcagttctgttgttcttggatgtggggaggagagggagggggctgggtggaacttgggcaagcctccataccatytcagcaaagatgcagcccaggctccagatgtccacagctgtggaataatatttgcagcccaggaggatttcaggagctcggtaccacagggtcaccacctgagggacgggaatagggaggggcggggtggtttatagggtatggaaattcccgcatctcagttcctcaacactactctgcttactcttggcctcttaacaagcagtttccttccctccatcatctttcccctcccactgatttccagtccatagttctggactgaacccctaatttgagatcttcctggaaaaacttgagacaaattggtcataattttatttctaaattttttctttttgtagatttgtagagatggkgtctcgytatgttgcccatgatggtctcgaactcctgggctcaagtgatcctccyacctcagcctcccaaagtattggtattacaggtgtgggcccagttagcaacacagtatgaattccatgcataccctaagactctttaggatgtcaagagattatttctacctagtaagaaactgttagccagatatttttagtaactttgtgaataccctagttaacacctcttgggaagctcagagaaaaaagacataaagggactcacctcatgggtgtaagtacgaacagggactccaaaagctctggctagtccaaagtctgctagcttgatggccccctctgtgttaataagcagattctgaggtttaaggtctcggtggaggacccgatgagaatggcagaaagctaggccctggagcagctggaacagatagctctgacaaaggagaaagagaggactgtgtttctccattacagtgagcagactgggtttgctctgtgcccctaaaactctactaaagcctttattatgttggattatagttacatatttacaagctatttctcccaatggactgtcagcccagagaggataaggaccaagtcttactcaattttccatcccttttctacatcctgtgcattgaaaaaatgtttgttaatagattgaaagtagctctgggagtgaagaatccagccctaaaatagacaatagggactcactagctaggtcttccaccaaatggaagggctttttggaggaatttaccaagtgctctcaaatcccgtttatctgagtttcatctgacctcccacctgagttgctaggttgactcactagagtttcaactttgattgttcagtccaaccctagggttaatgaatataatgagcagggaaggagacacaaaaagaaggggagtgtgtgtgtataggagatgagggctcagaaggaggccaaaatcataaaatatcaccctgaattgcctgccaccagtcccccaagacatgcccatgatgagaggagctgatgagaagcattaccttgatgaggggaagaggaatgccagtgagagcagaggcatccatgaatttcttgagatcttggtgcagaaattcaaaaaccaggtagagtttattttctgtgtgaatgacatccagcagcctagagaaggaaagtttgaggaaatggaggtgtgtgagagagagaaatgcccacactgtacagacagaacttatcctcctttccagctggatcacctctcagacgcatacttacttgacaatattaggatggttaagctccttaagcagagagatctctcggatggcagtactgggcacaccctcagtctcacttggagaggttgggaaagcagagatgggaatatggttacaaatattcctttcccccccacctagtcatttctttcccccaaggagacaccacccagcaccccctaggaaagtgagagaagagaaagggtgatggtaagagctaattcttgggtagtcagggtgtggtttttggatatattaaggccattatctcctcttttcccaggggtaggtaagtaaagccgcctggtgaaggtgaagcagggagactgtaatggaggggaaaaaatgcaggagtagcccccagcctccccagaggggccagtgaggttcaactgccattctttggaaagaggagagaattctaaggtgagggtggggcagtgaagagggctcttcattcagaaaggcgattctcgccggttcccacataactccactccatggagagtcttggacctcatctcagagacctcctttctctccccgagtctgtagtcgcacatttgggggcacgatccggctcagtttgggaagaaagttttccatggattccacaccaccctatactctccccagggagtataagtatactcttcaccttctactggcccccaacccacctctccacttctaaagaagtccctccctgctctcttccggtccctggacggctacccgcccgtggggggttgggggggacaatcaaggaggtccccagttaggagtcccgggtacagaggccactcacgtgtccaggcggattttcttaagcgccaccacctctcccgtcaacttgtttctggctttgtacacaactccgtacgtgccctctccgatcttttccaccttttggaagttctccatgaagcgccagcgagtcgggtcagcccggccctggagcgggggcctgggaaccctgcagaaggcggaccctggctctcgggggccgaggagggggaaacagggcccagtaccgtggccccgggtcgggatggaacgcagtatacctctcgctcttgtcaatttggccaacttgaaacaatgttgccgcctcccaccgagttcccgaccgccaccagaggccccgcccctgcttcccgcgtttccctggctccgcccccaggcctttctattggtcaacgtcagagccggggggcgagcccagcgctcctccccgcaaatgatcccgccccaggcaagtttggttcttgggggctagacaagtttcttccccggtggggcggctgaacactcttcccaagtacctgctttgggtccaagtttcctacctatgtctctagtctgtagggatttcttgatttctaactcactattttcaccaatcctggggaaaatatgtatcgacctaaggttaaattccacctggcccaggagcctcctttggaaaccaggaagccgggaatctcgttgcaaaggaatcctgggcctcagaggagtcgttgcctctgcctcatagcataccccgacactgtctctgttttgggatgcagggttctgtttctgtctttttgagaagttcctggtttaattcactctcccatgataaactgttgtgtctggtatgtgttacgcagctgcctttcagttagctcttgcccgggagtgcatcaagatgagagtgacccagtgaaaccagaaactgtcattgagtagcaggatgggaaagcaatgtctagggaccaggatccctttgtcagtttttcctttttcctctcctccggcccctcccaggccttctctgagggagaagaggaagggctatgcaaatgagcacccttttcttatataggggcctatcccagtccccccagtgcctttggttgctggagggaagaacacaatggatctggtgctaaaaagatgccttcttcatttggctgtgataggtgctttgctggctgtgggggctacaaaaggtatgtgtggatatgtggacatgagcaggtgtgaacttggggatgaattccccctgctctggtttctgtcctcctaatgggagatagcggcaatatttcaggcgtctcccactcatttgatttagtgaggatgtgggcacctgggctccctccctacatggagatttgggattttgcctgaaaataatctcatatgcttggaggggcagaaggatagaaggtctctgtggcactgattctgaggcttccttggcagtgagctggagcacgggctccaaaggggtgaaatgtgcaggagactcttttaggaaacgtctcttggggtaggagatttaaagtggggagtcagagaatgtggtattgggtaagaacactaaggagatacaatcctctcctcttgggatgggtacgggtgaacacagcccagaccttttgttctggggctggagagataggcagaggggtctcagctgagcatcacatgaaagggctctgggggattgggcctcgtgacaggagcaaggggcgggggtggggtggtgagagggtctggaatgtcccgtgctgctctgaggagagttggaagtggagaaagaatggggtatcttatgacttctcttgttctagtggtgggatgctcaatagatgattccagatcctcccccagcagaatcaactagggttacagcacacattagaaagggaatgaggccgggcgccgtggctcacgcctgtaatcccagcactttgggaggctgaagcaggtggatcacgaggtcaggagttcgagaccagcctggccaatatggtgaaacccccgtctctactaaaagtacaaaaattagctgggcatggtggcacatgcctgtagtcccagctactcagaaggctgaggctggagaatcacttgaacccagaaggcagaggttgcagtgagccaagatcacaccaatgcactccagcctgggtgacagagcgagtctccgtctcaaaaaaaaaaaaaaaaagaaagggatgaggcccggcacagtaactcatgcctgtaatcctagcactttgagaggctgagacgggtggatcacttgaggtcagaccagcctggccaatatggtgaaactccatctctactaaaaatacaaaaattagctgggcatggtggtacgcacctgtaatcccaactacttgggaggccgaggcatgagaatcgcttgaacctgggaggcagaggttgcagtgagccgagatcacaccattgcattccagcctgggcaacagcaagactctgtctcaaaaaaataaaaaaagaaaagaaaagaaaagagataaggaggccgggtgtagtggctcacacctgtaatcccagcactttgggaggccgtggtcataggattgcttgagcccaggagttcaagaccagcctgagcaacatagtgagaccttgtctctacgaaacgtaaaaaaattagccaggcctaggccaggcttggtggctcacgcctgtaatcccagcactttgcgagaccaaggcaggtggatcagctgaagttgggagtttgagaccagcctgaccaacatagagaaacccagtctctactaaaaatacaaaattagctgggcgtggtggtgcatgcctgtaatcccagccactcaggaggctgaggcaggagaatcgcttgaacccgggaggcggaggttgtagtaagctgagatcgtgccattgtactccagccttccagcctgggcaacaagagcgaaactctgtctcaaaaaaaaaaaaaaaaaaaattagccaggcttggtggtgagcacctgtggtcctagccacttgggaggctaatgaggaagatggcttcagcctaggagtttgaggctgcagtgagtgatgaacgtgccactgcacgcagggtgagagagcaaaaccctgtatcaaaaggaaaggaaaggggaaagggaaaggaaagggaaggaagtttctgcaggaaagggaaaaatggggtgagggtagtttttgctgtgctgaactatatacagaaaggagaggagaggggagggaaggggaggggagagaggtttctgcaggaaagggaaaaatggggtgagggtagtttctgctgtgctgaaatacatacattatatcccagccctgctttctccctagatgtttagtgtcacagatttctaggaagttctccttgatgtgactttcctcgctgtgctgcagtttcaagtctttttcttttactatattccttaatgtatcctggaaagagtctgttcacacccacccacctaaggctcttaacaaaaagactgtacttatattttggatcctgattttaaaaatcataagacatttttccagatattcatgaaattttatatggactgagtttgataattttgtctagcatgaaatgacattgtgcttatgcaagaaaatactcatacattttaaatttgtagggttaaaataacacgatgtctgggatttgcttttacatactttagccaaaacaaaaacaaaaacaacaactagtaaggataaacaaagcaaatgtggcaaggtgttgatagttgttggacctgggtggggcagatggaggtnnnnnnnnnnnnnnnnnnnnnnnnnnnnnnnnnnnnnnnnnnnnnnnnnnnnnnnnnnnnnnnnnnnnnnnnnnnnnnnnnnnnnnnnnnnnnnnnnnnnnnnnnnnnnnnnnnnnnnnnnnnnnnnnnnnnnnnnnnnnnnnnnnnnnnnnnnnnnnnnnnnnnnnnnnnnnnnnnnnnnnnnnnnnnnnnnnnnnnnnnnnnnnnnnnnnnnnnnnnnnnnnnnnnnnnnnnnnnnnnnnnnnnnnnnnnnnnnnnnnnnnnnnnnnnnnnnnnnnnnnnnnnnnnnnnnnnnnnnnnnnnnnnnnnnnnnnnnnnnnnnnnnnnnnnnnnnnnnnnnnnnnnnnnnnnnnnnnnnnnnnnnnnnnnnnnnnnnnnnnnnnnnnnnnnnnnnnnnnnnnnnnnnnnnnnnnnnnnnnnnnnnnnnnnnnnnnnnnnnnnnnnnnnnnnnnnnnnnnnnnnnnnnnnnnnnnnnnnnnnnnn

SEQ ID NO: 8896 - DNA, 15137 bp, Homo sapiens
cctgcctgtccacgtggcccccccccgcagggctcctgggctcctcagaagggctggacagagccaccctcctttttaaacagctacttgcctcggcaaagtgcctctatctccccaacgctttccaggtggttaagagtcactcaaaagctgtgtgatcttggccaagttactgaacctttctgattctcaggtttcttctcaggtaaatagggaaaataaaacctaaccttcagagctagaatggggattcaagaagacagtgctggtcaagtgcctgccaagcaggaggggagggtcaaattctgcttgctactattggcgcccatggccacatcttggcatacctaggacaggtgttattgcaatccatttgatttataaggtaactgtagctctgagaggttgaggcacttgcccaaggtcacacagtgactgaatggtagagatgggctgggaactcagcttttaggacccccagcctgggtttctcacttctgcattggaggttggggcagaccagtgctggagctcccctgggcaggctgagcctctgtctggggcatgctctgacagggagagatggattcaaacccattccaagaagagttacaaagagcagacgctaaggagggggaaaccaggatgtgggttcagctgtgcccaggagttgacatcactcttggggcccacggaaacccatcagcacccaaagtttcacctgtatgcagtgcccatctacgcaaggccagcagcctgcaaagatctcaccagtggggcctctggaaataacccaggctcagaaactagaagaccgccgtcccacccagggcaagcccctctcccaccccaggtcctgctaaactcaaaacaggaagaggtcgtgcccgccccctcgaccgctgcaggttcaagctagctcacctggatcacgttgctgttggagttcttggaatcggcactgacatagacagagaagaagggtgaggtgcggtagtgggcggtgaccacctgcagggtgtcctggaagttgtccttggcccagggacctgtgatgttccagcccccgagctgtggggagggagagcaggcagggaggtgatgaggtggcggggagacccagatgtgaattctggttctgccgctgacttgctctgtgaccctggagcagtcgcctgacctctctgagcctcaagagcaaaggaaaggattggtcttcatcgggggtttccgacccatgagctggagacccatggatggagcaaaggcttatcctagacaagccaagcagccaggcatgaatccagccgctccctgggtggctgggatgagaatgggaaagagacttttcccggttcacggtttatattttggataatgaattgtgtgaatgtgattatatcaaaacataaattcaattgtgcctctgggataaaaaaggctccacatgtttaagaaggttggtaaattacggtctactttagtctcaaagttgggattttaaaaaaattttttttgagatggagtcttgctctgattcccaggctgaagtgcagtggggccatcacaactcactgcagcctccacctcctgggctcaggtgattgtctcacctcatcctcctaagtagctatgactacaggtgtgtatcaccacacctggctaatttttaaattttttggagatggggtcttgctatgctgcccaggctggtcttaaactcctggcttcaagtgatcctcctgcctcagcctcccgagaaagttgggattttaaaaaatctccctggtcttccctggtttggcacatgggacctgtccagagaggaggggactagcatagtccccagcgcatgcagccaccaaccctgctgcaatgctttcctggagccaagctaagaggcagggctgtccagggaacacgaggcaggcagaaaacatccacagacacctactgtctgcaccaggaagcctcagagtctgggaagtgcccaagaaagcaagaaagatgtcttcccctgctcaggagtaagcaggtataggagagtggcctgggtccctgctcacggggagggctctggttctgggccaagactctctgtgggtctttctggaacaggcacacacccctccacacacacaaacataacccctgaggaaaaaacagcagcaacgtggaggaatattttccctctaaacatggcccccatcccacacacagatgcacagagagacacacagacagatgacagacatctacaacagatgctgacacacactctcacacaaacacatgcacagacaacccacccacgcagctacgcaatgtgctcacactcacatgtgctctcgcacactcgctctctctctttctgtctttctcttggtgctaccggctggacgtatgaggtgggccagtggtaccagaaggctggagtggaagccagggggcgggcaggtggcatgggccggggcttggggagggagagcccgaggcactcaccctctcaatcaactccattagaggtttggccctgagctcctcgatcctggtctcgttcatgcacgcacggtagtatacttgcgcctttctctctgcctcgctcacgctggccgtggagttttctggaacaacagacagtggagtttgcaatgcggccccacttgcccactgggtggctttggggcagtccctcttttcggagccttggtgttctcagctgcaaaggagctctgacatctgcctgtcggagtggcagtgaggaatgccgtcaccgtgagtatgtgagggcccctggacagagcctggcaagctgaaggcgctcccgaaattttgctgactgcaaagaaaaagaatcgaccacgtttctctccctctgccagttgggttcacagacgtgtccccgggttgaccgcacgtgcccaccagcaggacagtgttcttcccctgtggataacgtgtggtacgaacacccctgcctggtgcatgggacagaggccggtcttggttttcagataccagatgatctttcttgtgataaagactgaagttggatggaaactcaaaaggctcattcattatgaatttactttttgcttcctccttggaggggctaggcacgttcaccaggcttacagccaactcctggggccgttttccaccgcccttgccaactccagcaagcagcatctccctcctgcagtggcttctcagaccttaccccagacacccggagattctgttcccttctccctcacctcagtgccctggtccagatgccacctgctaaaggcaatgctccggtgggtgcacctggtgaagatgaccgcttcctgccactcaggtccacaagggacccactatatactggggctctgtgcatgagccttcttctcagagccctgctccaggccatgccagatactctaaacccctcaattccatctgtccctcttgcctcctctgggaaactcactgctccagacacattccctcatttcatgttcatttctctctggccctgaagccccttcctttgcctccttcaaagatccctcaaaccccagctccttcacaaagactttcctggcagaactgtatccatccaccctctgaccagatactagatgcttactctatgctaggccctgtgtaagctgtgggacacaagagaaaacatccctgtccccaaggagcttctgcatgggaccctgttaaaatcctactcaacctcaaggcctctacggggacatctttttgatgaaggctctcctaagatgttcattcccaaaggccctcaccgctctgcatacctgtgtccaccattagaccgtgagctccttgggacagaaagcgggtcttatttatgcctataaaattcagagcccagccctgtgcctggcacccagcagaaactcaaagaaatgaccacaagacacgacagtgctatgaacaacgcacgtggctatggaacacagagaaaagtcactcccttcggaggggtggggagaagaggggtctccagagggcgttccatttgagctggttctgaaagctgaagttgttcaccaggtggaagggaggggagaggccactgggttgcgcggagcaggacaggacagtgtggggacaagcggggatgcctgaaagggcaggcggactgcttggagaaaagaaagctgtctggcgtagtcacttggagcaaaggacatgagtcacttcctggccagtctttcatcagctttcccagcctcaccccgagagctccctgccccccgatcctcaccataaatagcaccatggctttcactgatcagagcatcgagccccggtcttgctgacgtcagggtgatggccctgaaagggggacgggaccagcttggggctagtctgaaggaagacacagagacaagagagccccttgagagacagggtcaggggcctgaacgaggggctatggagggttcgtacagccctggagaccatgggctactgggttgctaagtgctggaaacacctgcatgtcccccaggcaccacggcagctctgagaagaggactctgtgaggggagggcggaaatggggaagctgggatacagaagatcagggagagcaaaaggggagtgcctcgcccctcccaggggcctcgttcctatggcaacactcccaatgaagctcttggaagaaaaagcaggagaatcgtcattgctccccaggcctcagatgcagcgtctcaccctccacatctggctccggccaaagccctgaaatgccagggccagcgctggggaaggcactctgtgtgctctggcccatgagtgagcctggcatctccctcccccaaggccacaaagataagaggcctaaagaacagctcccaggagcagcctggctgtgctaatcacagcgagttccgaggccctcttccctaacacctgtctgcaagccccaaattatcaccgggagggagaaggaatgcctccttcagacacagcctcccttgctccttcgctgagaggctgccacaggccaggttcaaactccattcctttggcccccaccacctgggtgccacgctcacttgctttcccacattgtttacaaagttccttttgcctggcaaccgccaggccgggtgtgggggacagtgggcaacataactggaggcctgtccacgtgaggcatgcagcgtggtgagtgaggcaaacggcagccaaggactcgcgggagcatctgattacgcacggggtgaacgctgtgagaacatcccagaggccttgaaggggagggcgggaggagaccagggaagccaagcaaggccccggggaagcttcgtttgagcttcgggctgaaggatgaactcaatgtggagtagaagcaggggctgtgcctgggctgcccctccgccattccatgtcttagtggtccctgcagccccagaaccagccctggatagggacctagtaggcccctagcaacaggtggtggctgcaagaacagagcccagtgtccctttctggagaggaaggacatctggaagatgagagggtgatgaggccggatgcccacctaaggtttcctttttttatatttattttttttttttttgagacagagtctcgctctgtcactaggctggagcgcaggggcgcaatctcggctcactgcaacctccacctcctgggttcaagtgattctcctgcctcagcctcccgagtagctgggactacaggcgtgtaccaccacgcctggctaatttttgtatttttagtagagactgggtttcaccatgttggccaggatggtctcaatctcttgacgtgtgatctgcccacttcagcctccccaaatgctgggattacaggcgtgagccaccatgcttggccaagattccctttttttttttaaaggaaatcgggcaggtggggcaggagtggacaggatgagggggccccgccaggagttggtgttcatgccccctctgtgtgtgtcatcagtatccccactgccaatgctggctggggcaggagccctggtagaaggtacggttcctcttcctccccctggttccaggagcccacrgggacaacccacggcacactctcccacctcttctttttcctcctcactcagggagcacctactatcctgcaggctccaggggacaagagcccaagtgaggctgccaggcgggaggctgctgcaggggaccaggtgagcaaaggtgggcgcttggccaggatggyggcagagaagggkgcgagaagtatttggaacatgagagaaaggagagtcaagaatggagtcaagtttctttggcctgagtgagaagctgctgacactggggaaccgcagcctgaggatgaggggcaggcttaggaaggagcttcagtgcacacagctactgcctaaagctcagctccagacactcgaagtttgaggcctctatgagacacccaaggggagccctggtctggggagtctgtagagtgcrttgtcttgaactccttttagtccaaataggcactggaatataccaattccccccscsctttttktttttgacactgagtctcgctctgtcgcccaggctggagtgcagtggcacgawcttggctcactgcaacctccgtctcctgggttcaagtgattctcctgcctcagcctcccgagtagctgggattacaggcatcctccatcacgcccggctaatttttgtatttttagtagagacagggtttcactgtgttggccaggctgttctcaaactcctgacctcagrtggtctgcctgtctcggcctcccaaagtgctgggattacaggcgtcagccaccgcacccagccccaattcctgaaattggccagaaggctctatatcacgcatccccaacaggggcaatactgcccccaggaatttattcttgcaggacaaagcatctcacgctttttactctgtgtatacagactaagaatagcaacagacatccagagtacctgtggcattaacatttcatggaggcgtaatgayaactgcaggctgagaaatgccaccctgggtgacggggtctgcgctcccacctgtctccagctcctgccccacactcttccccatggctggctggtctcttctctccttaactcaagcatctgctcagacatcccttctgagaaagcccatcccttcctgatcgctgcagctacaatcgcctcttccctctctgsccccatgccctacttgatgtttttgagcccttctctttacaatcctatcatgtatttagtcatttatttgtttactgtctgtcttccctgcyggaatgtaacttccacaagaaaagactgtcttattcctacataatccccagccccaagcaatgcctggcacacagaaagtgtctgatgcataattggtgagtgaataaaggaatgaatgacagagaaacgtagcactctagcctgcgggaggtgactgggcttcaaagtgaaatgagtggctcatgtctgtaatcccagcactttgggaggccaaggtgggtggatcacttgaggtcaggagtttgagaccagcctggccaacctggtgaaaccctgtctctactaaaaatacaaaagttatycgggtgtggtggcgggtgcttgtagtcccagctactcggcaggctgaggcacragaatcgcttgaacccagatggcggaggttgcagtgagccgagatmgcgccactgtactccagcctgggcgacagatcgagacttggtttcaaacaaaacaaaacaaagtgaaatcaggcacagacctttttctgaataagaaaaaggtctctaggactgtgccaaccctccatagcccctcgttcaggcccccaaccttgcctctcaaggggtgctcgtctcggtatcttttttcagactagccccaggctggcactgtcccctttcggggctgtcactctgagttcagcaagaccagggcttgatgctgtggtctcctttaagacacccctggctcatgtttacttcccagaagatttcatggaggcaaagaagaagccaacacccaacagtgtggctcctggcactatgctggggacacattttggagacagcagcacttctgcggcctccttgtrctatgaagatcttttggcagcctagggccacacaacagagctccacactgcctgggtacttccttctaggggccccgagttccagaagcttcctcagtccctaccccaaagtcccagagaggaagacagagcaccatttcatcggccgcttcttcctctgggagttttcattggaatgccctctccacatcactcctcagggaggaaatgaacgcccaggcaggcagagctgtggggtatgataggggtgtctgggaatcccccgyatgctgctgggataggggtgtctgggaatcccccacgcgctgctgggataggggtgtctgggaatcccccacatgctgctgggataggggtgtctgggaatcgtgcggcctcccttgatgcagtgggaccatctggccaggagcctgtggggccctgactccacaccagggcaggaccagtgtttgttttagataaaactagactccgttcagacagtcacaggcctcaggagccccatcctgtgctggggggaaggggtgctgataaaggagacgccttgctctgcagaacaaaaataattccaccactgccaccrctcacagcatctacagcaggccctgtgctgctgtcacaacctcaccctggtcccctgaggcggatatcaccatcccatttcagagacaaggaaaatgaggcccaggtgcgtgaagaaactggcctatcaaggcagagctagygggtagcatgctggacttctaagccttcctgagaaagtgaactgcttcctctgagatgggcataggcatggctgtgtgtgcatcttgtcctgaccattccacagtggctgttatcacactccatttacaagtaagaggttgggtaactcrtcctaggtcgcaaaagtggctgtggccaggactggagcctaagccttttctgcttccctgtcctttcctgcaggttggctcagaaaaccggaggtgaagctgaagcagcccagctggccctaagaagccctggacgctccctcccatcctcacatcgttgagtcaatgctattatttgaatgtctgtgtcccctccaaaattcatgttggaacttaatccttaaggagcagttttaagagatggggcctttaggtcatgagggctctgctctatgaatggattagtgtcttataaaagggcttgagggggccagttcccccctcttcagtcccatatgccatgtgaagacacagttcatggtgccatcttggaagcagagagcaacccttaacagacactgaacaagcccgtgccttgatcttggacttcacagcgtccagaacagtgagaaataaatttctgttgtttacaaattatccagtgtattagtctgttttcccactgttgatacagacatacccaagactgggcaatttacaaaagaaagaggtttaatggacttccagttccacgtggctggggaggcctcaccatcgtggtggaaggcaaggaggagcaagtcacgtcttacatgggtggcaacaggcaaagagagagagaggctgtgcaggagaactcccatttttaaaaccataagatcttgtgagacttattcactatcacaagaacagcacgggaaagagccgcccccgtgattcaatgacctcccactgggtccttgccacaaaatgtgggaattgagggagctacaattcaggatgagatttgggtggggacacagccaaaccatatcatccagtctgtggtattttgttacaatagcacaaacagactaagaatcaatcaatccacgtaaccattccccaaacaggaaggcagcacccactcctgtagacaccatactggatagaaagcattcatgatgcagatgctgtccatagatggcttccttccaatatgcgcaggaagatgaaactcaattagacagcaggtattaggaaaatatgtcaaaataaaaatacgagcgatgtcacagggtgacatgattaattgccacatcaccgacatggacacgtttaacgctattggaatattgtatgtctatctcccagggagactggaaggcagactgctagttttttctttatggaatctgtgttgcttgaattgtcacaatgagcacgcattgatttttttgtatgcgttcatcttacagtataaaatacagtaaagcaaacaggacaggtgcacacagtgtacttgtagctcaagcctagagaggccctttggtagccacagaagacaatggaggcagcaggtttgagaaaagtctcggaggctttggagggggtggtgtaggctctctagctggtagaataatctgagctacaagcacagttggaaagtccaaggcagggccaagtctaagggctgaagggcctggctgcttccttcctctgatgaagtgaggccacccactctcatctccccaaaacctacaaggacagcccatgctggccacttgggggagtggcagagtgaggtgcgaggcatctgtgtgtcctgcagctgaggtcagcatccccagctggcagactgccaggtcatgccacagtggcacctggcctagttcggcccacctgctacagaactgcctggattgcctctgaggagcctagcatgaattcacctggcagagaaatgcatggcttgcccaaggtcacacaagcagatggtaataactatcttgccggatcggctgacacaatccacactggcactctaaatgtcccttctcccctctccgcctagagggaagccctcgcctcagcaggtcagagtggcctgggcacctccggcttgttcccgtgcccatcagctctggctcccttccgacgcctgttggctgacccctttgtcttggagacgctgaacccagcctggccttaagcccaagaatgcactggcccacactcctgcatttttttgtcacccactcacctgccatctgcctcttcaggagtttccatgtatcaaagtcccaggtatcaagcccacaggtgaggggccatttccagactagttccgaggactgagccttgagggagaggaccccaggatatgtcttccggggaagcccctagtcagtatgacatgggggtgaccccagctcctgtgttcactggacctgggctggggcttggctggcctgggctgagaactctgtggagcagccgctggggaaaggaggcaggcgaaccacacttctcggctgctctccctgccagcagtgccgacccagggcctctccctgctgaatctgacagtagagtgagtagagaaagaatacaggctttgaggtcccacagctctgggtctaatcccagcctcaccatttcctaggaaatacatttccttcatattcatgagtctcatctgtaaaatgtgcaaatgcagcctactccatgagtttactatgagaattcaatgaaataatacaagtgagatgctcagtgtgtcatagctgtattctgcacctccttcctgacaactgggtccacataccagcgcttctctaataaataagaaataatgactttgttctttgcccacccaattaacccttagagcatccctactaatgagctgagtttcagttagttcccactttataggtgatgagccgaggacctaaaaatctgggtgacctctctgcagtcatacagcttgtttgtaagaagtctgggttggaactcacctaccaccaccaaggagggcagctgtgctttgacgagcacctactaggtgccaggctagtattccgatgtattccagtgctcagcactttgaaccatcccaggcaagtcaatactcacagtaactgtatgtgttaggaggcatcattatccctactgtacagataatgaaactaagtgggagagaagccaggtcacttgtccaaggccacacgagtgataagcagctagcacaccaggactgcttgacttcagaactctgcggtctggcctcctggtatcaccagaccttggcctcggggtcagggttgaatgcatgattttgggttgttccatggcccattggatgcagctccccacccacggcttgattgtcaggaacagtggggatggactcaatcttggctcagacctaaggttctcccagtgagaaccagccccagaaccagtcagaccagaacccacacaatgcacaagagcccattctgggcctcactgggaagctagagggcctgtccactgtcctgccccatcccctctaaatgctaactgctccccagagagtgagcccctcaccattttggactggtggtatatccttgacaaagtcacttaacctctgggagcctcagttgctgcatctataaaatgggaacaacaattccgaagtctggggttgtgaggattaaggaagcagtggctctaaagagcatggtacagtgcacagcgcacggcggacatccgtgtctctccttccttcaggccctcaggctctgcgccccctgcaggttcttgcaggcactgcggaaagggagctaatgtctgtcccttgtacctgaaggaggtggtgtgggacagaggaaagggcacaagaccaggcatcaagcaagtctcagctctgccactcactagcctatcatgaggacctctccggatctcgctttcctcatctaccaacagagtgagcaacaccttcccagcttccaccctgcaggatcaagtgggatggtgtctacaaaacagctctgtaacctgtcaaatgctgtgcaaaggtcaagggtgaataacagtagcatcaatacaaacagcagccaccacaacatgccaagcctaggcatggtttaaatacatttaaatgtatttcccatttaattttcaaaattcagaggaggcatggttcccactgtactcatgagaaaacaagccagggaggtgatgtaattgacccaagacctcatagtaagtggcagagtccagattcgaacccaggtcctggtgagtctgaagcagaggaaccgacccaccttgttatactacctggactatgggccctgccaagcccccagctgtgatgttaggcactggagaagggtcgtccttgagttccagtcttgcaatgatagacatatttgccttttaagtgtctggttctaaaatgaaaagctgcatgccctttcaaaggcactttggtggcataaggcaggcagggggacatctcagactggggctttgctgcttcggacatactgagcttcaaccctacctccatacacaccaccctgctcatcctcaggaagttaggctgaaggcagctgctgctgctgcttcaggagctgtcggaggccaggagaaagggtgggtgtgttttacctagcggcggctctgctctgtggggctggggcaggaaagaaaggaaaggtctccttcacctggtttgcctactttccctgtaatctaaaagacccagttgccttaaattgttaattgtccatttagaatcatttcctgtctcttaagattcgtgtccctttaagaagatctgtccccttttgggtatcttctattgtacctgcctttgaatatcttaaagttttttaaaacaatcagtatttgtcggatctaggttctgttgttgatggataaattgactgacttttcagaatgcagcctctcccagcatttagggtcccaggatggagcaggggacagcagcagagggagacagccatggtcccagctgtgggagggttaaggtgggcagctttatggtacagcacaggtgtcatgatttcacactgggggaggagcccagtgggcagacgggaatccaacaaacattaactaaggatacagctgcaaacaagacaacgtggagctctaatctgaggaaaaaccatcaacacaggggtgaactagaggtgcccaaggcctagtgaagtgcaaagagaactctgaccagagggcttatcgtgcaagcccgatcaccgtgaggctaaggatgattcccgcctacactgaataactaatcctctgataagctgttgttagaactttcattggatcacaaccttagaatctgatctagtgtgttcagtctcgatcccttttgctcataactttcaaaactcacagtcaatactagtcaaaagctacgccaagcttgaagccacaaaagtaacgaccacagccaccagttcttgtgtacaccctacatgccacacacaccatgctaatgctttacacatgtgctctctagttctcaaaactctgtaccttgggtcttattagtctcattttacagatgaagaaactgaggttcagagatatgtgacttactcaggatcatacaatgagtgagggcagacattctaacccagcttcacctactcccaagtctatggtcttccattctgccaggctcctcttttcttgttttttagacaagagtctcactctgttgcccaggctggagtgcagtggcgcgatctcggctcactgcaacctctgcctcccagtttcaagcgattctcctgcctcagcctcccgagtagttgggactacaggcgcacgccaccatgcctagctaatttttgtatttttagtagagacagggttttgccatgttggccaggctggtcttgaactcctggcctcaagtgatccacccaccttgacctctcaaagtgctgggattacaggtgtgagccaccgtgcccggcccattctgccaagctcctcctttaagcaggcgcagctgggaagctggctgggccagctgacagctccccgctgtggcccatttattggtctccatgctggatgcttaccgaggaggtgcttgatgattgcttggttgtgttcccagaggttgctgaaggtcccccagcgtgagtggccatcagggactgggttggccttgatccagcccccacaggcgtagctgaagaagtcatggcaggggtccactgtggggtccatggagctcaagatggagctggtcactgagacacaagcttcgctcaggcacacagagggg

SEQ ID NO: 8897 - DNA, 19532 bp, Homo sapiens
  misc_feature (1)...(19532): n = A,T,C or G, or insertion/deletion polymorphism (see Tables 1-2)
tctaaggtatatagatcacatatatatcatatgtgatctatatatagatcatatatatatatatgtgatctatatatatatatatatatatagatctatatatatatagatcacatatatatatatcacatatatatatatcacattttcttcattcacccattaactgatgggcatttggggtggttccatatttttgcaattgtgaatcatggtgctgtaaacatgtgtgtgcaagtgtctttttcatacaatggcttttttcctccagtagtgggattgctggatcaaatggtagatctatttctagttctttaaggcatcgctgtactgttttccataggttgtactagtttaatttcccaccagtagcatagaagtgttctcttttcatcacacctaccccaacgtctatttttttttttatttttaaattatgaccattgttacaggagtaagttggtatcacatagtggttttgatttgcatttccctgataattagtgatgtagagcattttttcatatgtttgtcaaccatttgtatattttcttttgagaattgtctgttcctctgcttagcccactttttgatgggagtatttgtttatttcttgctgatttgtttgagttttttgtagattctggatattagtccttttttgtatgtatagcttgcgaatattttctcccactctgtgggctgtttactctgatgattatttcttttcctttgaagaaactttttagtttaattaggtcccatctatttatcttgtttcttttgcatttgcttttgggttcttggtcatgaactctttgcctatgccaatgtctagaagagtttttccaatgttctagaatttttatggtttcaggtcttagatttaagtctttgatctaccttgagttgatttttgtataaggtgagagatgaggatccagtttaattcttctgcatgtggactgccaatttccccagtaccatctgttgaatacgctgtcctttccccactttatgtttttgtttgatcagttggctgtaagtatttggttttatttctgggacttctattctgttcaatttgtctatgtgcctgtttttataccattcccatgctgttttggtgactatagccttgcagtatattttgaagtcaggtaatgtgatgctccagatttattcgttttgcttaatcttactttggctatgtgggctcttttgtagttccatatgaattttaggattgtttttttctagctctgtaaagaatgatgatggcattttgatggggattgcattgaatttgtagattgcttttggcagtatggtcattttcacaatgttgattctacccttccatgagcatgggacgtggttctacttgttagtgtcatctataatttctttcggcagtgtttttaattttcctcgtacaggtgtttaacctctattgcgggaagtcagggaccctgaatggagggaccggctgaagccacagtggaagaacataaattgtgaagatttcatggacatttatcacttccccaatcaatactcttataacttcctatgcctgtctttactttaatctcttaatcctgtcatctttgtaagctgaagatgtatgtcacctcaggaccctgtgatgattgcgttaactgcataaattgtttgtaaagcatgtgtgtttgaacaatatgaaaactgggcaccttgaaaagaacaggataacagcaattttcagggaacaagggagataaccataaggtctgactgcctgcagggccaggcagaacagagtcatatttctcttcttgcaaaagcaaataggagaaatatcgctgaattcttttgtcagcaaggaatagccctgggaaaagaatgcattcccgggggaggtctctaaaatggccactctgggagtgtctgaattacatggttgaagataagggatgaaatatgccctggtctcctgcagtgccctcaggcttgctaggattaggaaattccagcctggcaaattctagtcatactggttctctgctctcgaaccctgtttcctgttaagatgtttatcaatgacaatgtgtgcccagcgggatgtggaacctcatcagtgattctagttttgccctctgccttgtgatcttttactgccctctgaagcatgtgatccctgtgacccattccctattcatagacccccaccccttttgaaatccataataaaaacttgctggttttgcggctcaggtgggcatcatggaacctgctgacatgtgatatcacccccggagacccagctgtaaatttctctcttttgtactctttctctttatttctcagactggcccacacttagggaaaatagaaaagaacatactttgaaatattgggggctggttcccccagtaaacctccttggttaggtatattcctaagtattttatttttttgcagctactataaaaggggttgagttcttgatttaattctcagcttggtcactgttagtatatggcagtgctacagatttgtgtacattgattttgtatcctgaaactttactgaattcatttatcagatctaggagctttttggataagtatttatggttttctaggtatacagtcatatcattggtgaacagtgacagtttgacttcctatttactgatttgtctgattgctctggctaggatttccagtactatgttgaatagaagtggtgagagtgggcatccttatcttgttccagttctcagggggtatgctttgaacttttccccgttcagtataaggtcggctgtgggtttgtcatagatggtttttattaccttaagttatgatctttgtatgtcaagtttgctgagggttttaataaaaaagcgatgatggattttgtcaaatgctttttctgcatctattgagatcatatgatttttgttttcaaatctgtttatgtgatctatcacatttattgacttgtgtgtattaaatcatccttgcatccctggcatgaaacccaatttatcaccatgtatgatctttttgatatgctgttggattatgttagcttgtattttgttgaggatttttgcatctattttcatcagagatattggtctgtagttttcttttttattatgtcctttcctggttttggtattagggcgatcctggcttcatagaataatttagggaggattctctccttctctgttttggaatagtttcagtaggattggtaccaattctcttctttgaatgtctgattgaattcagctgtgagtccatgtgaatctgtgattttttatcgttggcagttttttaaaaattaccatttcaatctttctgctttttattggtctgttcacagtttctatttcttcctgatttattctaggagggttgtatatttccaggaatctgtcttctctaggttttctagtttgtgcctgtgaatgtgttcatattagccttgaatgatattttatatttctgtaatatcagtggcattttcttccattttgtttctaattgaggttatttggatcctctcttttcttggttaatctcactaatggtctatcaattttatgtatcgtttcaaagaatcagcttcatgtttcatttatcttttgtatttttttgtttcaatttcatttacttctgctctctttgttatttcttttcttctgctgggtttgggtttggtttgttcttgtttctctagttccttgaggtgtgactttacattttgtatttgtgctctttcagactttttgatataggcatttaatgctatgaactttcctcttaggactgtttttactgtgtccgagtggttttcacaagttgtgtcactattatcattcagttcagagaattttgcatcttgatttcactgttgacccaaagatcattcaggagcaaattatttaatttccatgtatttgtatagttttgaaggtttcttttggagttaatttccaattttattccactgtggtctgagaggggacttgatataattttgattaccttaaatttgttgaggcttgttttgtggcctattatgtggtctatcttggaggatgtttcatgtgctgatgagaagaatgtatattctacagttgttgagtagaatgttctgtaaatatctgttaagtttatttcttctagtgtaacttaagtccattgtttcattgttgactttctgtcttgatgactttctagtactgtcagtggagtattgaagtccccactattattgtgttgctgtctatctcatttctcatgtctagtaataattgttttataaatttggaagctcccatgttaggtgcatatatgtttaggattgtgatattttcctgttggagttatccttttatcattgtataatgtccctctttgtcttttttaactgttgttgctttaaaatctgttttgactgatataagaatagctactcttgcttgcttttgttttccatttgtatggaatatctttttccactcctttaccttaagtttttgtgagtccttacacattagatgactcttgaagactgaagatacttggttgctgaatttttatccttcctgccattctgtatcttttaagtggagagtgttaatattgagatgtgaagtactgttctatttctcatgctagttgttgcctgaattccttatttttttcctttgcattactgttttataggccctgtgagatttatgctttaaggaggttctattttggtgtattttggagttttgtttgaagacttagaactccttttagcattttgtgtagtgctggattggtagcggtgaagtctctcagcatttgtttgtctgaaaaagactttatctctccttcatttatgacgcttagttttgctggatacaaaattcttgcctggaaattattttgtttgaggaggctaaagataagaccccagtcttttctggcttataggctgctgttaatctgataggttttcctttataggttacctgatgcttttgcctcacagctcttaagattctttcctttgtcctgactttagataacctgatgactatgtgcctgggcgataatctttctgtgataaatttcccaggtggtctttgagcttcttgtatttggttgtgtagatctctagcgaggccagggaagttttccttgattattccctcaaatatgttttccaaacttttagatttttgttcttcctcaagaatgccaatcattcttaggtcatttaacataatcccaaatttcttggaggctttgtttatttattaaagttcttttttctttgtctttgtctgactgggttaattcgaaaggcttgttgtttgagctatgaagttctttcttctacttgttggatcctattgttgaaactttccagtgcattttgtatttctctaagtgtgtctttcatttccagaagttggattgtttcttctttatgatatctacgtccctggggcatttttaatccatatcctgtgtttttaaaaaatttatttaagttgtttttcacctttctctggtatctttttgagtagcttaaaatcaaccttctgaattctctatctagcaattcagagatttcttcttagtttggatctattgctggggtccagtgtggaggtggtaggggagtgaagtagactctgtgagaatccttggttgtagatagacttagtgtggtggctttctcaaatgctggttatgctagcagtgcagttgtcatgtgaacagaccgaagaccactggttagtcaagatttttcagccagtggaattagctgttttctcctttcttagagcagttattctgtcgtgaattgttgtaatgtcctgagttggttggcctccagccaggatgtggtgctttcaagagggcaccagctacaatagtagaaggtggatataagcttgccctaagttggccaagataaatattcagtttctcaggcaatgagtggtgtcataaagctcccaagagtttacgtcttttgtgattggctaccaggtgggtagagaaatgccctcaggtgtggacagggttaggcaggtctgagctcagactctcctcgggcggggggcttgcggcagccactgtgagggatggggtggagggtttttctccagccaatggaattatgttccagagggcattatggcnnnnnnnnnnnnnnnnnnnnnnnnnnnnnnnnnnnnnnnnnnnnnnnnnnnnnnnnnnnnnnnnnnnnnnnnnnnnnnnnnnnnnnnnnnnnnnnnnnnnnnnnnnnnnnnnnnnnnnnnnnnnnnnnnnnnnnnnnnnnnnnnnnnnnnnnnnnnnnnnnnnnnnnnnnnnnnnnnnnnnnnnnnnnnnnnnnnnnnnnnnnnnnnnnnnnnnnnnnnnnnnnnnnnnnnnnnnnnnnnnnnnnnnnnnnnnnnnnnnnnnnnnnnnnnnnnnnnnnnnnnnnnnnnnnnnnnnnnnnnnnnnnnnnnnnnnnnnnnnnnnnnnnnnnnnnnnnnnnnnnnnnnnnnnnnnnnnnnnnnnnnnnnnnnnnnnnnnnnnnnnnnnnnnnnnnnnnnnnnnnnnnnnnnnnnnnnnnnnnnnnnnnnnnnnnnnnnnnnnnnnnnnnnnnnnnnnnnnnnnnnnnnnnnnnnnnnnnnnnnnnnnnnnnnnnnnnnnnnnnnnnnnnnnnnnnnnnnnnnnnnnnnnnnnnnnnnnnnnnnnnnnnnnnnnnnnnnnnnnnnnnnnnnnnnnnnnnnnnnnnnnnnnnnnnnnnnnnnnnnnnnnnnnnnnnnnnnnnnnnnnnnnnnnnnnnnnnnnnnnnnnnnnnnnnnnnnnnnnnnnnnnnnnnnnnnnnnnnnnnnnnnnnnnnnnnnnnnnnnnnnnnnnnnnnnnnnnnnnnnnnnnnnnnnnnnnnnnnnnnnnnnnnnnnnnnnnnnnnnnnnnnnnnnnnnnnnnnnnnnnnnnnnnnnnnnnnnnnnnnnnnnnnnnnnnnnnnnnnnnnnnnnnnnnnnnnnnnnnnnnnnnnnnnnnnnnnnnnnnnnnnnnnnnnnnnnnnnnnnnnnnnnnnnnnnnnnnnnnnnnnnnnnnnnnnnnnnnnnnnnnnnnnnnnnnnnnnnnnnnnnnnnnnnnnnnnnnnnnnnnnnnnnnnnnnnnnnnnnnnnnnnnnnnnnnnnnnnnnnnnnnnnnnnnnnnnnnnnnnnnnnnnnnnnnnnnnnnnnnnnnnnnnnnnnnnnnnnnnnnnnnnnnnnnnnnnnnnnnnnnnnnnnnnnnnnnnnnnnnnnnnnnnnnnnnnnnnnnnnnnnnnnnnnnnnnnnnnnnnnnnnnnnnnnnnnnnnnnnnnnnnnnnnnnnnnnnnnnnnnnnnnnnnnnnnnnnnnnnnnnnnnnnnnnnnnnnnnnnnnnnnnnnnnnnnnnnnnnnnnnnnnnnnnnnnnnnnnnnnnnnnnnnnnnnnnnnnnnnnnnnnnnnnnnnnnnnnnnnnnnnnnnnnnnnnnnnnnnnnnnnnnnnnnnnnnnnnnnnnnnnnnnnnnnnnnnnnnnnnnnnnnnnnnnnnnnnnnnnnnnnnnnnnnnnnnnnnnnnnnnnnnnnnnnnnnnnnnnnnnnnnnnnnnnnnnnnnnnnnnnnnnnnnnnnnnnnnnnnnnnnnnnnnnnnnnnnnnnnnnnnnnnnnnnnnnnnnnnnnnnnnnnnnnnnnnnnnnnnnnnnnnnnnnnnnnnnnnnnnnnnnnnnnnnnnnnnnnnnnnnnnnnnnnnnnnnnnnnnnnnnnnnnnnnnnnnnnnnnnnnnnnnnnnnnnnnnnnnnnnnnnnnnnnnnnnnnnnnnnnnnnnnnnnnnnnnnnnnnnnnnnnnnnnnnnnnnnnnnnnnnnnnnnnnnnnnnnnnnnnnnnnnnnnnnnnnnnnnnnnnnnnnnnnnnnnnnnnnnnnnnnnnnnnnnnnnnnnnnnnnnnnnnnnnnnnnnnnnnnnnnnnnnnnnnnnnnnnnnnnnnnnnnnnnnnnnnnnnnnnnnnnnnnnnnnnnnnnnnnnnnnnnnnnnnnnnnnnnnnnnnnnnnnnnnnnnnnnnnnnnnnnnnnnnnnnnnnnnnnnnnnnnnnnnnnnnnnnnnnnnnnnnnnnnnnnnnnnnnnnnnnnnnnnnnnnnnnnnnnnnnnnnnnnnnnnnnnnnnnnnnnnnnnnnnnnnnnnnnnnnnnnnnnnnnnnnnnnnnnnnnnnnnnnnnnnnnnnnnnnnnnnnnnnnnnnnnnnnnnnnnnnnnnnnnnnnnnnnnnnnnnnnnnnnnnnnnnnnnnnnnnnnnnnnnnnnnnnnnnnnnnnnnnnnnnnnnnnnnnnnnnnnnnnnnnnnnnnnnnnnnnnnnnnnnnnnnnnnnnnnnnnnnnnnnnnnnnnnnnnnnnnnnnnnnnnnnnnnnnnnnnnnnnnnnnnnnnnnnnnnnnnnnnnnnnnnnnnnnnnnnnnnnnnnnnnnnnnnnnnnnnnnnnnnnnnnnnnnnnnnnnnnnnnnnnnnnnnnnnnnnnnnnnnnnnnnnnnnnnnnnnnnnnnnnnnnnnnnnnnnnnnnnnnnnnnnnnnnnnnnnnnnnnnnnnnnnnnnnnnnnnnnnnnnnnnnnnnnnnnnnnnnnnnnnnnnnnnnnnnnnnnnnnnnnnnnnnnnnnnnnnnnnnnnnnnnnnnnttttctttttgttgcgacggagttctcactctgtcacccagggctggagtgcagtggcgcgatctcggttcactgcaggctccgccttccgggtttatgccattctcctgcctcagccttcctagtagctggcactacaggcgcccgccaccacgcctggctaattgttttgtatttttagtagagacggggtttcatcgtgttagccaggatggtctcaatctcctgaccttgtaatccgcccgcctcggcctcccaaagtgccgggattacaggtgtgagcggcagcgcccggcgtacttttgtatttcatgctaaatctgtttcaggtctaggtaaagttaaatccttttcctgtaatctggattttcgagttccccagtggggacatgggtccggaggcaggtttttcccctctcacgctttgggaacgcacagtttttcacytgtctggtggagtttgcagtggcccctcccttctttaaaaggatctgtgaattctttcgattttctgggtattctcctgcagtggttcctttcttgagggatctgtgaagtgagttcctcaagatatttcttgtcaggtgaacagtctgtggtctctgcagggcctgtaccacccctgggcactgtatgccccacagagtgggcctctcctgtgcagggcctgggaagaggttgattataatctggtgtctgaggcctggcagcaccacactctcttcagtgagtcaggctcaagtctgagcacatctgcagagcttatgtttgctgtgttgctcatgkaaggcagggaatccaaaattgttttcttagagatggactctcactatgtttcctaggctgctttcaaactcctggcctcaagtgatcctcctgtctcggcctctcaaatcactgagattacaggtatgggccactgtgcccagcctattatcgattttctcccatttcattcagtcctcaacccaatgyactctctctttttctttccctcatctctgatgctcctctcagggtggcaactaatgacttttatacaactcaagccagtggtcactgttctgtttctgtcttatgtgtgtcattagtgtgtttgagatgcmycctctcctctttcctggaagttttctcctgtctsttgtcttttatgaacccrcttcctctctgttttcctaccamtttctagtcctctgcttttcagcctctttcttcatgtctgtgtttgtctggatgcaggagcacacactcagatccctgctatcctgactttgtgtacttttcttgagtgacctgacccaaaattagaacttcacccaccatgagcctccttccagtttatgtcactaacctaatgtagcatgacactcatccatttatttcactgccttcaaatcaactgtatgttttcccctagaagtttaaattcagtatgtctcaaacagaaaattttaccttctctcaatcacttaattatcacctttgcagkcacggatgccacaattctccacgttgcgtggttattctcgacttcttcatatccctacttctggcaygtgatttagtgattcctgtggcctctcatgtcattactgccatcaaatccatctgctgtcctcctcaccccatgttcctgccctggcctacgccttcattacttccyaccagagggcttaaaagtgctactggtcttgccttgagtccmgcctcctccagcccatccttcctacaggtgccccatccaaacacaaatctgaccgtgttactctcctgcttaagatacttcacaacttcctrtgtcctgtgggataaaatgcraacacttgccatcagcacacaaggcaggttacagtgctgcctggcccacatctcccctggcttcagtcacactgaagaactgcagttctccttgcaacttcatgcctctctgctcctgagcctgcttctcctgctggaaatgccatttcccctttctctgttttgctatctgcaggtgaacactgtccctaggaacctttcctaaatcgtattttaattttgctcctgagtagctcttgtgtataccttgtgatactcagtggtgatcaaaccacacatgtagcaatcatcttttctttgtctgttttattcttgaatttcaagtagattaaggacaaagttcccatctttagagtttcatccttattacctagagagtgaaagttcacaaaaagcatttattaactgaatgaaaattaacatttgaagtgtggaatttgcttcaaaatgtgccaacctttagttttcagattttgtaaatataataaatacaaagtracctaagctgaaccaattacakctgtgtagcccagtctatacaccrtgtatttttctttttcctttgggattcatttctgtaggtgagtaatcctctagaccctaaactcagtgrgggaccctcaccatccgtgtgcggcactgaacctgctgtcacactatgcatctaagtagaggactggttctccccrtgctgggctgggaggggaaatcctcacttagggaccaccaaccatgcagtgtcatttggcttcacttcctcttccaggccgaaccctaaactctctgtaattcactgtaataataattcactttttgttatcaaccagttgctgcttcttatgtatcaggtaaagctaagatactatcccrtaggtctttcaaatgccaacaacttgtatttccaggtgaaactacacttgaaaactacactccwcaagacaattttgtgaatgttatgtgaatgataatacttttaaatttactctgcctaaaatgtaagtgttgtggataaaattatagaaggtatcatttttcttctaaaagtaagaatgtaacttgaagtctataaatgtcactaagactctggaggtattttcatgtccttcacgattttgttccactctgaaatatttattccatccttccacttccctgccttgctttatggctatatcagtaatttttaatgtattgtcctgtagggtttctgagatcctacaggaatgaggtaggaggactactcaatattgtttctaccaggagttgtgtgacttggacaagttactttacctctggggtcagttccctactatggaaaataagttcttctacatgggggtgtgaagattcaatgagtaagtttagcacatagtaagtgcccaataaatattatcttactgtattcagcattaccattatcatagacggatgttaagtcttcagggacaagggaaacaacctatatcgtccatgggtcatttctgtctttgtttcttctcactccttttcttttctttcatttgcatttctcattttctgtgttattccttcatgttcccaataaccttcctgttacctgtttgcttcctgcattctgtgtagcatcctacrtattcacccattctccatcttctccttcatgcagcagaccatgtgtcaacatatgcrgagtttgtgcagacgcacagamcctctggggagtatatgtttgaatttgatgaggaggagcagttctacgtgaacctggatgagaaggagatggtctggcctctaccagagtttattcacacytttgactttggtgctcagaggggtattgctggcatcgtcatggcaaggaagcacttgaacacccrgatcaatggtccaaacagacttgggccacaaatggcactgcctatagctgcctgttcctctcagaggggtattgctggcatcgtcatggcaaggaagcacttgaacacccggatcaatggtccaaacagacttgggccacaaatggcactgcctatagctgcctgttcctctagagtccagctggagggatgggagggcctctctgccacacatagaactagaggccatgatgcccactcatgaatgagccccttccctgagagcgagaaatcttrggtccacacagctgggttcttaggacagcagaggaggaggcattttcttcttactcaagagaaaggctgggctgagggggccaggtcaggagcacgagaagctgtgaccctgtccaggagccctaggggagcaggaggatgggcctgggagaggtggcccctaatctggtgaatataggacttggggtggtggaacctttaagaatcagccaatggcagtaggctccttgggttctatccccttttggagcccccaccgaggtaagcgtctttcccaaggagcctgtggatctgggccagcccaacaccytcgtctgccatgttgacaagttcttcccaccagtgctgaacatcacgtggctgygcaatggggagccagtcattgagggtattgcagagaccatcttcctgcccagcaagaaactcagattmcacaggttccactatctgaccctcgttcccatggccgaggacacctgtgacctccagggggagcactggggcctgcaccagcctctcctcaggcactggggtatggagcgccctccctctgccctcacggccttggcaccacctttatttcctgggcccatcgcccctcagcacctgccttcctcaatcccatgttttayggtcactttatccaaatttcaccatctcatggtttcgaatacccaacacctcccacatccaaggccagcccctgctctctgtaccttataactctgtcttcccttggtgccccagaggtccatgaamtaatccaggtgcctgagaccatggagatgctggtctgtgccctsggcctgctggtgggcctggcgggggtccttaatggcaccattgtctcaaagaccaagcgatctgacagcatccccgggtccaggggctcctatgagtcatcctataggtgtattagggacagagtggaaaagacgaggtaacaagttaggggtgaagagtgggaaagagaaacacttcaccaggggctctttgagcattactnnnnnnnnnnnnnnnnnnnnnnnnnnnnnnnnnnnnnnnnnnnnnnnnnnnnnnnnnnnnnnnnnnnnnnnnnnnnnnnnnnnnnnnnnnnnnnnnnnnnnnnnnnnnnnnnnnnnnnnnnnnnnnnnnnnnnnnnnnnnnnnnnnnnnnnnnnnnnnnnnnnnnnnnnnnnnnnnnnnnnnnnnnnnnnnnnnnnnnnnnnnnnnnnnnnnnnnnnnnnnnnnnnnnnnnnnnnnnnnnnnnnnnnnnnnnnnnnnnnnnnnnnnnnnnnnnnnnnnnnnnnnnnnnnnnnnnnnnnnnnnnnnnnnnnnnnnnnnnnnnnnnnnnnnnnnnnnnnnnnnnnnnnnnnnnnnnnnnnnnnnnnnnnnnnnnnnnnnnnnnnnnnnnnnnnnnnnnnnnnnnnnnnnnnnnnnnnnnnnnnnnnnnnnnnnnnnnnnnnnnnnnnnnnnnnnnnnnnnnnnnnnnnnnnnnnnnnnnnnnnnnnnnnnnnnnnnnnnnnnnnnnnnnnnnnnnnnnnnnnnnnnnnnnnnnnnnnnnnnnnnnnnnnnnnnnnnnnnnnnnnnnnnnnnnnnnnnnnnnnnnnnnnnnnnnnnnnnnnnnnnnnnnnnnnnnnnnnnnnnnnnnnnnnnnnnnnnnnnnnnnnnnnnnnnnnnnnnnnnnnnnnnnnnnnnnnnnnnnnnnnnnnnnnnnnnnnnnnnnnnnnnnnnnnnnnnnnnnnnnnnnnnnnnnnnnnnnnnnnnnnnnnnnnnnnnnnnnnnnnnnnnnnnnnnnnnnnnnnnnnnnnnnnnnnnnnnnnnnnnnnnnnnnnnnnnnnnnnnnnnnnnnnnnnnnnnnnnnnnnnnnnnnnnnnnnnnnnnnnnnnnnnnnnnnnnnnnnnnnnnnnnnnnnnnnnnnnnnnnnnnnnnnnnnnnnnnnnnnnnnnnnnnnnnnnnnnnnnnnnnnnnnnnnnnnnnnnnnnnnnnnnnnnnnnnnnnnnnnnnnnnnnnnnnnnnnnnnnnnnnnnnnnnnnnnnnnnnnnnnnnnnnnnnnnnnnnnnnnnnnnnnnnnnnnnnnnnnnnnnnnnnnnnnnnnnnnnnnnnnnnnnnnnnnnnnnnnnnnnnnnnnnnnnnnnnnnnnnnnnnnnctgcactgcatccttccttagaaatcccagagtttcataaacacctgcatatgtcagagtgagacacatctgataccttctttctgtgactccagggacattcctcatctcctgacaccctcagttccctaggagcacatatcctgttcctgtaatgtgggtgcagatacctcagcttctgatcctgacaagtgttagtccagagattgttcactccactcggggtactgccctaacctgtaacatgagtacaggagacaagcaggaaagagaatgactctgactggatatggtttgtaatttgtaatgttaactgctcagtgactctgagggtaggatttatgtgctctgggtctgaggatttcataatgatctcgatttgaagactttctgctattctcatgacctccttccatcgttgaatccctggattgaaatcatattaattttatgctgcataggtttctcacaagtttcctgtgaagccaaaagggaaaataagacagataaagggtccttatttactatatactgtcttccttagcttattatgtgacagctgaaattactacgcaaaaacaagtcagcagcattttcctttatagtttttgaggaaatgaggctgatcagggataaagatgttttaaaaagaaaaaatgattgtgtcctattccctaggttaagaagattatgagaaacatgattggttgtccttgtgtgtggcttctctttcctgactccctgactcagtccagcctctctgcagactccagctgtatttacttatatctgtgccagtgacgcccaagtctgtgccttcagccccacctctcctgaaattggaggaagccggtcccccgatggaagatattatttgcaaggggagatgggcaagaggagcacagtagctttcgggaattgaccagggacaggtgcccagggacacacaaggcccagaagatgcttgtaagaagccagggagactgaaggcatcaactggatgtataagagagctgctgtgcactgattgtgtgtatcaggagtgaagaatccatcctctacacgaaaaagaaagcttacaacaaacatgtcctctaccttgaccaaaaggtgtcaatatgagacgcaaaacacataacaatgttggattgttaagaaaaaaaaaaagaccagtgtttgaaaaagagtgctacatgtattgctttgctctttccccagtggggagtcatttctgtctgtatgaaaattaagacaggaggcctaggctggtggatgaatgcagacttagacgacaaatgacgtctattggatgcattcaaaagtccaagccgtatttggttaaggagtatttgtgatggcacacaaagaaaatggttaaagtgtattagattatatttatgattttaaattctgatgttcatttaacttcttaatggtaatgataaaacatgctctcagtaaggtatatgttgaattagtgctgtgggaatatgggtcctatcaggcagatttgcagtctgctcaccattgaatagttaagaatagtggtctgagacataaatggatgagggcactaaacttgatttgggggcagctcactgaaatacagtcaattcagaagagtgtcatgtgtaacaggccccattatacaatagttaacatatccccattttcatggttctcttctttcctatgtttaaaccaaaatgaacttctttattaactcctactgtctactaaaaccctcagagaaaagtgatgagagatgatttggtgcatatttttaaaggaaaacaaacagtcatgttgggttttgattatttgtggtgctaagaagaagggaacatggttggaggcccagtgagagaaacagtgctttgaatcaaagagcagaatgatagaaactgacttcagagcaacttcttggcagcagtatccaatttggaagttgaaggtctgtcctggagccagatgctaacgaaacacagcaaatgcttttcctaaggcacaatagtcttttcagtgagctcaggaaccctgtgggggtaaaagacaagttatcccaggttgccagcctccttcctgtaagtccaggagagaaaaattatggtgagaggatgcgtctcaggctgataaataacagagttgatctctgcttccttcagcaatggagccaagcaatgctctttccccacttgcctgaaggctgacattgaaagaggggttcatgcctgagattcccttcctggaggagcctcagtgttacaatgcacagaaaggactcatatcctcctgcaacccaccccacaaggaaatcaaagcaggaatattacctgtttatgcagatcctcgttgaactgaaatgaaagacgaaaggttatataatcagccattgaaaccacctcagataattagagaaacatttccatcccaccaaattccattgcccatcactcaatggacgctccgcaggagcctgagtacttgggacctcatgcatctggctgcattaagatcccagcctgggatccctctctcgctataggtcatgtttgttccccgattatctgatatcagtggcctctagagctttctgacatttcttttctgtcaaacccctcatcgtggaataagtgtgaatatgccaggggaaggtaagtcccgctcaccctgcaggctttctcacctttcttgctcctcctgtgcatgaagatgcccactccacagatgatgagccccagcacgaagcccccagctcccgtcaatgtcttactccgggcagaatcagactgtgcctctgggaaggacagacccaggtttagtgtcacctccaccagctgcatccctactcatgtcctgtctgagattctggagcctgatgcagcatatcgggatgaggacagtgcagcggaaaaagcttgctaagaggaaattcagaaagagccaccctcatatctggaacaggggtgtgacctcaacaaggtggcaaatgctgattctggaagttgcctctcaaaatgcctgagaagaggctaaaatgctgaaggaagagaactgttcctatgtgtgaggtcagttcctaagtgtgagggtttcgagaccagtcagtgtccctagattctctgacaagggggagaactatgaatcttcaggaacccctaagccaaggnnnnnnnnnnnnnnnnnnnnattaacaaatgtaatgagaaatgacattcattgagttgcttactatgttctaggcactattctaagtgcttctcatgtgttcacttatttacatctggaggttggttcttatttatttcatgttacagagcaggaatcagacaccgggagaggtgaagaccacacagcttcaaagtgcaaagcttggatttaaacccaggctttgggcctgcagtggctgcagtcttgtccagtatttagattatttcatctgcagtcactatctgtcttcctacattttacacagccttaattttcttctgcccgcagagtgatgttcagaacttccaatgctatgttaaacatttccagcaacgaaggacatcctatcttttgcacaatctcaaaggcaatccacctcatttctttgaaatatatatgctatagatttttggttcactacctttaacatgtcatgaaattgattaaattctgtctatgtcttgagctgaattcagtttaaattaatatgaattttgcggagtccactaatgtgttaaccacattatatattttctgacactgaagaatcattgcattcctagaataaatctaaaattggtcaaaacgtattgtttttataatgtactgttggattcagtgacatggctaaaattagtccacaatcctgttctcctgtactattcttagctggctctggaaatataaatgaaccaacctcataaaatgatctcaaaaattctgttccattctatgttctagaatcacacgtgtaagaggcatgatctgctcctggaaatgtgggaggacgccctcatctgcaataagatcaggacagggccctttggaaggcgattctttgcttcccatgacaatttctttgatattctctactctattttagttttctatttcttcctgtagttttgacctttatatctttctagaaacgtatccgttttatctaaattttcaaatttatatgtatagagttggtcgtaagattttgcattttaaaatgtgtataaatgtcatttacccttttcgttctgaatctcctgtattttccttaggagtcttgccagaggtctcattaaagttttcattgcctcaaaatttgattttatcttctctatttttatatttcattgaattcagcttttgtccttattatttacatgtattttctttttgctgtttttctgcttttccatcctcttaattcacataattagctcatttgtttacagtcattttactctaacaaaattgtttaacagtctgacattctatgcagcattttgaatgaacttatttcatctttctataaagactaaacatctattatgttttcagttatttcctcttcctccactatttccctgactttctagacgtctaattattaagatgtcagatgtctgtttctatccttcatttctcttcacttgtcctttacattttctattgtttactcgatcatattgtccttgggacagtttctcagtttggctttttgtttattaattacacttcagttgcaaaagtcctatttcttgtctcatttattatgtttctta

SEQ ID NO: 8898 - DNA, 16726 bp, Homo sapiens
tccaccccctacctcccaggttcaagagattctcctgcctcagcctcccatacagctgtgaccacaggttcccgctatcatgcctggctaatttttgtatttttagtagagacaagctttcaccatgttggccaggctggtctcgaactcctgacctcaaatgatccacctacctcagcctcccaaagtgctgggattacagatgtgagccaccgcgcccggcaataacagttcttttcaaagggtaaggtttgaatccaggtcttagaacagtgcctggcatataactaaataagggttatctctgattattattcctcaagctcagtttggtgaaccagatagatccacaaatgaataattatacaaacagtgaaatgcagttgagacaaatgcttctaagaactatagagtcctgagagggcataggaaggaggctgggggatgacctggcctggagagggcgttgggtcttttgggaagggatgtttgccatgagaatgggtaggaactggcctggcaaaatggagcaggaggaagagtattcccagccaagggagcaacacagggcaaggctatggccagggaaggggtcccagaggtttgagaggggtacggaaggtttagcaagggccaaggagtgtgggctttgttatagggacactggggaggcacagagaggggttaagcagggcaggagcatgattaaatctgtgtttttcttttcttttcttttttttctttctttttttttttttttgagacggagtctcgctgtatcgcccaggctggcgtacagtggcgcgatctcggctcactgcaaactctgcctcccgagttcacgccattctcctgcctcagcctcccaagtagctgggactacaggcgcccgccaccacgcccagctaactttttgtatttttagtagagacggggtttcactgtgttagccaggatggtctcaatctcctgacctcacgatccacctgccttggcctcccaaagtgctgggattacaggtgtgagccaccgcacctggcctgtgtttttcttttctgtttgttttgagacagaatctcgctctgtcatccaggctggagtgcagtggtgcgatctcggctcactgcaacctccgcctctcggtttcaagtgatcctcctgtctcaacctcccaagtagtaggattacaggtatgtaccaccatacccagctaatttttgtatttttagtagagatgaggtttccctgttggacaagctgggctcgaacttctgacctcaaatgatctgcctgcctcggcctcccaaagtgctgggattacaggtgcgagttaccacgcccggccgggaaggcctctttgaaggggtgacattggagtggacacctgagtgaagagtgggagccagccaggaagatatctatgaaaagcatattcttttttttttttttaagagacaaggtctctgtcacccaggctagaatacagtggcacgatcatggctcactgcagtctcaaactcctagactcaagccatcctcccctctcagcctcccaagtagcatgccactactcccagataatttttttttttttttgagatggagtctcgctctgttgcccaggctggagtgcagtggtgcaactttggctcactgcaacctccgcctcccgggttcaagcaattctctgcttcagcctcccgagtagctggggttacaggtgtgcaccaccaagcctggctaatttttgtgtttttggtagagatggggtttcatcatgttggccaggctggtcttgaactcctgaccttgtgatccacccacctcaacctcccaaagtgctgggattccaagtgtgagccacggagcctggccagaaaagcacattctatccaaagcaaacagcaagtgcagatgccctgaggtgggagcaagctctgcgggtttgaggaacccagaggaggtgggggtggctacagcagagtgagcaagaggtgaggggtgggagatgaggctggagaggtaacagggcacagctcgtgggccaatataaggactctggattatggctggaatgaggcgggagccctgggagggtttgggggagaggaaagagaatctgacatctagaaggtaaaaagatccctgtgatgaccaggcgcggtggctcacgcctgtaatcccagcactttgagaggccgaggtgggcagatcacctgaggttgggaggagaattgcttgaacccagtaggcagaggttgcggggagccaagatctcgccatgtgcactccatcctggggaacaagagcgaaactccgtctcaaaaaaaaaaaaaagatccctgtggctctgtgcgtggagtagagtgggaagacgagagggatgacaaatgtccaggcaagggagggtgggggcttgggaaaaggtggaggtagcccactaccctccccgactcctgctcctcacctgttttttggccctgctcagctccaggtcaagtgcttgggccagctccagcagcagggcacagggcacagccgaatccgtggcccctacaaagggggtcgatccgggtgggaagagcttcgagtcataatggcaggcaagggtgaggtgacgggcagcccttgggtccagtgtggccaccacattgccaaagtccactggccccaggggtgttgaggctgtgaagggatccagctccacgtgccaacctgctgtcagggaccgcagcgtggcctccaggaactagcggcaagagagaggtgggagggtggacggggactggggaggaggtggggagaagggccacgtgacctgagccatgcagagcagatgggttgacactaaagccccactctgattgaatggatttctttctttctttctttttttttttgagatggagtcttgctctgtcacccaggctggagtgcagtggcttgatcttggctcactgcaacctctgcctcctggcttcaagtgattctcctgactcagcctcctgagtagctggggttacaggcgccccctacaacgcctggctattttttgtatttttagtagagatggggtttcacaatgttggccagcctggtattcgaactcctgacctcaagtgatctgcctgcttcagcatcccaaagtgttgggattacagatgtgagccactgtgcccagccccctactctgattaaaatcattcccttgacagtgctggtgagtacctactgggtgccagatgttggggagaccccacctcttgaagccagcaagactcatcacagcttacccttaaatagctctcactgtgtgctaagccctcttctaggaaccatttaggggagggactgccaatacatgaccccattttacagatgaggaaatgggctcagagaggttaagaaactagtccaggccgggcgcggtggctcacgcctgtaatcccagcactttgggaggctgaggtgggcggatcataaggtcaggagtttgagaccagcctggccaatatggtgaaaccccgtctcactaaaaatacaaaaaattagccaggcatggtggtgcacacctgtaatcccagctactcaggaggctgaagcatgagatttgcttgaacctgggaggtggaggttgcagtgagccgagatcgcgccactgcactccaacccaggcgacagtgtgagactccatctcaaaataaaataaaataaaataaaataaaaaagaaaccagtccaaggtcacaatctaagtggatgaggtagcattgggactcaggcagtatttaagtgactttttttttttgagatggagtctcgctctgtcacccatgctggggtgcagtggcgcaatctcagctcactgcagtctccgcctcctgggttcaagtgattctcgtgcctcagcctcccaagtagctgggactacgggtacccaccaccacgcctggctaattttgtatttttagtagagatgaggtttcaccatgttggccaggctggtctcaaactcctgatctcaagggatctgcctgtctcggcctcccaaagtgctgggattagaggtgtgaaccactgcgcctggcctttaaatgactcttcatgctttctggaagacaacagatacattacagcaccagctcggagccaacctgtttgggttcaactctaggtctatgattttctaaacattgggtctcactaggttgactaggctagtctcaaacttctcaggtgattcttccaccttggcttcccaaagtgctgggattacaggcatgagccactgcacccggctaaggtctactacttattatctgtaggatttgtgcaatgtgtataacctctctgagcctcagtttccccatctgcataatgaagatcatattggtacccaccttatagggctgtctgttgcctatgcctagcacacagtaagcttttggtgggggcattaaggggggcagtacagcctggtggtttgttaccagcatggagtctagagtccgattaactccagtcagagccccagttcctcctcttagcttctttgggatcttgaacaggattcttatttcccattccctggagggctagggggtcagggactggaggtgggtccctttacctttctgacttggagatttcccgggctgcccggggttcgcacaaccagcagggggcgcagataagtgctccagagacgctgtggatccagttgtcccaccaccctccgcagccgggcttcggggaggcttccgatcaatgggaccttgggaaggaggtgggatagggaagggaagaatgagagcaacccccccatttcaaccctaccccgggcgccgtcacccgcgaggagccccgggttctcttcctaatctgccgcctccagcatcggagacttctaggataaatccaaggctcaggaaaagtccttccaagaccatccggtccagcctacctcaaacttgatggggaaatcgaggcccagtgagagagaggggagatggaggaagggactcttccaaatagttgactaaaggcgtagaaccctgaacccccccgtcttactatttcagacctttcctcttaaaaggaagctactgttgcagaaccagcccgaagccttattcctttggtaagggtcatgcgctcagatgacgaagacggtggcatctgcggttagggccgtacgctaaagccacgtcaaccctgggtaacagcggggagggaatgagggtccccgcggtgcccgggtccccgcccagcctcacccgcagctcccggcccagcggcagctcctcagtcctgcggtgccagccgctccaaatggtgtagaacgccgagcccacggccagcgccagcaacagaggcaagagccgaacccgcggtagcaggcggcgcttcggcggcaagagtggctccatgaggccacgttcccccagccgcaggcggggtcgcccgcggcccccggaacgcatggccgctttgccctgaaacctgtaccagaccacggattgagtttaggcccagccaagttcctccccatggaatcggtgggccaataagcaacagctgcggctgcaccagcccaccccacagcgagcagcgaaaccaataagaactacggtcctgaggacacgcctcccagcctcccttaggtattggggttggttcccctgagaatggcacgacccaaatgggagcgcaagagaagtaggctccgccttagcggaggagggaaagccaatgaacagcgtttgatcatggaaaatattcgatctcccgggcgcaggtccatgccccttccggatgtaggcaggggattggtggcgcagggtcggaaagatcagtagatacgtcagtaacgcgtcccagagggaagaggggcggtgcctgtctccgaagcgaggagcggattggcttcacggaggccgcgcccccgaagtcacggccggcgggcatttggaaatagcttgtcatttccctccttcaacctgtaccattcttcaagaaacggtttgaatcagaccgcctttccttttgtcttcattgtcataaacatctgcccccgtgtggttctgactggccgcgaacccctacccgaagcttttattccatcattgtgcaccgttggtggggaatgctgtggcaacaggccacgcctccacttactggttggctttgcgcaggcgccaacggaagtgggtcgcaggaagaggaagtcccgcctctctctcctcaggcagcagcaacgcggaggaaacgggagtgaacggagagcgtagtgaccatcatgtgaggccgggctaggcttaggcggcgggaatgaggttgagggtggatatttgaccgattgagtgtgggaagggttgagcagagcggggggggcaggggcagatgttttagggatgcagcgtcctgcttttctcctgatgagtttgagaacgggcgtggggcctttgacgcatcgtgacttcgggagaggggacagctttatcagataacgccctgggctgggcgcgggggctcattcctgtgatcccagcactttagtaggccaaggcggagcatcgctggaacacaggagttcgagactagcctaggcaacatagcgagacccccgtctctacaaaaaaaaaaaaaaaatttaattatgaaaaacatgttttaaacgataacgggagtggtcctagataattagtcctattgaaatgaatgttaaggggcagcgattttacgaatactgggggaggccgagcgcggtggctcaggtttgtaaatcccagcactttgggaggccgaggcgggcggatcacctgaggtcaggagtttgagaccagcctggccattgtggtgaaaccccgtctctaacaaaaatacaaaaattagccggccgtagtggcgggcgcctgtaattgcagctattcgggaggctgaggccggaggatcgcttgaacccgggaggcggaggttgcagtgagccgagattgcgccactgcacttccagcctgagcgacagagtaagactccatctcaaaacgaaacaaaagaaataaaacgaataatgggggagggaagttaggacttttagaaataattatttgaaataagggacttatcttgatcatttgagctggagacgggtgcgttttcgacttgattcacaacttacacggataacgaacgagtcattgacatgattttgcgcatttattagtgcagcagatattacattgaatgcttatgtatcagacactgcttaagctacataggatacatcagtgaatgaaacctctagtccccaagggaaaagaaaaatctttttctctttttctttttttttttttttttgagacggagccttgctctgttgctcaggctgtagtgcaatggtgcgatctcagctcactgcaacctccgccgcctgagttgaagcgattctcctgcctcagcctcccgagtagctaggattacaggcacccaccaccatgcccagctaactttcgtatttttagtagagaccaggtttcaccatgttggccaagctggtctcaaactcctgacctcaaatgatccacccgcctcgaccttccaaagtgctgggattacaggtgtgagccaccgtgtctggtcggggttttactttctacactgagatggggggaggatgggagggttttcttttgttttgtttgtttgagatggagtctcgctctgtcacccagattggagtgtagtagcacgagctctgtctcctgggttcaagcgatcttcctgcctcagccttcaaagtagctaggattacaagcatgcgccaccatgcccagctaatttttttttttttttttttttttgagacggagtctcgctgtcgcccaggctggagtgcagtggcgcaatctcggctcactgcagcctccgccccctggggttcacgccattctcctgcctcagcctcccgagtagctgggactacaggcgcccgccacctcgcccggctaattttttgtattttcagtagagacggggtttcaccgtgttagccaggatggtctcgatctcctgacctcgtgatccgcccgcctcggcctcccaaagtgctgggattacaggcgtgagccaccgcgcccggcctaattttttttttgagatggagtctcactctgtagcccaagctggagtgcagtggcgcaatcttggctcactgcaaccttcgctgctggggctcaagcgtttctgctgcctcagcctcccaagtagctgggactagagggatgcgccaccacacctggttaatttgtttgcatttttagaagagacagggtttcaccatcttgccctgggtggtctcgaactcctgagctcaggcgatccacctcgcgtcggcctcccaaagtgctgggattacaggcgtgagccatcgcatctggcctaatttttgtattttctaatttgtatttatttattttttgagacaagagtctcgctctgtcacccaggctggagtgcagtggcatgatctcacttcactgcaacctccgactctctgagttcaagcaattcttctactttaacctcccgagtagctgagattacaggcgtgcaccaccacgcctggctaattttctgttggttgttttttttattgttgttttgttttgttttgttttgtatttttagtagaaatggggtttcaccatgttggccaggctggtctcgaactcctcacatcaagtgatcaatccaccttgacctcctaaagtgctaggattacaggcatgagccactgtacccataccctgggagggttttgaagagtgacatgttatgatttaggttttagcacaaccccctcagaccactctgtggagaacagactgtcagggaacgtgggtggaggcagagagaccagaaagattccaggacagagatgacagaggcttaggccatggtaagaaacggccatttcctacagatttcatgtaggatgtgagggaaaaagaggaatcaagttgacaaaagagtttttgcccagagaactagaaggatggagttaccatcaaagcagatggggaacgctgtagatagggtaggcttgggtggttgggtgatctggatcccgacctgagacatgcagagttgaaaatgtctggctgggcacggtggctcacgcctataatctcagcactttgggaggtcgaggcgggtggatcacaaggtcaagaaatcaagaccatcctggccaacatggtgaaaccccctgtttactaaaatacaaaaattagctgggcgtggaggtggtgcatgcctgtagtcccagctcctcaggaggctgaggcaggagaatcgcttgaacccaggaggcagaggttgcagtgagccgagatcacaycactgcgctccagcctgggcaacagatcaagactccgtctcaaaaaaaaaaaaaatgtctgttaggcatctagctgatgatactcagaaggctgaacaggaggacagatgtggtgggacaaggttggggagacactgaagccaaggccctgatcacccatcctcacagctccagcctctcaactccagcctctctcacttattggttccatgtttgtccatrcaggagcctcctcaacaagcccaagagtgagatgaccccagaggagctgcagaagcgagaggagkaggaatttaacaccggtccactctctgtgctcacacagtcagtcaagaacaatacccaagtgctcatcaactgccgcaayaataagaaactcctgggccgcgtgaaggccttcgataggtgagtgctgggtcctgggaggtgttctccgcaggcctggagaggccactccagctccagtctgaagagctcaaagacagctgtctcagaagcctggggtgtatggccaggcgtggtggctcatgcctgtaatcccagcactttgggaaggcaaggcgggtagatcacctgaggtcaggagttcaagaccagcttagctaaaatggcgaaaccccatctctactaaaaatataaaagccaggcgtggtggtgcacgcctgtattcacagctactcaggtggccgaggcacaagaatagcctgaacccaggaggcggaggttgtggtgagctgaaatcgcaccactgcattgcagcctgggcaacagagtgagattctgtctcaaaaaagaaaatgataattttcaatggccctgtgaggaaggtaacgtsattatcttccctcttaaaaaggagcaaactggcacagagaggtgcagtcctttgcctcagcctcaacctaaggactggcagagttgctttggcagcttggtcatcccggcctagcacctgcacccttccccaagccatgctgctggagggggcgagcagcaggcagtagggggcactgtcagaggcacgccccycacgcccagtgcctcccctccctgttccccaccaggcactgcaacatggtgctggagaacgtgaaggagatgtggactgaggtacccaagrgtggcaagggcaagaagaagtccaagccagtcaacaaagaccgctacatctccaagatgttcctgcgcggggactcagtcatcgtggtcctgcggaacccgctcatcgccggcaagtaggggcmgcctgtctgttgacagaactcactcctctgtcctatgaagaccgctgccattggtgttgagaataataaagctctgtgtttttttctagtggtatctgtttccagagccttgggagtggggtggattcaggagggcttgggggaggcagctggtatcggactgaatggtgggagcaggacccctgagcaagtggagaggccctggctctgccccatcgaggcctcactttctccatctgcaaagcaaacagtttgcatggaaatgagcgcccagttgtggctctggagaacattttagctctcctgctttaatcttcctgagcttctccttgtcactctgttgctctcttctctacctcttataatgaattggcctcgcttgaccaaagtatcttttggggccaggcatggtggctcacacctgtaatcccagtactttgggaggtggaggcgggcagatcacctgaggtcaggaattcgagaccagcctggccaacatggtaaaacgctgtctctactaaaaatacaaaaactggctgggcgtggtgtctcacacctgtaatcccaacactttgggaggccaaggcgggtggatcacctgaggtcaggagtttgagatcagcctggccaacatggtgaaaccccgtctctactaaaaatacaaaaattaacagggcatggtggcaggcacctgtaatcccagctactcaggaggctggggcaggagaattgcttgaaccccggagatggaggttgcagtgagctgagatggccccactgtactgtagcctgggtgacagagtgagactccatctcaaaaattatatatgtgtatctttcagcctttctttatgtttgttccttcagcaaacatcccccaaatgccccctgtgtgtccagccctgtgttgcagtgcaggggcaccaggtacccaggagcctctggtctgccctgaaagacaggaggattagacaggtgatgaacgcagtcagtgccaccagcacagcggctgaggtgagagcattgcttaagcccagaagtttaggactagcctgggagaatggttgtgagttttatagacagtgtgatactatctctaaactaaatagataagaaacagaaaaaagggccgggtgcagtggctcacacctgtaatcccagcactttgggaggccaggcgggtggatcacctgagctcaggagtttgagaccagcctggccaacgtggtgaaaccctgtctctactaaaaatacaaaattagccaggcatggtggtgcacgcctgcggtcccagctacctgggaggctgaagcaggagaatagcttgaaccaagagacggatgttgcactgagctgagatcgcgccactgcactccagcctgggcaacagattctaagactacctctcaaaaaaaaggaaagaaaggaagaaagaaaagaaaagaaagcagtcagtagctaaatattactgctagtgatcctggctaacacttgctgagctgtttaggtgccaggccaggctcagcgcttttcaaacatcctcccaacagctctggcgcgggcctgttaatttattatcccccttttccagaagaaggaactgagacacagagaggcaatgtcactttgcggggacaaccagccaggaagtggtggtgctgtgatttaaactcacctccagagcctgtggcttcacccctgagctctgctgcccctcagattcaactgcattacccttgagaggaattctctgacaaatttggggagataaatggaggtgggaaagggaggtggtatatactggggggattaaggaaattccctgtgttgctctgacacacacatcgtgtgctccccatatctttgttttttgttgtttttttttttttttgagacagggtgtcattctgtctgccaagctggagtgcagcagcaccatcatggctcactgtagccttgactgcccaggctcaattgatcctcctgccggctttttgtagagatgggatttcactgtgttacccaggctgatcttgaactcctgggctcaagtgatcctcctgcctcggcctcccaaaatgctggaattacaggtgtgagccactgtgttgggccctccccccatatctttgtctctgcctatgtctctgtcctctggatataggcaaacacctgaaaggtgcaagagtttgcaggcctgaggtcagtgcacactcagtgagatgtgtgccctgctctgagctgtgaaaggcacagcctggggccgggcgtggtgcctcacgccctgtaatcccaacactttgggaggccaagacaggcggatcacgagatcaagagatcaagaccatcctggctaacatggtgaaactgtgtctctactaaaaatacaaacattagctgggtgtggtggtgcacgcctgtagtcacagctactcggaaggctgaggcgggagaatcgcttgaacctgggaggtgaaggttgcagtgagccgagatcgcaccactgcactccagcctggcaacagagtgagactccgtctcaaaaaaaaaaaaaagaaaaagaaaacaaaaaaaagaaaggcacagcctgagatacactgtgagcattgtggcagagctgggaccctgcagcagagagaggcctgatacacagaaggcaatgggttatggggttataaaggcgtgcatttactacatctaattggaaacaaccatctgtggggtggatactagagctatttttttttttttttttttttttgagaaggagtctcaccctgttgcccacaggctggagtgcagtggcaccatctctgctcactgcaacctccacctcccgggttcaaacagttcttcctcagcctcccaagtagctgggattacaggcgcccgccaccacgcccagctaatttttgtatttttagtagagacaggatttcaccatgttggccaggctagtctcaaactcctgatcttgtgatccacccgcctcggcctcccaaagtgctgggattacaggcgtgagccaccacgcccgacctaagtgatcccattttatagatgagatcgttgaagccaagagagggtaagcaacttgctcggggtcacccagttaggaaacaatggtactatttccaaacccggggagccaggtcctccagaaaaagtcttaactcttgggtagcaagatggagctgcagtgtcctaatctataaagttgggacaaggggcatgcaacaggaggtcacccggggtttggttctgatacaggaagcaacacagccctggagtcagtctgggttccattcctgcctgccttctcaggtgtggtattgacctgtaattactgggaaatggaaatcagtttccccaccttgcgggttggcacccaagattccagtcctggccgctctgctcagcttgtctgaatttccttcctcacctcctgccccacatgctttccaatgcgtccgcctccagagggtgaaataaaagtagaggtggcaggcatagccctgggcaaactggcccagcattgtccacacaccagcaccaggcacggtcctaagcgtcactcatgggcatgccaggcgaccctaggatgcaggtaacatctgatcgtatatgtcacagatcacatgtaacatggccacttggggactctcttaggagggacagtggcagcaggtgtcccgttttcttgtagcaacacatggataaatttgagtaaagccaccacgggcccctactccaccaggcagcctgcctcggtcatttccctttgtgacactgccaagaagatgcttctacccaagaaagaaaaaaagcaactgtttcttatactttatttacaagagccttgccctaaggcccccaccccgcgagaacccacaaggcagggtgtaggggaattgggcagcagggccgcaagcttgaaaaggctgagttcagctttggggcatgtcggtccagggagccacagaccccagggaaaatgctcgacaacacccatacggtaacttaagtgtgcatatgtgtagggggaggatttaggggtgagggtcttgtgggtgtatgtacaggtggtccagccacaatgagactgtcagcatgccccctcattctcccaggttccaggggccacccatctaaggacagtggggatatgcgtcctcactccgcagccagcagtggccctggctgctctggatataaagtttcagctgcgaggcctgccttgcctcacctgtgctccggtccacaccaaatcaccctctcaggacccagtgcctctcacattactatctccagctcgcccctctcctgagagctccagacccttacactcagtgtcctgtcatgtcctacaaacactgccagcctaacctttccaaagagcacacgtggttctccccctacccgaacccaatctctctatctttagtctctccaccatccaaagccaaggagtcctctctgctgctgtgtcctcatgtgctccttcatgaaatcctctcacctccaccttttaaacagcttcaaatccgactgcttcatacccctcagtggcctccatcctggtccagccaccatcacttcccacctgcagtcccctcctttctgggctccagcttccacccctgcccctgataatttgtcctcctacagggcagacaagaaggatctgtttaaaacattagcccatttgggccgggcatggtggcttatgcctgtaatcccagcactttgggaggctgaggtgggtggatcacttgaggtcaggagttcgagaccagcctggccaacatggagaaaccctatctctactgaaaatgcaaaaattagccaggcatggtggcggtgcctgtaatcccagctacccgggaggcttgaactcgggaggtggagggtgcagtgagctgaaattgcaccactgcactccagcctgggtgacagagtgagactccgtttaaaaaaaaaaaaaaaagccgggtgcggtggctcacgcctgtaatcccagcactttgagagacccgtggtgggaggattgcttgagcccaggagttcaagaccaacctgggtaagagtgacatcctcattttttaaaaaataaaatattacccccaagagacactcctaagaatctccaatgcacctgaaatgaaatcccaacttgggtgcccctgcccacttctctgtctctccccacctgttggctctgacttaattctactccagccaaggctgagcgccttcctgcccaagggcctttgcctatgctatcgcttccgcctagaatcctgttctccagctctccccaaagtgatctctttcacctctttcggggatggcttaagtgtcacctccttggagacgcctcccagaccaccctaggcccccttctcgcttcccttcataaccattccatagcgtgtgtggaacttgatgttttgtgttcacggtctgttttccccactcagttgtcatctccagaagggcagggaccttttttctgtttccttcaccatttccccagcgtcctccgtactgggcctggcacgcagttggcactcaataaatccatgctaactgaacagacacggggatcccgccccctagcagtaactttccaactcccggctggcctcattcccaggccctgggagggtccccgaggacaagccgcggctggtggggacctcgcccgggccggagccggagggcagggcccggaaggcgcgctccgggagctggcgttgctcctcgcccaggctgcggcgcaggcggcagtggtgccagccacggcggatctccgactgcacctgtgagacgatggcgctcagaggcggcgccgtaccccgcgctgccgccagagggcgggggcggcggccgggtctctgcctacctccttgttgatgaagcagtagaggacgctgaccaggaagccctgcccagaggaggcgcggaggttacatcgctggtgggggcaggactgtaaccgcctccgcgcctccctccccgttttttgtttgtttgtttgtttgtttgtttttaagagtcggaatattgctcttgttgcccaggcg

SEQ ID NO: 8899 - DNA, 43943 bp, Homo sapiens
  misc_feature (1)...(43943): n = A,T,C or G, or insertion/deletion polymorphism (see Tables 1-2)
aatgaacaaatgaattaattagtacatattctatgtgttagtgacaacatgattgttattgaataaattaataacatataccttatctacaccaggccctatgctagataaacactaaaaatatgaaaatgaaggcatagccctgccctcagcttcttcaatcttatcgtttggcacagtttcagccgggtttagagttttctcctcttgccaatcatcatacggctttccttattttcctgagagatacacatcctttcacatataaagtgtagtttaccatagcatacaagcacactgggaattttgcattacagattacgtactttctgaagtattaaacacatcatttctacaaagtgaagtggtgatacgtttaataaggttggagtaattttttaaaacagcccccataacatttatgatccagtttactagaaaattggcctactcaaaatattttgcacagtgaaacatttgtaatgaaaaaagaaactggcaattttttaaagctccttcctagatttaaagttttttttcactgctgtttgcacatttcagatcctgctgctgggggctctgacgactgggcttatgaccaaggaatcagatattccttcacctttgaacttcgagatacaggcagatatggctttctccttccagaatcccagatccgggctacctgcgaggagaccttcctggcaatcaagtatgttgccagctacgtcctggaacacctgtactagttgagaaagctgatggccttgtttcaaaattctcatttttcatttcttttctttcttgaattcttattttggtttgcctggatgttttgcagatcccaatctttcttttaagcttctgggtctattaaactaggtagatcttttcgtattgatcataataaaagtgaatcattactattggaaaacttgacatatggtctacttctttggggaaacactgatgtgaatgaatgactaagcaagccgtgcacagtgaggatccggtcagctgtataggagttaacatcctggggtgctggctgagaccatcagggtgtagatgcactgattatagtgggaggcttgtgagctaagaagaaatgtaaagggaaatttaggactgttaaacctggcatacatgaaaagacaccatctttcttggtctagctttcatctcagctcattaaagttattttatcggctgtctactacatgccatgcactttgctaagcaattgaagatggaacaatgaaaaagaaagataacatttctgcccttaatgggtgtataggccctttggaaagacagacattacacaaataattaactcattaattaacaatttattaattagtaatctaatttacattaatcaaataagtgctggatgaactacacaaaaagaacatacaaaaagtctacctgcttgatgtacgggagaagcctccctcagaaactgctgtaacctgagaaataagtcacagttagctagacaaagggagcaccgcttccaggcctgtggctatcccaaaagtataagaagaaagccagtgagggtgaaatttggagagctgaggaaagaggagcatgtgtacaggctggggagggtggtaggaaccatgtcaggcagagcttagaggtcacgttaaggactggggacactggtctaagaacaatgaaaatccattgaagatattaagtcatcaatgacatggttacagtgtttttggaacaccaactaggctagggtgtggaaagcagatcagaagtgagacaagaggataccagggaccctgactggaccacttggaccaatgaaagtggcaaaaatcactccagaacttgatgttttccgggattggaattggacatgctgtgttgggaagtattgtgccaagttcaaattttaaaatagaatgagatgtattaaagttacgatttgggggcatctcttacttaaaaatgatagactattaactcattactttctatagactttctgtagtctactttcatagactcttaacttattactttctatatggcttcaagaaaaatgagactccatatagggagggcatgatgtgctaaaatatctataacagtgttctattcataaagagaatccattgaagtaacaacggtttgtgaaagttgtcaagccaaagaataattaattgcattaattgtccactaggtggtagcagtgcagctgctacaatgtgtcacacactcatcttcaaactcatttagtaatacatcatttaaatagacagagaaccatatgtgaaaaaaaaaaatcccattaatttgtcagcaacattggtggtaatttaaaaatagatgtaatttagctaaatattcttcctcctactctttaagttatatccactttgtgtattggagggctaacatagccatagttacctgagtgaggtaatcttgctggaggtgtatcattaaactcctgttccacaggatactcccttgctatctctggcaagtaacaccaacccctgactaagggaagctgtggcccaaagtatggaaatcttggcaaaccacaaagaactctcctaattccctaaattgaatgctttaaaatagaaattaggaataatatatgtggactgcttttttaaaattccaaggaatttttaagggtaagaacaaagaataggaaagcaaatatgcaaatattcttatttgaaatcccatgtatctgagatgtcctgcacctgagaaatttttactatgaccactgtctactgaaagttaacaggaagctgggtagaatttccacttgcctgggcaaaaccaagaaaaacagaaagagaaatctgccttagtcttcactgtagtagtatctgaccagctaatcagagactgctgtgagtccacccagccttgcccacctgagagccccaggttggggggatacctcttcttctccctcttttatcccactcccaccctgagatcccagagcaggctctgagcctttccttcagctccaagctctcagctcccaaagcaacagtgaaccaacagcacaagagtagcccctgaatctttctttctcaagtggtgtgggtagaaaatagcaagactgattttctcatctggattatggaattcctacatacctagaatcatatgccatttgttcatcttattctgcaagctgacctatatgaattggtcaaagagagaatttctagaaggaaaagaaggcagaccatagcaagttaacatgttaatttgggggcaaaaagggttctgctgagtgataatgattaaaaatatatagagaaaagcatagctaaactatatggtgatattttaaatcatggctagacgtgcactactacaaataccatagaaagtgcagagctcaagaaagatggaaaattatggctgcatgaagtattcacctctaagtcactttttaaagaggttgatttaatctgtgaaacatcacagtcttacatagtcaatcctaaaatgatacggggtttgacaattattcatcctacccacacatatgccaagaccttttataaatcttgatgcagtaatataaggcagcactgatctatgcttgccaagaaatagcgcttgttctgagaaaaagctctagaacattattgaaatccatctattgtatttttcttcagaggctaaatagattggagaggcagtgggagtctcaaacacatcacatgtttatatcatattccagaaagaagaaattgccaatatgtaatctattaagaagccaaagatgtacttttatttattaacaaagtcttatcctgagaaataccaaagtcctcaaagcactcacctagattccccaaataaaataaaagtgttcttcctacttgacctgaaaaacagacatagaagctttctccacacaattttaaaaccagtcacagaggaaacagcttcaagaaaatataacagaattctaaaattaagaggatttctatttttcctctttcacctttcctgtattttccagaatcattttcaatgggcatttataatttttagaatcagaaaataaaactctaaaaagcaaagctataacattaaaaaaaattattgaagtagtccacatgaaaacaaatacagagacatattttatccctaaaggtcacggccaccactttaatctaccacatgatctattttgataccggttctgcaggctggcagtggcccactggaagtctctgttgacagcacatgaacattttatcaactgtctagagagcatggacgtgttttttagcacctaccacgaagtccctaacatatcctgtctcactaagcctcacagccacttgttagagtcacattagcattcccattttacaaatgaggaaaccaaggcccagaataactaggcagcctgctcaaggggatgtagctagcgtgtgggagccacattgaagtgatgtctgtcgaaacccaaagtcaaggtctttctttttcactgttccctggtcaaaagtatctttagtcaaaagcaatggagcaagcatttgctttgggagttctcagtgctggtgagcttgcccagtgtcaagaacatgaaggcatttgtaaaaccctcctcttccttacctgcaaggctggagccggaaaatccatttggggaaataaaaaaaagtcccgagttctaccacacacccatcagatagagaagaatggaattactgctgctgtatatataacaggggcgtgtctccaaccacactattttgatagtacataagcgtgactctgagaagttttatctacagtcagctatacgtttgtcaatgtgaagaggtggttttcaaaaaggaaattctaataagttaactgattagataaattcacttactcttttaggttacctatgattctaggtaaaggtgttattctcccataattaaccaagttgtgttcaagactaaacatccctccagagatggttgtgaatggtctataggtggctttcattaattcaactctcaaaaggcattatttggcaattacagcatccaggctctgaagacagtgtccaattaataaacattacagcattgatattttcttgctgtcaggtagttctcaagttgccttagaaataggggtcacctctgaggacagagagaagagaagggcaaagagttagggcagtgctttaggtctttagtgtttatttctttacccagagaagtacaggaaaaatataacaaaaatgttatcattgtaaaatctaaatggtgaacatttcaatgttcgccatagtacttacagcatttttagtacatttatattttgtaatttaaatttttggggttttttttgcctcccaagtagctgggattaaggcacctgccgccacgcccggctaatttttgtattttttagtagagacagggtttcaccacgttggccaggctggtcttgaactcctgacctcagatgatccacccgccgcggcctcccaaactgctgggattacaggcgtgagccaccgtgcccagtcaatttaaatgtttttaatttcacaacttacattctagcttcaaaaatatattttacattattacgaaccactcaccaagattttatggccagatacccaaattcatctcagtctccaagtgcaaattttaaaactaatttcttccatcattcaattcaagcagaatggtagagtagtattttagaacagatagaactagtaaatcccagctctgtgaacatactttctctgttaccttggccaagttatttgctaaaggcatttgcttcccatcctgtatctgtaaaatgggtatttcctattgcaaaaggtagataagtagcatgtgcttggtgggttagtgtttttccctctccagctggaaaaaaaaaacctggtgtgggggaagaaggggaacagtttgtgcaacagaaccctaagaggaaatcagctgctcatcaagataagggctgaggcataaaactgccagagggtctcaaggcaggcaaagaagaaccatgaggctcatcctgcctgtgggtttgattgctaccactcttgcaattgctcctgtccgctttgacaggkaaatcttacttcctgtgttccagtctctgtgtagaagagaattaaaggttgtttccttacagttcactttttttttttcatttgcctccrcaaagggagaaggtgttccgcgtgaagccccaggatgaaaaacaagcagacatcataaaggacttggccaaaaccaatgaggtaagcatttagagggatattttatcttttcttactgttctctaaaagatgcttcttcttattttactgtcaatgcccatgggactacaaaagactattgaacataaggggaaagcaggagctatctggataattcagccaatggccaatacttcacctgttctggktttggtcttggtttccaagactaccacttctgtttttcctcccaaaagcttttcaaacaccagctttttcaaggtaaaactatgaaatcaggagctgttcttggcctccttatcagggcatctttctcttgcctacgggtgccattccctctccattctccccactccgaccctcatctcctctggtgccataatttctcttgagtactaactgaaaacgttgaggcactggctaatatcaagatgtgaccctttccaagagcaggtacattttcaaataagacttttaaagttagatcaatcctttaaaatccaacagcctaatataattttatcatgtattcagctgctcctatttatgttgcaccagccaccttatatatgccatttcaaattctccagcagattctcaatgtcagggttataatgtaactcatttgaaacagaagagctaaagtgcaaagacaataaattaaatgaccaagattacacatcaaatttaaacccagaactgggtctgggatttattccagtcaaacatacagttacctctacatcaaatcaatcaaaggccctgcctattctaactcccaaatgtttctcaaatccacacattgccctccattccactgccactgccaagttcatgttcactctacctcttgcaaggagaatttccatagtcccttaactagcaatcagggctctagtcttgactcccacaaagccaactctgcattgcaacctgattgctcactctaaaacttgacaattgcattcctccgtttgagggtcattactaagaagcagcctagtacggaaaaagcattttcttcaaagtcaaacgcttacattcaaatccaagctctacgctagctctgtagccttaggcaacttactcaacatctctgggtctcaatttcttctgctataaaatggggataatagtcatagctacttcctagggttgctacaaagactaagtaagcgtttgatagcacttagaagcaggcctgccatattaagcaccatagaagcgttttttgtttgttattgtttttgttttgagacagagtctcactctgtcacccaggctggagtgcagtggcacaatctctgcagcctccgactcccaggttcaagcgattcacctgcctcagcctccctattagctgggattacaggtgcccaccaccatccccggctaatttttgtgtttttagtgaagacggggttttgccatgttgcccagctggtctcaaactcctgacctcaagtgatccacccgcctcagcctcccaaaatgctgggattacaggcatgagccaccatgcccagtcagaagcattttcttttggtattggtatagcattcaaagcgttttatgatctgccaaactaccagcctcttcaatatcctgctcctccaccttcttccacacccttcaagccccataaacaccaaaatctcacccaccttggccctgtacatcttttctcatgaaaatgtgtttctctcccttttgacctgggtaagtcctacttatttctcaagatccaactcaggcagtgtctcctgcaggacgtctcttctgttcatcaactctcgtgactcagttttggctgctccttgtgctcctggaatacccggttccttcctctggcattggttaacatgtgggaaacatgcatgtatgactctgtgttccacaccaaacctttcacatctcataagtcccttattagtctctacaactgtggcacccagctctttgcctcctgcttaatacatgaaagttcactaagctctaagctcctgctgcacattaccctgctagaacacagaaatgtctattgtgataagatggctctgcctaacttgcctttgcatcacactacatctctcatatgtccaactcatgatgtagctttttgatcaaaataaacattggttggttcatagcagcctcatattgtcacttgattgacctcgaggtagagggggactcaaccaagaaacagccaggcagacctgaacacatacacaagcaggggtggaaattgagcttttccttcacatttcccaggctggggacttgtacttcatttagtttcacaattgagtatgattttgaagaaccacaagaactggaatcttttcaatgtttgcttttgtttttgttttttgtgttttttctgagacagagttttgctcttgttgcccaggctggagtgcaatagcgagatctcggctcactgcaacctccacctcccaggttcaagcaattctcctgcatcagcctcccgagtagctgagattacaggcatgtgccaccatgcctggctaattctctatttttaatagaagtggggtttctccatgttggtcaggctggtctcgaactcccgacctcaggtgatccgcacctcagccttccaaagtgctgggattacagtcgtgagccacaacacccagcctsgaaattattttgatctgaatgctatacttctgagctcatataccaaatttttgaaattgtcagctagaggaagagaaaggaaaaaaaaaatctgcacctgttaactgtcttcatgccccagacctcagacctatttcacaatcttcacaacacttcccagtggaccctcatttgccccattatttcaggagagaggagtaaaatttaaagagtcctagtaacttgcccaaggacatattgctagaaaaatgactttgctgggggtctatgccaactgtttgatacaatatcttgtatcaggatttccagagtttatagggacatcaggttttgaggactaactaacyagatatttaacttaaatttccaattagaggcagattctgtggctagatgaattgtgatcccattcaatcccaaaattgtggaagaaaaaaattaaccaaaagatctgcccatcctttttaacttgatagacctgaagtccttaaaaaaaaaaaaagtgatcaggcactaggaaggtttctttcctcctccctaatattcaacagttcttaaatatatttgcaaaaatcccataaacttattaaaagaagggtctgtatcttagttatgctgagccccaaattcctttcatggtgtatgagacatgatcatttcttaatcaataagtgttgggtaagcaaataaactctgactaacattgagcttatctctgcagcttgacttctggtatccaggtgccacccaccacgtagctgctaatatgatggtggatttccgagttagtgagaaggaatcccaagccatccagtctkccttggatcaaaataaaatgcactatgagtaagtccttggcaaatattgaaatttgttggatattcaaagttttgggagccttgaagtagaggaaagtattacaatggacctatttttaattgggccccccagaacgaaagctctttctgtaagatacagatcacagttacttccaaacacattatcraagcctgtttacagaggtgatagaatcaaacttggcagttcaacatctaccttacatttgctcttagctataagaataacaattacctatatctaccatctccaaaaccagcccctcataagcacagagcccacatgagcaggcatgaatggtttagccacatgtcatcactactgacaggtaatcggcccagatctcatgagctactggcgctggcctccttttatrtatttgaattttcctgawacataaaaggagaccaaaaaaaaaagtcattggtatgtcagaaatacagcaattggtatgtcattggtatgtcagaagtacagcaattaaaaatatacaataaataattctttatgaaaaaaattcttcctcagagaaagcacaagcagagcagtagaatacagtttaaatcaaagagaaaagaatctcaaatagccaaagatgcagaaatgagtcattctggccccacagagaagtaagagaaaatctgaatatattgagcagcaaccatgggccatgcccagtctgggccctgggcagtgaatgagaaggaagcccagcaatgaatatcataaatcaatgtgtaatttagaaaataaaatgtgttggccatgcgcagtggctcacgcctgtaatcccagcactttgggaggccaaggcaggtggctcatgaggtcaggagttagagaccagcctggccaatatggtgacaacccatctctactaaaaatacaaaaattacctgggcgtggtggcgtgtgcctgtagtcccagctactcgggaggctgaggcagaagactcacttgaacctgggaggcagaggttgcagtgagccgagatcgcgccactgcactccagcatgggtgacagagcaagactccatctcaaaaaaaaaaaaaaaaaaaaaaaagaaaatgtgtttttatactttcaaacatttcatagtttgatgtacagagggatcccattttaacttccccaggccatgttatgccaggattcccctttgttgagaccctcattgtcaaaacactgctaaacactagttcattttttttttttgaacttgccattttatacctccattacctgacttggtactttaactcaaaaggtctgcttctggctgagataaagaaagagcctgttgatgtcagtgatgttatattgcagagcaggatttactactgctcaccatwaacttgattttatttatgatattgccacaatatctcaaataaactccattgaaatttaaaaatcacgtacataagtgagcaaaaaacattcttattcacggctttaaagataacattctattatttgtgatggttattgatgactttttcggttttgttactgtttcaagaaggttgtgrcagaaatgtaaaagttaacaaattgaaaatatataattcacgctgtgcacatgtaccctagaacttaaagtataaaaatatatatttataaaaaaaactaattgataccagcttttaacccttttaacttaatayactaagtttttctgtttttataaatcacatcattaaaattagacacttcaaaaatgtaactacaagactgcagaaatttgtattacattatctgtttacattaaggttcagataatgtattgactctttcatctaaaagaaatcaaccctctatcttaaataacccctggttactgtgtctcttgttttgttttttgagatgaagtctcgctctgtcacccagactggagtgcagtggcgcaatctgggttcactgcaagctccgcctcccgggttcacgccattctcctgcttcagcctcccgagtagcttatactacaggcacctgccaccatgcctggcttttttttgtatttttagtaaagacggggtttcaccatgttagccaggatagtcttgatctcctgaccttgtgatccactcacctcggcctagccaccgcaccaggcctactgtgtctcttgattcacttcattgccagctttctagtatatgtgcctaaattattacactcttcactttacttcaataatatagacctggtctggattcctatgataaactaattcttacaaagcattcagcccaaggtaaaataaagtagtggtgtggccaaattttatataatttggcttgaacagcaaggtaaagaattaggtattatgttttccttaatagccctataacgcagttacaatgtagaaaatgtatctagaaaagctagttgcttggcatgagcatgaatagtggagtaaatcactgtaagacacctaggcaggcagctagcatccttccaatttatcaaatagctcacatcagccttttttctcctttggtcctctaggcctcttctatcctgaaatgattctgattcaactagatgtctaaatccagatcctcaaattagtgtgtttttcactstgtcttatgacaaaggagtttcttgctttctacrtcaagtaccaaagtgttaaattacctayaaaaattggttttatcaaattaaaacatgaattctacaaagyggcccaaatcagccacagttatgggaaagccaaataattagatagttacctccctcagaaatataaatatgtaaagtgataagtgcagacaagaactacttaaaatcttgtctccaagtactaattatatagataattttatttgcatattaattatatgcattacttggtgtcagtcagtaacagaaaagagttctaagaacagaaacatctggtcggacccaggcaccaggctgaattaaaccatattaaaaggctggtttgacacaaagatttacttacacacccttcattagacagggtatatcaactactatttagtttaaagcatctgtgtggtttttctttaatttttagaaaattaagttagtaagccagattttattttaaagtagcatacttgtttctttttttacttatttacaaaatcataaaaggccaagttcaaaaaacaaacaacatggatatactaacaaacccaaacagactggcaaacaaatatcaaagggaaggcacgtccatcggactgagcctctggggcagacactatacttggaytcagcagttaaaaatcctagtgtttttaacattgttcacattttagacagtcaatttttaacattgtcttttctttgatcaaaggttaaaattagaaaataaagagttgttaatgaaaggtaactcagaaamcaactattaatataataagaaaactcaaatggtacaattaagtaaaatcttacgaggatccatataagattatgtgagaaatgcaaaagagatctatgccaaactgacacagtgataatcaacacctaatattaatgtctaactgcctaataataatgttcagtcagatacaaattcatattccagggatatacacagtcctatcmagtgtttcaatcaaatcattctaatgtgtcattccattcatttttttcttctgcttcacatttttacgtattacttacctaagagtataacatgcatgttatactacaacatgctacatggtacaaatgttgaagttacaattggtcatgtgacaaacaggagtgtggaaggtaggaaagtgggttctgaagcaacgctgtctgggtccagtcccactgaagccatgcattagatactcaacattggcaatttatttaactttgctttacctcatacctcatctataaaatgggaataataatggaatctatttcataggggtttcatgaagattgactgggatcgtaaagttgctgtctgcctggtcctttacttctatgaatacacacacacacacacacacacacacacacacacactcacacagaaacagggaataactagaggctatcaccagatgttccattttcctcccagtgaataaatgagtagtattcctcaaactttgagaaatccatgtcagtaagtgtagaatttgatgtgtggtaaccaaattagggagttaccagggggatattgaatcttagggaaacctgaaaccatgctttttgaatagcaccatatcctgatgtaatgtgggcatcaggagaatccagtcccatttataagtcaccctgacagtgactctgccttcctgaaacatctttccccagtgcatgcacgcgcgcacacgygcrcacacacacacacacacacacaccccagagcctacgatagtcacatatattggcccatagttctccagtcctttgttgctttctaaaagcagcaaaggatgggagccttgaaactgtcaaagtagaatttatctcatctcttctctgaacctcttacttgctccctgaccttgggacacagacttccatgagagttggttgattgggccaactgtgcaccaacctccgaagactaaggagagtrcagatctgacggcaatacccaaggatttcactctcatgatgaaggcactattgtacaatggctcacagctacggtgctgatgtcagaccctccaggttcaaattccaacttctgtattttaacagttgtgtccattttggaaactggccaaaccttcataaaaacaagagctgataatggtacccagttaatcatgttgagtgataaaatgtaaatacagtgctgagaaaagtgcctggcacataagaaaggttcagtaaacattaaacatttgtattattcaatactcagtgataattatttatcctttcacctawatttaggaattttcttaaacaaattaagcaaattttggagctcaaaataatatttgagaaaaagtaatttggtttcatttgtttatgcctggctgctggttagtagaagggcttgtgaaaataacatctggccccagttcttaatttccagccttaggcttaatttctagtccctatcagcaacaatctggcaccgttctgatgttctcatgcagctacatcatttgtggaaaggttgtacttcaactcacactgttttttttgctttgttttgtttggttttgttttgctgctgttatcataagagctaaattgatatgtgtaagtctaaaaatattcttagatacaagcttcctgtgactaattaatactgccttatgttacaaatcaacctctgggaccataaaatttctcttctgcctggtttctccacttctattaatgcaggtggagcaaaagccacgtgccctttttagagcttaaagcaattagttatgtctgtaatgaccacccaaaatataatttcaaaccttcccgggttttgtgtgagtttcagtgcaacatgctccacctgattccaaaattgctgtcacaagtttattttctcagaaatcctaggttcatcataagtcaaaagcaaagcatacagtgagttagatatgatgtacataatgatgtgcttgtcagtgctgctaataggaatcaatattcatgagcagtacttggtcccatgtgctaaataaactctaattaagggaatacagcgtttgtgttccacatcagaactcagatcagtcagtcaatcagcaaggagaaaccaacaagtagagtggagctcagcagtgtcagtgtcatagctcattattataagaaattgaagaaatcaaagagtcaaacatctacataccatcaaagcctgctttaaaaacatgttatgactgtaaaatggttgtcgattttatgacccaacttcactattattctgaagttcaatgggagcctgaggccaccaagcacttaggttttacttcatttcatcctcaccacaagcctggtcaccacaattgtaaaagttggaaaactgaggttcagagggtaactaagccacccaagatcacatgttcgtattatgtagctgaactggggttggaacccaagaaggtctgaacacaggtcactcactgcttccttatttgataagatttatagtgacggaaagagtacatgatattgtcccaaagactagagtgaatgttaaaaaatagacttcttcctgcacccaggactcactgctaacagcagaaaaaaaaatacatgtgcatttcattaccaaaaggtgagtaattcctttatttatatagagtcaatgagaaatgagataagccaaataagaaaattgttcagataagtacgacttcaagaaatcctttctttttaatatttttattgaaacatttccattataacgataattttctgccctacaaaatagagtatattgaatatggtttacctttgggtaaagaattatcattatcaatatgaattttcatactgtgctatgagaccactgacccatgttttctaagtccttctgtctagggagttttttaacttttctctttttttttctttttgctgtcagctatcacctactgataacagtgtgttcgctgcttgctttcagcaagtcattttccctagatccaatgcattccttctgggttaaacaagatttttagaacagtatctaaaataagacagacaagattttttgtgagggtatttgtaaatctcctacagctgtaaaataatatttaacaaaataaggaatctaataataggttttaatgcaaccatacatcaacggacaataatttgatcatataaattgatactgccatattaatctcaaagtggcattcaacatcattcttaacagtgaaagataagttttcctgtaaaaagcagaaaaaaagaatgccgtctatggctactattatttatcatagttcagagagttttccaatgcaaaacagcaaggaaaaaaagaaatagttattaagaaaattagaaagtatagatattggcagaagaaataacacagaaaataccctaaaaacataactaaaattcttaaaagtataaagatagttttttaatctaataaaatagctaagtgtaatcaaagtaaatggttttttaatatatgaatactgtaataaccaaaaatgtagtgagaaaaaaagtcaaaaaactggtaaaatatatatatatataaatagatgatcaaaatacttaacattttactgaagaatcaaagatacaattatgttatgatccattattaataaaattcttatatttatttataatttaatgtctatcaaaaaatcccattttttctgatcattctaattcctaaaatgattctgataagacattttttttttttttgagacagagtctcctctgtcacccaggctggagtgcagtggcacaatctcagctcactgcaacctccacctcctgggttcaagcaatttttatgcctcagtcacccgagtagctgagactacaggtgcccactaccacacctggctaacttttgtatttttagtagagatggggtttcaccatgttgcccaggctggtctcaaacttctggcctcatgtgatccaactgcctcagcttcccaaagtgctgggattacaggtgtgaaccaccatgcccagccaagacatttatttaaaataggtgaaattactcaaaatttttggaaaaaaagaataagatacattatccagtattaaattttactgtaattaaatatgatttggtttctattaagscataagaaaaaagattaatgaagcaaatagaaaattcccagacaaaataaataaaatacttgcatatatgatgatgacattttttaaaaataaatcttgaaatgaggcagtttgtattcaaattcccaactccatctcatacactgtgagtatttaaaccttctgagcactaacttccccatctgtaaagtgataatactgacaagattaattaaataatgtgtataaagcagtacctggcctgtattacacatatggatatctgaatccaagtgaaaacgtcatgtaggcagttggatgtgtaagcctagagttcagaggagagtcaagtataagtgaccatcaggtgaccattacagccactggactccataaaatgatgacatgagatggctcagaaagagatgaaaataggaagatgaggccgggagcaatggctcacgcctgtaatcccagcacttcaggaggctgaggtgggcagatcacctgaggtcaggagttcgaggccagcctgatcaacatggagaaaccccgtctctactcaaaatacaaaattagctggcgtagtggcacatgcctgtaattccagctgctcaggagaccaaagcaggagaatcacttgaacccgggaggtggaggttgtggtgagccgagatcacaccattgcactccagcctgggcaacaagagtgaaactccatctaaaaaaaaaagaaagaaagaaagaaaaaggaaataggaagataaggtgtaagccgtaagcctcttgaccctcaacattagtctcctagtgatttttcccacctcttatttcacccccttcaaatcatgttagccattttctagatccatcactataggcacgttgtttcaacactttgtacctcatttttctcatctgtacaataagcataataatctaatgtgaagattaaatgaattaataatgtacatatggaggtcagagcgatgcctggcacaaggtagtgctaagtacctgcttactattataattatcattattattcaagtttctcccagctcagaaggtgtgaaattataaggtatgatctgtagatgtgtgcatgaaagaatcccttgttgcctgtgtttatgtggatgtagatgtgtgtgtgttttggagaaggatggggagtactatagcagtacaatacgagccacatgcataattttaaaattgtggtaaccacattaaaaaagtaaaaagcaacaggtaaaattaactgtagcaatacattttatttagcccaatatatctgaaatttttattctacacaacataaaacttattagtgagatagtttatatcatttttatactatcttcaaaatctggtgtatattttacacatacagcaatctactcttggacaagccccacttcacatgtcctgtatgcacttggggctagagactatcacactggacagcacagctctagataaatggggagatcagaagccagacacatgatatgtctaaaggagatagctagaggagaataatgaagaaacagagcaaacttgattaaagataaaggagaaggaagagaaatttctgcaaatgaaagataactgtgttttcctttctcatgataaaacatgtattttatcattcccctgtcaaacagaatcttgattcatgatctacaagaagagattgagaaacagtttgatgttaaagaagatatcccaggcaggcacagctacgcaaaatacartaattgggaaaaggtacagtaaaaaatgcctgtacwtttttttaagttacccttaatatttattgtcattttgttttcttttattctaatttctcaaaattgattttgctcttaagattgtggcttggactgaaaagatgatggataagtatcctgaaatggtctctcgtattaaaattggatctactgttgaagataatccactatawgttctgaaggtaaaaataactcaagaaccactaattcttattactgttgaaaaacatgaatttaaaagttactttgtaacacaactaagctaattctgagctaawacatattatctctgaaagaatatttaagctctagacatccattaaagaatagaaatgacaagcggttttggtggaaccaagaaagtgtctggataaacatttgtcagagattgcacagtggacaaacccaaacaaatatttcatcccacagctttattacaagagtccatgatgtctctggtataaaaaaaccctcaycccttaaaatgcagtgaaactgatgaatgaatgtcatgaagggaatttaaatatcatagcatcataggactgtagaacagtgtgttaggcatttcaaccatggattgcttgagggttccctatatcagagccaacaatttccactccattgctgctggatttttgcacatccaaagatactgctccctgaagcagccacttaacaagtgagaagcccatccacatcccaaacccccattcattcattatctccaaccactcaaaacaaacctgcactctcttcaaaatgacagccattcaagtatccagtactatttcccttccccactccaacacaacacaagatcttctccattccagggtaaatatccccagtttacacaaccagaaaaacaaaaggaagtggcagaaacaaaagtgactttataataaatttctcagaacacaggatgttagtaataaaataaaaacaatggactacaaatttttttcaaaatcctaccagctgccctgacactagaaaaattttttgaaaaatatgcattgtaatagattatgaattatgtatagacatttaaggatatgtcccatggtcccttctgagaacaatatgtgcatacatggttctcattcaacaatagacaggggaaakaattgctttgagaatatgaatgagttattggtcaacaagggatcaatgtgtgagtttgttcaaaacaatatctcaagtttayttttaaatagattggggaaaagaatgaaagaagaaaggctatttttayggattgtggcattcacgcacgagaatgggtctccccagcattctgccagtggtttgtctatcaggtaagtgaatcagaagactcccaattctcctttgactgccaagtctccagcacttcactaagtggcgacatctttccaaacacgcaattccacttagctagaagagcccatacttggtgctgtcagggaagaaacgctctgaattttactcatcattacagtttttatgaaattgacaacttccctccaaacaattcttaaactcaagctaagagtttatgaaactcacacttttcttgggctatcacatgaaagtttttactgtagtcaagtatggaaaatctgaaacaaccttcacataacctacaaatgtaacttttcttcaatgagctcaaaacatagatatttaattttaattcctctttagataatacattggccrcacatgtacttggaattttaatatttaagtttcctttctgagtgaaaaataactcacttttttcttttttttttttttgagatggagtctcactctgtcacccaggctggaatgcagtggtgcaatctcgtctcactgcaacctccgcctcctgggttcaagcaattctactacctcagtctccaaagtagctggaactacaggcatgcgccaccatgcctggctaatttttgtatttttagtagagactggattttgccatgttggccaggctgttatcaaactcctgatcccaagtaatctgtccccctcggcctcccaaagtgctgggataacaggtatgagccaccacactgggcctacaattcacttttttaaaaggtttatctagtttatatattcaatattcctctcactctattgccaatgtattttgactcctaccatattttaattttctctttctgtcagcttttgcacatggcacagtggtgaaatatgtgtaacaatggttttctgggcatagatatttttctagaaaagaatccaccaggaagtgacctgtagttacttttgctctcccaactgagggccaagagctccccctactcaacacataaaggaatgcacatcacaggtctacaaaaaatcttgtctccaattcagatgtacctagaaggacttcccaagagtggtgagagagattttaggtagctacagaaagtgcatgtgattagagaaatttcagtcagatatagaaaaaaaaaagttgttcaatctctgaattcttgggtattttattaatacaattttttatttaatcctgcttataactatctcacaaattctctccaatattttcatattcctgtgcttacagactctatctatatttatgtaaaagatgtgagagaatcaattaaaaataagttgtattacaaattttccatttggcttccaatctttctatgaaacatatctctcatgctacatttggaatgctataagtctcgataattaaatgctcctttaaagactattcatttccattaatgtcactagtctaaataagttaggtttttttcccctttaaactatatggattgtttatttttgttcattttagggaaaatatgcttgaaaacatgtgaccttgggaagtgactcaagttattactattataaccacagctttccacataatagctaaacttcataccaatagcttaattttttttcacctccgacaggcaaccaaaacttatgggagaaacaaaattatgaccaaactcttggaccgaatgaatttttacattcttcctgtgttcaatgttgatggatatatttggtcatggacaaaggtactgctctctactctcttgyttgcatttagatattatttgctggctttaatacacaatgttatgcattcagcttagggtttaggtaactagttaattctaattcagaaaagtatattttttaaaatctcagtttcaaattaagtatgatttcttggttgcataggtatccttgaaataatataaaatttttgctgctgaagctagttatgtgggaaaatgaaataaagtagtaattacagaggaaatgtatgattgcattatatgatatggcatatctagctaagaataaagccaattaattgattttaaaacaaaaacctttgtatttcatcaattttgaatagaatttgaggtagaatcattgtatcaaaaaaaataaaagagaggtacagatacctatttgtctttttacagtatattttattatcctgcttttgctaaataagaactctcaggcagacactgtcacatcaaattattttctgcaaataatgctccaacagtaaaaatttgacctgcattatatctgaatctatatatggtgaacaagctaatgaagttataatttaaattatggttaatttcagaacaccgttagtcatcttctaatactgtgaactaatcaacagtgtttaaaattaactgaattatttcatcaaagcctaaggatataatattaaaaaccatgattctgaaaatactacaaattataagaaaacaatatttttttctttttataataaagggcctcaagttaactagatagatttcaaataaagttgcagacacctgcagagagaatttgaaatgatcaaattgaaaaatgcaaactgatcttgtgtaaacacttacgtcattcaatctggcagaaccgcatgtggagaaaaaatcgttccaagaaccaaaactccaaatgcatcggcactgacctcaacaggaattttaatgcttcatggaactgtgagtagcagacttgctatcaaggaaaattgctataaggaatatttaggtcccaaacttaactaaaacacctacttgttcagtaaaaatagttatgctttgagtgagtgttaacttttgtatctataacatgaaagacaatcatcactaccattgagggatgtcttgctgtgtggaaggaaatgaggaggaagggactgtttatcaaaccatctcttacttactatatctagtttgctaaaaattaagcacaatccaaatgtataaaaattcagataatctgaataaagacctcagattcctctgcttcctgatgtgagaaatgtcagtggctaaaagcaacatacagacagtttttcagatatttagtgaaaagagtcatctggagcaaagaaagtgaaaaagtttaacagaaatmcgatgataagcagaggcctgctacatcagacgatgctttagttgctatacaactatgacttcatcactgcacactttcaaggagaaattaccattgccccaatttatatatttcttctgtgcctaattttgttgaaaacatcacctgagcttttaactgtattctaccataatgaacatagaagagcagcagctatctctaattgagagctttctgctgaaaaaggctgaagaaacttgtgcccagggaaggtaattcacaccagcccccagcgcattagagctggggttgaattagaactggagtgtatctggctccaagtcatggctgcttctgatttattactcctgtggccttgggaaaggacaaggaagtaaacaaggcttagaatattccagtgggctaagtctgttacaatctggcatgtgtgtgcaatgttaatctgtagtgactatgatacaagagacattgaagcagccctgtaaacatgagaggcaaaaacatttaaaacattctgtgaatctataatacattagaagaggcaggagctatatggatggggagcagactgtggtctcatccacctatgtcttctgcagccattcctaacaccaatgacccatgtgcagataactatcggggctctgcaccagagtccgagaaagagacgaaagctgtcactaatttcattagaagccacctgaatgaaatcaaggtttacatcaccttccattcctactcccagatgctattgtttccctatggatatacatcaaaactgccacctaaccatgaggacttggtacgtagacaaaagtttgcacttcatgcatcgacaataccattgactttcagtctgttcttcattaacttgggtatgttgaaagaatttcacattttaatgtcaaagaaaagaactaatgaaatttgccttgaagttaaaatcatgatctttagattgatttttcaytgataaaagtatatagataataaattcctttaatgtgattctcaggaggaaaaaaaaatcaggaagaaatgtctaggaaaggcataatagaagtctattacaacacagctcattgtggggtttaacatttaccatgggttgtacggtaaaaycatgcacggaaaaagcccaatagaatagcaaagacatttactagtcctgccccccagatatcagatttaagaagatacattgtatttttatcctgatcaacttggaaattatattcttttacaatccaaagaagattataaatgtttgtgaagcttcttcactaagaatatgttatctttccaaaactatgatccattaagcaccattttgtttataaaaactgatttgataatgtgagctttaaaaaaaaagtctgcatatgggttccaatgaatcacaggaagtgacagagtgaatgggtgcatagagggataaatattttgaattgctatagaagaaaataaataaaacagaaaaagtttagtggcccagatcccatggtgattggcaaatatagcactttcagtaatagctgtggtccaaatactgcctcataaaatattttaaaatttttaagaggttacaattttcattctgacctcagtccattgtatttagcacaacagcatttaatgttaattggagcagagacytgaatcagtcattaaaatcatctccatatatacaacaaagaaracataccagcaatatatggcccatagtcatttattatccaatgtaggtgataatctgagggcgtgagttcaattaatgcataccaatgtacagcactgtgatttcaatccactgttaggaaaatgatattatgggttaaaaaaaatacatatccacaaaaaaaaaaaccactttgagtaaaatgagagttcttgcatagcaactaaattgattaagaaaaaaattatttattggttatatacgttatatgtatagtcttttaaaaatctttgtgagtgcaaatatgttagtaactatattccattaaaattcattctgacaatcactctcatagcacaaaacactaacgtgtattaaaaggtcatgacaaaatgccactctgaaagagacaccctaattaacaactattttaaaaagcggtcaaccacccttcttcccttggtatgctgaagtcagatgagtagagaagatcctgtagcaatatgagcctgttagggaccaaggaatgtaaaacatggaagaaaatggagaaactgtcagaagagacaattatctgaagccaaaaaaattgacaggaaaaataatgtatattttatattttagaagaaaggaatgaggagagagagagaaagaagagtagaaacacaaaatgagatatggcattactgtatataatcgactgcatatttaagtctttttttttttttttttttttttagacggagtctcgctctgtcaccaggctggagtgcagtggcgcaatcttggctcactacaacctccgactccctggttcaagcgattctcctgcctcagcctcccaagtagctgagactacaggcacatggcaccacccccagctaattttttgtatttttagtagagacggggtttcaccatgctagccaggatggtctccatctcctgacctcatgatctgcccacctcagcctccgcaagtgctgggattacaggcgtgagccaccgtgcccggccaagtctttatacttaccacatatattactgaaaataagtttctcgtttaaccatttattttattttgatcttcaaatgccaaatacctggtaaatttgacttttttcatccctagtaatttacatatttacatatatatatgtakgggctttggttttgttaaaaccaggaactgaattccggcttcaccagttgcaactaaccaggaaatagtactgtccatctcatagggttgttatgagtcttgaaactaaagatcaagggataagcacagtgcctaacctgtaagactccattaaaaaattgcatacatacataattacatattccttggtatttacacagtatcctattatttcactmtaactttcctttctctccaggccaaagttgcaaagattggcactgatgttctatcaactcratatgaaacccgctacatctatggcccaatagaatcaacaatttgtaagtcattcctcttatttactgagcccttttccctaattattttttacaaatattaaagaaaattatggaatttgcaatttaggttagagcatctggaattgctaatttaaattctactttttacaggatattctgaattatacgtgaatctaggggatagattctgaccttttcttgggataagatttttctagaaacaaattatactgaacttttacagggttacaaggtcaacggaagctattaagtcaagacagatttacagtttactttatctaccttcctgtttcccacctgtaccaccaacaatgttgtatccttccaggaactaatgagaattcactggagtgagaaaaaaaaaaaaattagccaggcatggtgacctatgcctgtagtcccagtttctctggaggctggggtgggaagatcatttgggcctgggaggtcaagactgccatgagctgtgatcgtgccacggcactccagcctgggcaacagagcaagacctcatctaaaaaaaatcacataaaagaaattagatggagtagagtctacattttttttaaccatttaactttaactggactctttcttacttgccttgtctacatgtaagtatggtcttttccctagctgaaaaacagctaggataggaaaacagatagaaaatcagtttcagctcctctggtcgtgtaaaacaagttatctctccttctcacttgctccttctcactatgttcagccgaaatctgtatggtgaactagaagggagatcacaagactctagttctgtcacttttgtttcatactctcagcaccatttcttactcttccctatttttaaatttatgttgtctttgtgtgtttttaagttattgacttggatttcttggccttgattttcttgtctcttattctatataaaagaaatcagtaatttttttttctgtaaagggccagatagtaaatagctttggctttgtggaggtacagtttctgttgcaggtactcaaccggagaatcatagctcaaaaacggccatagacaataagtcagcaaatgggtgactatgtgccaataaaacctcattcacagaaacaggaggctgaccaggatttgccaactcccatactttatactaaataatatctgcaaatttttatggagtctttacaagttaggcactgtgcttaccccttgattttcacaatctcaagcttcacaacaaccctatgaggtggggagtagtatttcccagttattagtaaccggcgaagctggaactcaatctcagattttaacaaacaaaagccctgatcctgaccactgcacatactgtttgtgcatttggattttgtagctgaaatatccaggattttctatttgcaatgaacagccaaaaaatccatttgagtatcaccgaagacaattaactcagatcctgggaagtgagaccactttctgctcttacagcaactcccactaagcttagtttgggaattatttagtaaaaactaccttttctccaaaccaagttcaagcttcagttcttagtctcaaaatttatacaaaattccccatgaaacttctcaaaagcaagaattatgcttcagatttcctcttagaccctgtaacatatagtacagtgcacggcatggaacaacagcagaattagttcccataaacttgctcaatgataatggtgtcctggcttattcaaaagaagtgaatgtgagttgaaaccacaacagtactggacttgattaagcctgcatcactctctagaccaaatatccaacagtgtttagcattaagactaccatttaacttttaaaaatttcatgaacaacccttccaccaccaaagatacactcatatttttattacacttttagaatctgtgcattaaaaaatacatatgtgcatatgaattcaggattccttgcaacaattttacctgaccacagtttttaagtcactttcgtattccaagctgaaagtataaactttgaactgaaagtctacatcctcagcaattgcgatggaatttgaaaatgccggaatcaacatatacagtttctaggacttacttattagatgcttctttggcagaactggaaaatgactaaaaaatggacaagtccctttcctygagcacattcattaacaatcacctatcaaccagtcactgttaaggtgctgaagaaaaagtgtagtgatacagatgatccccagcatccacatagatcttgctacaacctagccatgctggggactcattacacayacaggtggatgaccacaagatttcaaaatacatgttatgtacccagctatgtgagtggacaaaaagtaagcaaagtaaagaacaagaagacagactagaagatcagtttaaaatggcagcccacttagtagatactaataaatagcagggccagattggccacccagacaccacatgagagcaattcctctaagcaagaaaaacccacagatagtcttagaggcaaagaacaaagcattccaaacaggaacaaactttgcaaaaggcaattaaagcatcaaataattatccgtgtgtgtgtatccacaaaagtatgagaatacagagctgtgcatagcattgcattaagacctcttaatgaacaaaaatatatggtgtacctagctagcaggctagcactttggagctttcagagataaatgagaggacttaggacacaataaactactcttaaggaagtcacattctaastggaaggagcrgagagccaaaactaccatagctccatgccatcatgtgtcactttcaaaatggaaagatacagtcaagagggattactattctgtttaactgtgcagcattatttaaaatttttattacattatactacaacattttaaaggcattgagatttagaaagaattgcctttgtcacgcagtgctgcagcagcttgataaacgatcaagatttctagaacagactgctttaataaagcatctgatagaatgttaatcaaacatgcatgagaaacagggtagcaaagcagttgacttggtaagaataaaaaataaaaatgtgattaaagtttagtcattccaataacctgattgtcacttaacatgtccccagatttaggaacagcatctagcatttgtcagtgatttcctgtcttcgacttgatgaagacagaaaaaaaaggactgggggagcattttttaaactcaacttatggaggatctctggcctttagaaaaaaatatatatatgtttgctctttgaacatgagaggcaaacatatcagataagttaaaatcataaattttgaaaccagggagaaacataggcaatgatctattccatggttctcaagcctgacttcccattagaatcatcaggaagctggccaggcctggtggctcacttttgtaatcctagcactttgggaggctgaggagggcggatcacaaggtgaggagtttgagaccagtctggccaacatggtgaaaccccatctctactaaaaatacaaaaattagctgggcgtaatggtgggcacctgtaatcccagctactcagaaggctgaggcaggagaatcacttgaaaccagaaggcggaggttgcagtgagccaagatcacgccactgcacttcagcctgggtgaaagagcaaaactccatctcaaaaaaaaaaaaaaaaaagaatcatcaggaagcttttaaaatacatgaatgattatacccccagcccccagagattctgatttcatcagtytgaggaggagctcggcactcaatttttttttaagtaccttaagtgattctaagatgaaactagggttgagaatcgctgatctaagcaaaacttctcatttatagactgaaattcagatacagaaatatttcatcactttagggcagaagaaaaacaaaaatcagcattcaagaccagagttaaaatggtatacctaccactttgccccaaagcagcaatattgagatggcacaaaaaagtaaatagtaatgtttaatgtgaaatgattatatttgcatataaacagcatatccaatccttcatcatcttagaaataactaaacatagtacctagtgagcaagaatagttatttgagttgataagaaccaagattgcattagtaataaaattcatctgtgagtcacatcatgaattaaaaagttaatttcaaagtacatttcttgtagcttcctttgtgtaccaaaattgctagatctaccactgattcycaacccagtgctctttttccatattctacatattctactttttcaaaatttacattctgaaaaagaaaagttaagacttgtagttcataacaccagatctctacttactaagagacattcaaactgatattacagagaaaatatttcagtgtatgcccatgtatctctggcttcagctcttgcttctaatataattttcacttagtattaatataaaagtacaggttatyatattgaatacatttaaataatattttttaaaacgatacaatttttcagaaaacactgtatcaagtaagcaataaatgcagcacacattaagtcaccaacgtcactttatatggatccctttgggctgaaatcasatttctagtttggtacggtttcattttgatttgttctcattgaatttgttgcaaccaatattgtgccttgaaataagtaggaaatattttcttaatgttgaacatactcagaatatgctgtcaacaaaaacaaaattatcttatagaactgagtaaagacttggtattggctagwatatagagtggcacataggtagcacagtacaatgattaacaacatgaactctgaagacaccacctgggcttgaatcctgattcgaccatctactagctatgtgtttttcagcaagttgcttaatctctctgagcctaggtttcttcttcggtaaaatggtaattgttacttacatttgggataggaattaattaaatgagttaacatgcataaagcacatagaagggtacttggtatttagcaagtgattattactgtattttataaaygcatacacatgttttagtaggtacacatggagataaagaaaaggctaagtatcatgttaaacaaattaagttctggccaggcacrgtgatgcacacctgtagtcccagctactcaggaggctgaggtggaagtatcacttcagcctgggacgtcgaggatacagtgagccatgatcatgccaccgcactccagccaaggtaacagagcaagaccctgtcacatacacacacacacacacacacacacacacacatacacacacacacacacacaaattctatatttttttctcaaagtaaaaacttgcaatgttgtatttactttatgacttgatatagttttgtttgcaaatttaagatctagaagatatgaaatgtattctacttcatagcatcacataattatgaaaaatcaaattccatatattctcaatcaccactattaatcttaatgacaaactccacataaagtaaatctctcaaaatagaatagccatgccctttaacccttggaaatcacagcagtttactcgactgcaaatagagagctactgcaactaggaactggccaagtttattaaaatgtctaacatatcctaaattacaagacataattcctatttactttacctcctttgctaccaagcttgcatcttagygtgatttctttctcatgaacttaaatccaactagctaaaagtggcaatctgtttgatcactgaagccagtctctatatttcagctcacgtgctccataaattacatgcaatatttgaccctgttaataacttcttgccattcctttggcttccttgactttgaactctactggttctcttcttcctcctcctcctttttttctactctcccactgactgcttctaaaagtagacattttccaaaaaatagggtacaatatatggatacttcctcaggttctctcctcaggtccctcctcttacttctgactctcctcatcaagaaataacctctatccccacaggctggaatccctcatttgttacctagggcaccaggmaatcaccttttacccactaagtgaaccaaccagaccaaaatagcaatgcaaaggctttgaaaactatattgtcagctgagcacggtggctcatgcctgtaaycttagcactttgggaggccaaggtgggaggatcacctgagaacaggagtccgagaccagcctggccaacatggtgaaacccggtctctactaaaaatacaaaaattagctaggtgtggtggtacgcacctgtagtcccagctaytcaagaggccgaggcaggagaattgcttgaacctggaaggcagaggttgcagtgagctgaaatcgtaccactccacttcagtctgggcaacaaagtgagactctatctcaaaaacaacaacaacaacaacaacaaaaaaccaaagcaaaactgtctgggtgtggtggcacatgcctgtaatcccagcactttgggaggccgaggtaggcagattgcctgaggtcaggagttcaagaccagcctgaccaatatggtgaaaccctgtctctactaaaaatacaaaagttagccaggtgtggtggcaggcgcctgtagagaggagaagcacttggacctgggakgcagaggttgcagtgagccragattgtgtcattgcattctcgcctgggtgacagagtgagactccatctcaaaagaaaaaaaaaaatactatattgtcatcagtatcacaagacacaaaagtaggccagggcctgtttactaaacctgaacagggtgattacctgctaaattgaagatttaagttacaatttattatttaatgtaatagctaaaatgtccagaatataatcaaaaatcgcttgtaatactaaaaacaagaaaaattacagcttgaatacaaaaagataatccacagatgccaacactgagatgattgcagtttcaaacattggaaaagaatttcaaagttgccatcattaaaaaaaaaatgcctcaacaaacaattacagatggccttgaaacaaatgaagaaatggaaactatcatcaaagaaataaatataagatacaaaaaggaaccaaatggaaaccatagaactagaaaatgtaataacttgaacaacaaaaaaactggaagggcttaatagcagaataaatatgacagagggaagaatcagtgaacttaaagacagagcaatataattcactcgctctgaagacagaaaataaacaaaaataaataactaaacaaagcctcaggaacaaatggcataataaaatatccaacattcatgtcatcggtccaaggaaaagataaataaagggaacaggagctggaaaaaaaatgtttgaagaaataaaagctgaaatatcctacatttgacaaagacataaactaacatagtcaagtagctgagtgaaacccaaacaggaataacccagagaaactcacatcaaagtacatcataattaaacttctgaaaactagacaaagaaacaagtcgtaaaaggaatcagacagaaatgatctagagttaaaaacagttccagtgacagcagatttttcatgtgaaaccatggaagtcaaaaggaagtgacattttctcaagtgctgaatgaaaacacctatcaaccctaaattcaataaattcaatgtattgcaaaaatattcagaaatgaaggagggaataagacattctcatacaaagggaaatcagcagatgtgtgccccgcacacctactcttaatggctaaaagaaccctctgaacaagaaggaaataatcacagcaaaaggcttggaactgcagagaggaaggaagaaaaatggattcagtataaataaataaattaaataatagactatctttctccacatgatgattgaatcaaaaattgtaagtctgtttgatgtgatgttcaatgtatgtagagaagtactcaagacaattgtactttaaaagtgggaagggaaaaaggatctraaaggaagtaaagtttctacacctcacttgacatagtaaaatgtcaataccattagactgtggtaagttatgtatgtgtattatagtacctggagcaaccattaagaaaactaagcaagtgagactataaatcaatcaaatggaatcctaaaaatgtcatgtaaccaagaggaaggtgtaaagcaagaaaaaaaagataaagggataaaaacagaaagaacaaaaaaaaaaaaagaaataatggcatgtttaagtcatatcaataatttacctacacgcactaattaaagacacatgggcagaatgaattttttaaattataattcaacaatatgctgtttataagaaactcatttccaatataacaacacagataagttgaaatgagaatgatggaaaagatatactatgccataggaagaatagctacattaagtatcagataaagtgaatttcagagcaaagaaatttgctagtgacagagacattaacaatgataaaaggatccatcccaccaagaaaataatgatcctaaatgtgtgcacaccaatttcacctatgatgtctatgccaataatttaaacattcatttttccaagctctttcttgaatgtctgattgatgttaaaygtatcactttgtcttcctttgccttttctttttcccatcccaatgctctctgagttcccatttaacagtatgttttttccagctacccagattgaaacatcaatcatttttatgaaatcccaatgtttcttatgtagaatccctcagttgtttctaatgtggtgactctaccctagtcaggctttcatttcacactacttcataactggtttctattcttttcaatccagattaacaaacctaaagtactagaaggcctccaaaagaaaatctaaacacctagtcccgattcacaaggttttccaagctttactcacaaactctcactgctccctttgctctggtccagctggatctcgttggtttctaacaatgcctccatgcttttctatccttgtagttcactggctagaattcctttcttccatctccagctgaaaacacactagcctttcttcaaggctctcctccaataccatctcctccatcatgaaggcagtatttgagctggcactgggcatgaaaggccatactcctcatcaagaataatctcttttttcttttaaatcttggtaaaatattgtaccttttctatggtacttagcatattctgctctgcctctattgacttataccttgacttctgcctcctaaattgtaagttactgaagacaccagtggcatcttctgcatttttgtaccctgcaacaattactctccccrgtgccaagaaatgtgtcttgtaaatattaaaggtttaataaatatttggtgaccaatttaagagccaacactatctcttcatcaaaatatcccttctctctttcatcgcagctttgaattcttatctttcaaatttttcagatctttcaaactgttattattagttaaactcattacttgtcctagaacataaatgccttcacatacaaaaaaaaccttttatatcacataaagcaaaatgtgagcacataaatgcaattatgatatgtatatgcacttgtatatgtatatagcctctagatgtgagttatatgtatataacctttagatgtgtgtttatatttccaatgtttttaccaaaaaatagaaccttgagttaaatttcataaaagttgacatggaaattttgaattaggagattaaatatgtctttaaaataactaaattacattttcttggtcttttgactatgaaatagtttaccctagcaacatgaaaaacaagagacctaagctattagaagaaatgcarttctatgtatcttgtgtgtatagtttttccctggtggttttcaacgaccagtgactccttagctggtttcctcagctgctagcacttgctctgggtacttgtcctsaacacgtccatctgcaacaatgtgtgcctaggaaataaactcaacttactactcacccaaccaaaatgtaattttttaaacgcagcacacactgggtggattccaaagtcatgattatgctttactatgcactctgtactattcagaccactactctcattcattactgcaattaactgcacacataactattttttattgctaattatacaccactgatttccactttaaaaaaacattagcatttgtctctaattaaatatttactgcttgtgttttacagacccgatatcaggttcttctttagactgggcttatgacctgggcatcaaacacacatttgcctttgagctccgagataaaggcaaatttggttttctccttccagaatcccggataaagccaacgtgcagagakaccatgytagctgtcaaatttattgccaagtatatcctcaagcatacttcctaaagaactgccctctgtttggaataagccaattaatccttttttgtgcctttcatcagaaagtcaatcttcagttatccccaaatgcagcttctatttcacctgaatccttctcttgctcatttaagtcccatgttactgctgtttgcttttacttactttcagtagcaccataacgaagtagctttaagtgaaaccttttaactacctttctttgctccaagtgaagtttggacccagcagaaagcattattttgaaaggtgatatacagtggggcacagaaaacaaatgaaaaccytcagtttctcacagattttcaccatgtggcttcatcaatttatgtgctaatacaataaaataaaatgcacttaatgctttaaaattcatctttttatgataaacwatattctctgtatttctctatagcattaataatcaatattaatgccattcattcagtctgttaataagaaataatatcttcaattttcaaaaacataatttgcctatctttttctgatagaagtagacattgtttatatcttcaaaaaagcaaaaggatgtcctagcaggaaataaagtggttcatatagagatgaatctcagtcctttaaataaccgatccagttctcatcagcataatgtacattaaattcaaaatagtttaatttaacctgccataatcagaagaaaccacctgctaaaacatctgtttgccggtacagacacagacaagacagtctggtcagctgtgacccctgccctcctaatggatagaaaggaaacctggaaacatactgtaagttgaggacggaaagtcatgttgaccaaaggcaatcagggtaacttgctgcatttgtaccatttatactcctattatttaagatagtattattggatagcttctccccaacaccaatacctcaatgtgtgatcaagtggcaacagtggcagtgtctacattcccagaatccagacacagatgcccaccacaggactgactataatttgagggacaagtagagagttccttgacttccagtaaacttacttctcagaacaccccagacagttttcaacgactgggaaaggtcctgagaagtcaagtcaataaacaatctgggacatgccccatgaatcctttagggacacataaaagaaaggatggcatcaaagctacaagatgatggtgtgttctgataatcatgaggtagataaaagtttcccatgcaaaattgtccaggaaaagcaaatgtaaactaacaaaattgctttacaaggggagaaggggaaggtgacagagtcaagaaactaaaagagaaaaatgtggctatgagattatattgtctgattaaaaatatggtatctatgtctaaatatttagcattccaaactagcttcagaacgtgggaatgtaaatttgtttcattatacatgccatattggaattatatactcattcacacttactcaaatgagaaaggactgaaatatattctaaccctaaaattcatataaatacctctaattccattgagcctttagatggaggagataaaagagataatcccaattgcagaatattatcccatgtccatccattattcagtttataaagacacaaaagttgaacacactatttgaattattatgcagcttaatattttttctcaatcagaaaaaaaattagcctgagtggctaaaaataaaaaatcctaacaagatctcatcctaattaaatagtttttgaatggcatctgagggcatttacttctttgactgcatatgaattgtgaaaataaatatgtgaagacaaatatctacattaaagttaaaaaactaaaattttaccttatttatgagaaagtttgagtggcaagtgctgtgattcttcccttttcatttctcatctatcagtaaaagggctttgtacccaagttacaagttgtgctatcacataacaatattcttgacagaggccaggcacagtggctcatacctgtaatcccaacattttgggaggccaaggtgggaggatcacttgagcccaggagttcaagacaagtctgggtgataaagtgagaccctatctctacaaaaaaataaaaataaaaaattagccagctgtgatggcacatacctgtggtcccagctacttgggaagttgaggcaaaaggattgcttgagcccaggaggtcgaggctgcagcgagccaagatcacaccactgcactccaacttggatgacagagcaaaactctgactcaaatatacatatacacacatacacacacacatacatatgtgtatgtacatatatacacaaaatatatgtgtatatacatatatacaaaatacatatgtaaatatatatatatcatcattcattttccaattttcttactataaaactcactcaagaggcattgtttcatattttgaaaatgtgttcttttatagcaatatctaattgttgaggtgcacatctgagatgtacatctctattatgaaaaaatgaaacatcttatttttacttatgcaaataaatgtttccagtaagtcttatgactccaaactgatctttaaatgtcatatcagaggtcccttccccacatttgacacattggatatgttctttgaccacagaagtgctcattggctaagtgaacattaggcttactgacaagagtatctgtttctcatttaacacaaacatctatgcctgattttctttagatgaaaaaataaagaagtaacccccaaagaaacttagaacatgtcactgcaaagacacaaattttctctgtcctcatgttctctcctagcctccttatctcaaaaaaaaaaaaaaaaaaaaaaaaaaaaaaaaaaaggtttaattttttttgacctttccaaagggacggatgttgggcttttctggacccggaaaaaggtcaaggacaaaaaactttttttggccccaccatggggttcccagggcataaactaaccttttatttttaatataaaaaagggaaaggggaggttttcaaaaaaaaaatatgcttgggccccccaaatttacagggaagttttgcagtataaagtaaatgtaaaattccccaggatataaatcatacaaagcaccaccagcaaggaacctaactaaaatactcattaatttgaccatcaaaaaaacccaagggagtctaaaaactgttcctgaccattgaccctaaaaaactgcatagggtcctcaaaaatctctccttttttccttgccctttttcttaattctattctccctaataaaaggttaaaaccaggcagtttaaannnnnnnnnnnnnnnnnnnntccccaggatataaatcatacaaagcagcagcagcaaggacccttacttaaatactcatttatttgagcatctaaaagacgcaatggagtctagaaactgttcctgaccattgaccctcagagactgcatagtgttctctaaaatctctcctcttttccttgccctctttcttcattctattctcccttataataggtctcccagttttgaagcaggcacatggccatacaaataaaggttctatttccaaactccttgcaaacagaatcgtaggattgactactcaaattttctcataagtaaaataaagttttagtgttttaactttaatatagatactagtcttcacatatttattttcacaattcatatgaagtcaaagaaggaaaatactctgggatgccattcacaaactattcagttagaatgaggaatggtcttgttaggattttttatttttagttactcaggtaatgttttttctctgattgtaaaaagaaatattaggctgggcgcggtggctcacgtctgtaatcccagcactttgggaggccaaggcgggtggatcactagttcaggagattgagaccatcctggctaacacggtgaaaccccgtctctactaaaaatacaaaaaattagccgggcgtggtggcgggcgcctgtagtcccagctactcgggaggctgaggcaggagaatggtgtgaacccgggaggtggagcttgcagtgagccgagatcgcaccactgcactccagcctgggcgacagagcaagacactgtctaaaaaaaaaagaaagaaagagaaaaacagaaatactaactcaagtaaaatggtgtaaagcttttgtaccttttataaactaaataatggatgcacacaggacaatattcaataattggactattctggtctatgagttgtaagaagcagcatcatattgcaaagtccagaaagctcacttcaaagacctctggaacactttggctcttttttctctctcttctttttggctgcaatataattgtgatggctgacgctgagcagtcatcttggaccacagatgatcttgaaaactgaagcaaagaaaatgacaaaaggagcctgggcctttcaggacttcaccaagcagggatgctaatcaaggcttggaccacctaccttaggatttgaacatgaaaaagaaatgaaggtcctctttagtgaaaccactgttaatttggattattattctttacaatcaagcctaatcctaactgatgtagcaagccagaaacaacaggtataacagttccagatgtgtcacagatggaaatccttggaggataatgtagtgttatgcaaaatcacagagcgagaaatcaggaggtttgggcttgaatcctgactctgttactgaatgatatctagcaagacactgtcaccttttacctgccctgcttatctcatagctttttattaaaatttgagataatagatactcaccaagttaacccactaatttccactttgtatttgggacaaagtacacttgtcttaaaaggagttggctcaggtggttcctacttgaggtaagtgttggacagtatcaaaacaacaggtgcaattgctgctctcaagtgtggttcttcaccaagttccactacgatggggtataaagtaatgtgtgcatgtgcatgtgtacattttcctgtgtgcaaaattttcatcagattcttacaatatgggagttatggaccctcaaaagtttaagcataattgaatacaaaaccaaacataatttgaaatcacgttttcacacattaaagtaaaaattaattttaactctggaatttttgtttgtatagtcatttgccccctttttatttttgtttcttactattgattttttctttgttttatgatgatcttttgaaaagaatataaaatttcccttagatggctggaaaatataaaacagttttactgaacaaaaccaggaaaattaaatatctcaaaattgtacgaaatgattaaattctgccaacttatttgtaataatattgtggtccttacaaatgatgtaatatttttaactgggcatgctatgatattttgagggatccttacatgtttccctcaaaaaacattaacccaccgaaatgggaaaagcagtgttctattattagggaagaacaaactcatggagaattatgtaaagttcagattacctctggttgcataagatgcctccttttcattcaattggtgacatacagaaaattatgcgtggaactcaaattaagggaaagaaatacatggccccttccaaactagaagattttattgcataaaaccactttgaaagctacattttctaaatagttaggctaatatgaatacatggcaatatttcaaagattatggctttacacttctttctactcctttttaacacaattgtatttcatgattaaaatgccaagccatttttctataatgagtcataatagcatcttgaaaatttcgtcagcatatatataggctactgtcagaattttcttaggcaaagcttttgggagactctcttgcatttcattgtcacaagatccattataccaggacagatctcagcctgcctgagtaatatctatctgagggttataattttgtcataaaaatttactctcacatgaacttagcataaaaggtctccgtccagaaaacaggaattgaaatggatatattatcacttaaactgcttttttgctcacttatccttcaattacaagcctcaagttcactggtgtcaagagaggttaaaccagaaaaatgtaaaacaatttttgaaatatgtgagggaaatttgacacttaacattccaaatgcattattattgccatggtatcactgaagtgtgctattgcttcattttacgtggtggattaaaagcttaaaagactactcatgaaacaaaaaaaaaagatccatatgtaccatttcatatataaaacaatttgcgagaactctgatttttttttcttattcaaaaaacctctaatttcttttttttttaatctctactttgcaaaacttagagagataattaaattttcacagggcaaagagtggggaggtgagaaaggcaagttttgagaattgcaatcatac

SEQ ID NO: 8900 - DNA, 54789 bp, Homo sapiens
  misc_feature (1)...(54789): n = A,T,C or G, or insertion/deletion polymorphism (see Tables 1-2)
cagctttgcaggctcagctccaggcagccatccctgcagcccccaagccctgagtctcctcctgagtctagttctcaccccttggggttgggggcacctgtgctccccgccctcctaggatccttgtcgtctttccccaggggcgcccccccagtttcccgtctaacaggcatctctttccacccctcctgttgccttgggcatcccactccacagccacgtcaccggcctccacctcggtctcccagatgcccttcccaacccccagtgagaccacgtggccccctcggctcctccaaacccgcgaatgaaacccaaccttcttagcgtggcaaggcgtccctggatggcttctgacctcccagcctttgtgccagagggctgacagcctggagtggcctcccccgtttctggaaggcaccaggtgcaggtgaaggagcctggcggggtgaggtggggtcggtgggggacaggacaggtgggccggggatgggagcctggctcagcttcaggcatgaggccacttgagtcctgcctcggtttccccatctgaacaatgggatgacgtcctctgtgccttgagcaaagttcaggggaggtgaagacccccgggaagaagggagatgcccccattgtgcccagggtacactgcagaggcgccgtccccccatgtcaaggcgggtgcaggtcagcagggctgcctgtgggcaggtgcatgggtggcgggaactgagaatctggctgggctccctgtcccctgccctgcccccgcctcggggtaactgggccaaacaatgccccatggggggtgatgggcaggcgccctgtgtttgcacgggcggccccggaatgtggcaggacaggcccccgggggcccctgagtcaggagctgtgggcgcctggccaagagggggtgggaccatcctcggcagttggccctggccctggggtggacgggcacccggcaggtgcagaggggctgcgtggggggctcggacagaaggagggctcggggaggccaggctgcatccagagctgggctccccccgactggggactgtgccttcttcactggtgccccctctcacgcagcccctcctggccatgacccgccttgtctcatggggcctggacaccaccctgggacatgagcctcctgttcccccttcacgcctctcccttgacccacgctggccccactcagagaacgataccaccattcacaggcccaggtccctaaccccacacctagtaggcaggctgctaacccctcatacccaccccctgggagagccctcagttatcctccaaatgtaccccagatccaccccaactcatggtccctgtgatcacgtccgtctcttgctcaaactcccaccatggttccctagtcctctcaccatgaagacccaattcctccctgtggcataggaggccctgcccctctctctgatcttggctcctcttctctggtcttctctgggctccagcctcacaggccccgttccttgaacaccccacaccccctcccacctcagtacctttgtccctcagcttcccctgcctggcatggtatccgctctctgcctgtcgaccgcatgcatcttgaggtcatagcccaagagtcactgccccaggggacccactccctgtgggagatggtccttcttcccctgaatgccctacagcaggaggtgtgaggctgtgttcccattcccgtcaacctcagagcctcctgcccagctctcctggccctctggctcccataagtctgggtggaggggtaggggtctgatcaccgacaagcctcttcccttccttggtgtcctcatagctggaagtgcccgaggagtcaggaacccttgtgatcagaccccaggaactggagtgtgtccccactgctccatttcacaccagaatctcctccctccgctaggggagaacaatcataagcccctagcactcccaatctcaggaggcttccctgcccaggtccaaccagcaagcctggagacgcctcctcccagaaggcaggaagaatggggccgggtgtggtggctcatgctggtaagcccatcactttgggtaggccaaggcaggaagatcgcttgaggccaggagttctagaccagcctgggcgacagggtgaaaccccgtctctataaaaaaatacaaaaattagccaggcgtggcagtgggcacctataatcccagctactcaggaggctgaggcaggagaatcgcttgaccccaggaggtggaggttgtagtgagctgagctggcaccactgccctccagcctggacgacagagtgagatttcatctaaaaaaaaaaatttttttttaagagatggggtcttgctgtgttgtccagtctggtctcaaactcctgggctcaagcgatccttccacctcaccccatctctgctaaaataaaataaaaacgaagttgtggagaataagggaatgggccctaccctggccgagtcccagcccagggctctgtggggtggtcctgatctggtcgtgttgggatcaggcccctcactggaggtctgagctcgagcaggaagcccccactttgggaggcgacaccgatcgccccagctgcccgtgctcagtggacgccggagcgaggtttgtcccagggcctgacgtgggtgataagtgctgggccgccactcccttctccgcccctgctggagggcgctgggggttgggggagtgtgttcataccctgggagaagtcaaaggtgcccactttagggacaaatggaaacagaaatctggagggtggccccgaagtcctaatccaagcccagtctctctgcggacagctgtggcctgcacacctactgcgtctgtctctggaaacctcgccatcgccgcccctcgcccccctcgcttctgtgtctccctagtgggaagttgtccttggcctcagtttttctgacatacgtggttcatgttggcgggggcgcacacagtaggtgtggagggaacaggcggcaggtgcagaggccctgctcctcctcctgcccggccccagagcaaaacaaaggccacagtcaggaggatagcttgctgcctgtccccgtaccagggccctggagggagcacccaggcctcggggctgggcagaggtggtggccaagtggggggcccccacgggctgctccacccagtgactcagccccaggactgacctccttggggaaaacaatggtggcttgtggttaccagcggaacctcctggcaggcgcgagccccagggtgccctggggcccagggaggagacccctagtctcagtttcctcatctgtacgatacgtggaaccacacaggcaggaggacctcacaggaaagagccacattcaggactagacaaggggtccctcatgggtcatcctgccgggacagcagggactgagtccatcactgtccacagtgctacgatgcgcggcacaaggccccgttcgctgtcagtgcccgataattgaatagtcttgtacggcgcagtggcacacgcctgtaatcccagcactctgggaagccaaggcgggaggatcacttgtgcctaggagttcaagaccagcctgggcaacatagggagaaccccgtctctacaaaaaatacaaaattagctgggtgtggtggcgcgtgcctgtggtcccagctactcgggaaactgaggcgggaggatcgtttgagcccaggaggtcaaggctgcagtgagctgtgatctcaccactgcactccagcctgggcaacagagcgagactctttctcaaaataataataataataataagaagaagaagaagaagaagaagaagaagaagaagtccgtgattggatggttgcttcccttccgtgggtgaaactgaagggctcctcgggaggactccggctgccacactatggcttggaccctgagtgtgggtggggagtggcccacagtgagctccctacactggaatggggagagccagacccggccacagacaccctcagacccatggggtcagggctgggccacaaggaagggccgggggctgaggaggctggggtgggattggagctgcttggagaccctggctccggagaggcctctgcgggggtggggggcggctgaggaaggcaggcatcagctgtgagcacctactgtgtgccagactccccccttccactgtccagatggagaaaccgaggcccggagagtagcacgaacttgcctgaggtcacagtgaggtggagagggatgagggatttgcagcacagaccctgggacccacagccctctccccagacctgcggcacgtggaactctctgggcacggagggtcggactgtggacagcccagtttgggtgtatagcaggaggggcttgtggctttggtggggggcccctgtggccccgcctccccgccggcctggcataggtgcagcattgaactgtgatgactcaggggctccagataggggtgggaaaagcctcccaggtagaggacaaagcaaacgtagaggcccggggtggggatgagcttagcaagttctggaccatccagagggcaggatggctggagccaagcgggccagcgagatggtggcatcttcccaggctgggagtggagtgtaaatttccctttggggccccagggagccctgggagattgtgttattttcatttatttgtttagttattttacttttttttttgagacggagcctcgttctgtcgcccagcctggagtgcagtgctgcgatctctgctcactgcaacctctgcctcctgggtttaagcgattctcctgcctcagcttcccgagtagctgagattataggtgtatgccaccacgcccagctaatttttgtatttttattttattttacttatttatttatttattttgagacggagtttcgtccttgttgcccaggctggagtacaatggcgtgctctcggctcattgcaacctccgcctttcgggtgaaagcgattctgctgcctcagcctcccgagtagctaggactacaggtgcccgccaccatgcccggctaatttttgtatttttagtagagatggggtttcaccgtgttggccagagaggtctcgaactcctgacttcaggtgatctgcccgccttggcctcccaaagtgctgggaatacaagcgtgggccaccgcgtccggtcaactttttaaattattattttaaattattttaaatatttttagagacgggtgtgggtggggggggtttcactatgttgttcaggctgttctcgaactcctggcctcaagcgatcttcccgcctcggcctccttcaaagcgctgggatcacaggcaggagccacggcgcccgatcctaggcggggtcactttttactaaaatgtagacacggactactaagaatcaggaagccagatctggcctgagttctgtccaaagtcaggtccaaattcacagatgccgagacggagactcaagtcggcaaaggcaccgctgagactccccgcggggctctctgacccagagccggagccagagtcggttttcccgccgggaaaatgggtctgacgtagccccctcggggccgtgatacccgctcgcaccactcagcacgcggggccggcccgaggaacgcaaatataaccaagcagaaggctccgcgcgggcggccacgccaacctgagaacaaaactccaggacccaccccggccgcctctcgcggcctctcgctcgcagagtcccgcctctgctgaggggcggggccgagaagaaaggaggcggggcctcaccacgaatggctaggatccccgcccatcagactttcgcggcttccgattgaccagactgctctgccttagctttcaatctcacgggccttactcgcttgcgtcatggactaagcgcacagctcgtgtgtgcttccgcggacggggatagtccgtgatttctccccgcgccgtggcccgaccgcctcctctgcgcgtccccgctcccaggctctggacctcacgggattcggggtcctcacgagggtgctcgagaggccgagctagggcgttcgggcccgagccgcccggaggtggcggagggatccgcgtgggccgccgggcggggcactcgggggcggggcaggggcggggcctgcacggggcggggcggggcggcgcgggcggggggcggaacatgtctcccgccgcaggaagatgaggcagcggcggcggctgcgggcgtagcgggccggagccgacgcggcggcgggcaccgcgggcaccgcgcacgccgctgccccaggggcgccccggccggccgcgcgcacgggccccgcgggacgggccacgcgggggtgggaggggcccgggccacgcgcgccgccgccgccgcccacgcgcgaccctcgggggcccggccgcgacgcacctttgtccgggggggggcccccccgcttcatgccgccgcccccccccacgcgccgcgtgcccggccgcgcccagcaggtgagcccggcggggggcggggggcgcgcccggtacccccgtgctttgtgcccagggaaccccggcccgccccgcgcgcgcttgttgggggggggcgcggaggaagttggggcgggggcggtgtcggggggcgccccgcggcccgggagtcattgttctccaacttcgcgcggcgccgggggggcggcgacgtggaggagcccggagctcgccaggcccgcgtcgcccccgtcgggccgggcacttcgggaaactttaagcagccccgggcgggggcgcggggggcgccggacgggctgtgcaacttaggcgcgaggaccgtcccccccagcccgggcgcacggggaccccggggcgccccctttctcgggtagaggggggcccggcccgggcgccggagtttggggtggggagcgcgcgggagggacgtccttttgtctgcgcggggaaggtgccgcgcgctgcaggcgctggtcggggccgggcgggccgggggggggcgcgcgggtaacatctgctccgcgttaatgcggggcgaggcggcggccgcgctgcgagcttcaaaggctcccgggccgcaccgcctgcaccggctgcggggggaggggggtccggcttcccgggccgcctccccccgggaaaaaggcgttccagcgcgccccccgccttcggcgccgtgcaaagtggcttcaaacattctccaagtctctcaaagtccttgggacgccccagaagtcttccagctcccgtagaatgcccgttttagctcgccacccccccaactaagtctgtcttaaaatcggtttcagctaccccacaaaaaagtgcggtttcgtagtcctcaaaaaaagtcagtttcacacgccctccaaaaaagaaaaaaactgagcgggggaggggctgcgctggggcgcccgcttcacacccggcctccagttggcagacaaagaggggatttctctgcttctgaagttgggtctccctcgacctcggaggctcctccccacccccagcctcggaggtgtctcccgggctgcccccgtccccacctggggacccctggggaaagtcgagactggaggggcctggagtgcatttctttggaatggaaatttttctctgtacctttttctgggggtggaatgggtcttggcaggtggatcccccatcccccatcttagaatggagccccctgggaccacgcgggagcaccctggtcttgagacgctctccccgctcatggagggcaggcaagggatgttgtcaaagttttgcttaaaaataattcccggatacatcgcgacagtaaagcaatctagggctgttttttttttctttcctgaatactgttggggttttcttggggggagggagattgagggtggaggaaagctttgctggtccctgcataggatgcgcgtcccccccacccccggcactttaagtcttgaagcttgtaaaagagtttcgtggttttctgacttgtggatttccttcatgttgaatttgggggcgacctggtcttcaacgggctgtgccatctgctgggggaggggggaatcaccaaatttccctcggggcggggtaggatcgggctgttcctccctttcccgggggtagggggcctcagaggaagcccggggttggttggaaatgagagagttggagaaaggagaggttctggctgccctgcgtrcagtttaaacttggcaacttgatgccctggtgttccctgggggagttagggagtttatatttgcacaccctccccccatttttcagactccctgtggtctctggggaggactctgcagggacctagactctggaattccagcttccctgcgcctgctcccagggctccccgtgcccccagggctctgctggaactcagaccccagggcggttgagggttttttaggtggcttttagcactctgtgctttgrccactcacaactcttctcccctccctgtttctccctgtccatctgtccccacatccaccaagcrgggtttccaggcctgaggtgcccgccctggccccaggagaatgaaccagccgcagaggatggcgcctgtgggcacagacaaggagctcagtgacctcctggacttcagcatggtgagccaggacccccgcccagcycccgacacccctttgccyccacagttcacgggaaggttttcaggggagagtgtttgctgaatacttcagcgatggagcctcagctgtttggatgggaggccccggtggggctgggggagtgggccgctctctggcaggaggctgacagcgcacggcagcacgtgtgctatggggcttttgcccggacgcagcattctacagcctactgctttacagatggggaaactgagtcctcaggggcatggtcctgggcccccagcttggctgggtaagcaaaatgcggccttgatcttctgatctgtaaaatgggcctgatcagggtcgcttacctcattgtagatacaaaaattaaaagtaagtaaaagatcactgcactccagtctggttgacagtgagaccctggagaccctgtttcagtaaatgggaggggggctgggcacagtggttcccacctgtcattccagcactttgggaggctgaggcgggaggatcgcttgaggccaggagttccaagtccagcccaggaaacatagtgaggccccatttctcaaaaagacaaaacaaaactcaaaaaattagctaggagtggtggtagatgcctgtggtcccagctacttgggaggctgaggcaaggagaatcacttgagccctggaggttgaggctgcagtgagctgtgattgcgccactgcactccttcctgggcgatagagtaagatccttcctcagaagtaaaggagggggtgcccagtgctgagcggaccaccctccgtgaacagggcagacacracctgccccatacgggactcccctggtgggcagaggatgcgggcatgaaactgactgtgtggttaattagtcacacgtgggtgctgaagttaagctgccagaagccgagcttgggccaggaggaggctggattgggattgagtgggaattcatgggccaccgagcagacagcagcgccaccattgtgactgccacggttatcactgcggagcaggcaggcccggtggggagggcggggcggcttcttcagagtcttaggtggttggatctgtccctgtacggcccattctccacctgggtgaacggaggctcagagggtgctggtcctcagaagtcacacagttcaggcaggtgcagtgaggctggaatgccggagccccctggggtaccggccgctgacgggtgctgtaaaggcccggggcctcggtttgcctgctggtacagtggggccatgtgttatgggttcctggagaagcccagggaccttggtttgtttcttctggcctgtctacagatgtccttaaattctgctccccaccccccccatgcccagtggcagcgtttggggttgaaacaggttgggggagggcactttcagtctgaatttaaccctcccgcctatgaggcacaggccactgaggtctgtcaaaaacaaaagtccccaaactgaaacaacaccggccaccctgcggaaaaaaacagcccaagggccggaggggccaaggctccggaagggccatgctggtatttttaagccccgttttatttttgcttccctggctgagtaacccgaggtgcagttgggttgttttttgttaaactgacaagtcacagaccgctgggctggaacagaccagcgtttggggggagggggcacaggttcagccccaggacctgactcctcacctcaagccactcagcacgtctccccatcccgggtcggagccgttcccagatgaggaaacaggctgggagcggcgaggtgcccgtcctctccgggcgtcccccctcgggctttacccagaggtggagttccacctccctggccaggacggggaggcagaggcagcccctgtgactgcccgcatccccactctgttcctgcatgcctgccttctgcccctgccgaggctgggtcctaggggaagcacttacttccctggaccagatgcgtataaagtgagagaacagggaactccaaataaatacgagggagaacgctaacccaggctgttcccagcgcgcctttgtcctgccctgacccaggctagctttggtcgggaacgaaggacccgccagcactggcctgggctgacatgccctgcctgggtcccaggcagtccctgggcctgagtcaggggcttcaggaatgaagggggagcgagtccctaggaccgaggctgttggaagcgagctccccaggccctgccgcgtgcgagactcccatgggcttttgggtttcaccacgtcccacacagccagagccctcggtccatttctcagaagaggaaactgatgctccaaggggtgcgggggctgttctgggctgctcatgaggcctgcagagcccacaggacacagcccggtacccatgtgacctgtggcacgttggtgcagccctggtgtcctaggggacaaagcagatagaaatgcagttggctgtcccccacagcaggcctttgtttcccaaatgagaggttggcccttggaggtctgggtccaggggaggctgggygcaccggagcctgcgggagggggtgtggtccagggcgaacactgccttcagcgcgggtgccacccctacccgcaagaccgttcttcctctccagggccaggtgagaatgcggcctccgtttccccttctgcaggaccagggagtgggggacaaccccgcttcctgggtcccctttggacctgtggatcgtggccacaggcgctgtgccttcgcctcctggctggctggggaaggtgttggggatcttggctgctcctcagaaagcccctggctctgattccagccactttgatcacttaagccccgatgggagccttaaaacgcagccccttggggcagggcggaggcttgttgtgtttttttctgtggcaaaagggtttgttgccgttggcttttccggttaatgccgctgagcccgttaatctttagggacttagtgttctgggtacgggtgagccgggcgggagggagggtggcagtcccacacccctagcacccaggagctggatcagctgtggggtgcagcctctccccagcccctccagcttcctgccgggcccggggctccatcccgtgtcttcctcgacctgctgcctgtctgagcctcggcttccccttttgccaagcaaacccatacccagccctggtagggggacactgggccctaccccccgctccagggaccccctgctccagggcctgccatgcggggccagtgcacacacaggaaacgaggagtcagccagggctcaggcatccggggactctccacatgtccacctgttgagtgtaaacctctcacttttcagagctgaaacgtaaagacaactttgtatcactgtcaagagctgataagttgtatccttcgcctaatgggatacccctccccccagagcaaaggcagggggaacagcragttttcagcggcagggactctgcctggcggtacagcggggtcatcgtctggagttttctcactctggkcgtgggtgtccagggtgcagcgtcacttgagggcacgcgagtcctcagagtcttctggtctgtgatggggcggagcaggacgggccgggcctagatggagcgcagtctcaggttccygggtgtccccagctctgctcccagcttgggtttgaacccgggactgtagggtttggtttgccacccgccccgctcacgtctcccctcccctccctgcagatgttcccgctgcctgtcaccaacgggaagggccggcccgcctccctggccggggcgcagttcggaggttcaggtaggaccccgcyttcctgccagcgctcgtggagtgaggagatcaagggtctgttgaagacagtgtgcgggcgagggaggctggggcagcaaaggagggagacaatggggaaagggccacacaggccgggtcrggggcagygagcctgaagacccctgaaatcagctgccgttgcccgtgtgacctgccttgggagcccgagcccctgagcccctcgtcccctcgtccctcccgcgcctggagcctgggtctgggggctgggtggggcttgtttttaggcgcagggttggagctgggcctgtgtgtgggtggggatctcgagcatccgtttctccagtcaatccataagggggaaactgaggctctggagagggcgtggtgcgggatcccggctctcactggatcccacccaccttgtgagcctcgacgactttcatttaagcaggtattaggcgcttgctgtatgcagggcccagcaccagggtgaccggccattgtggtttgcccaggactgaggggcaattcctgggacccgcggctttgagtgctcaaagcagaaacatcccaggctgacctggatgagcgggtcaccctcgctgatgacacagcagtgggcgggacagataggggagacgtggggtcctgggggtggcctgaaaatcacactctggagcrtgggcagggcttcacggcacacccagcgagggccaggttgccccaaagcgggacctctagtgaaggtctccgcagagggcgtgtcggggcagagccctgagggtgagaggaaggggccgtgggagcatgaggggaggaatttgccaggcagagagagcagcccgtacggacgccctgcggtgggaccggccggcggggcgggctaggggygctgtgttcgttgcaggggcagcggggagccctggatggttgtgaatggagagagggtctagtctgatgtgcatttgggcrgcccaggctggctgtcgacaggatttggtgggggaggttggggcgggtgcccccratgctgcttcagagccacgggtctctttgtggacatcagcatctttccggggagtgggggcctcgggttggggcctctgaagctgtgtccttcctgcctccgggatctgggtggaaagcgccgtcctgcagttatctccagaatcccccaggggtgggccctggctggagtgtcggggttttgagtggtgggcaaagggggttctgtacttgggcacttgcacccccacatggagagacatcgctttgctgcccccactgcctcacactggccttcccctctacgtgaggaagtggccacagggctggccggaatatgctccctgaggcgtggaaatccccaaacgccaccctgccagccccccggaaacagccccaggaaccggacatgctaatgcttccctgtgtgaggcagagggtcaggccctgggggcttcctggaggaggaagcgcaactcccaaggccgtccacccccattctcctgggcctctgggtgggcttacagcagggcctggtggggagggtggggtgggaggtgtcttccctcgtcccctgtcgcctctcaccccctcagccctggcacggaccactgtgagattggtccctgggtaaccagagctgtggtgtgtaggccgtgtggacctgagaatgctccctctgggttgcctctccctggaygcccagcccggtcccagcaggaacctgccaatgtttgcagatgtattttctgtggttcccacagagtctcgccctgtgctccggccctgccccaatgctgcaggttgggagggtctcrccttgtcccctcacacgttagggcggaggctttggagggcccagtgaggcccagtatgttgcattttttgcccttgagggacgtgatgtggctgctccagcctgggaccccccagctcctggacacagaggggtgaccccctccccgttcagtccatgcagttaacgcccgcctgagcccgggggtggtggaggatgcagagctccaaggcctgagttggtggcaccctcctcattgcctccactcccccaggcccctgcaggctgtggcgctggccccaggtgtggccctcccgaagctcccgcaagatgggcacctgctctcttccatcgtcaggttcagcgagtcgatgggtgcgaggggcggagggatcccggcagggcccaggagctgcagtagctcatttccccgcttcctgcttctcctctccgaggacccaggaagaggggagtttggggctcatcagcaggatggagccccggagctgtgggatcccttcccaaacctcggcttcttcctggaacagtgggtgcagcttccttccaggcggggcctagttggcttcggggacgccacccttcgccaggagtccccaacgctgatggctgatggggtmccccagccgcattctccaccttggccccttcttcatgtgccctgttctagctcccttttaagtcacctcgcttttcttaagttcatttgaaaggaaactttagatttgagaaccagaaacccaggtgagaataaaaggtgtccctgaaaattaattaaacataagttttcccctgtgaagggtctgcctgttcttcgatatttataaatatttaaaaattggtgtcgagagaggagttaggtactgggcaaggtggctcacacctttaatcccagcactttgggaggccaaggcaggaggatcgcttgaggccaggaggtcaaggctgcagtgagctatgtttgagccactgcgctccagcctgggtgactgagagaccccaactcaaacaaacagaaaagggccagacacagtggttcatgcctataatcccagcactttgggggaccaaggcggaaggatcgcttgagcgcaggagttagagaccagcctgggtaacacagcaaaaccycatctctactaaaaatacaaaaattagctgggcgtggtggcgcacacttggggtcccagctactcgggaggctgaggcaggaggattgctggagcctgggaggcggaggttgcagtgagctgagattgcgccactgccctgcagcctgggtgacagagccagaccctgtctcaaaacagaaacgaaacaaaaaaggcattagagattaacgaataggaaaccaagattttctggttgtctggatcggaagacatttaaaacgggaataattttcgtacgccttctcccacccaccgcctcccatttttggaaaccctcaggcacaggtctctgagtgacagcctatcttctgccaagacagacaggctctgaggccacgggagacaccaggaaattgcttattgacggaccaaaggaaagttctttcctatttttcatttccccgtcgctttctctgtccgtgcgattgtaagtgtgacacacggtcagagtgaaaatccacagaacggcacctccgcgttctgctttaagaggaaaccccgggagaacctggcgcatgggtcatttcctccgggtgcgtgtctgggagtggaattgctgggtccctggatgctttttcacattgaaarcgtcccttgtgaccgggcgcggtggctcaggcctgtaatcccagcacttgggaggccarggcaagaggagtacctgggactaggtgttcgagaccagcctggccaacgtggtgacagcacggcctgtctcatttaataggtgacaaagatcgtgtcctttcacctgccacttgtttaatagagggcggtggtcttctcggaaggggattgaccctgtgaatggctctctggtgaattttctgttactctcttgggccctcgtccttgaagttgatccactttttattctgaagtctttcgggattcacaggaagtggcagagtgttctcctctcacctagccacccccaggggtaccgtcccgcccacccgtggtgctgcgtcagacctaggaagccgacattggtgccgtccacagatcctgatcagattccaccggctttacacgcacgtgtgtgtgtctgtgtgtgcgtgcgggtgtgtgtctgtgcgtgtgcgcgtctgtgcgtgtgcgtgcgtgtgtgcgcacgtgtgtgtgcgtctgcgcgtgcgtgtctgtgcgtctgcgcgtgtgtgcgtgtctgcgtctgtgtctgcgtgcgtgtgtgtacgcgtgcgtktgtgtgtgtgtgtgtgtgtgtgtgtgtgtgtagttctgtgcagttttgagacatgcaccttctttaagcccaggaatcaccaatctgttcttcatctgtacgattttttttttttagggaccaggtctcactctgttgtccagactggagtgcagtggtgtgatcataactgactgtagccttgaagttctgggctcaactgatcctcccacctcagccttgtgagcagctgcgaccacctaattaaaaaaatatgtattttgtagagggctgggtcagcggctcacactggtaatccccagcactttgggaggttgagatgggagaattgccggagcccaggagttcaagaccagcctgggcaacatggagaaaccctgtctctgtttaaaaaaaaagaaaaatttcagctgggtgcggtggctcacacctataatcccagcattttgggaagccagggtgtgtggatcacatgaggccaggagttcaagaccagcctagtcaacgtggcgaaaccccgtctctgctaaaaatacaaaaattagctgggcgtggtggtgcgtgcctgtcatcccagctactcgggaggctgagacacgaaaagcacttgaacctgggaggcggaggttgcagttagctgagattgcgccactgcactctggcctcggggacagagggagaccgtgtctgaagaataaaaaaatattgtctagatggggtcttgctgtgttctccaggctgatcttgtattcatgagctcaagtgatcctcttacctcagcctcccagagtgctgtgattacatgtgtgagccactgtgcccagcccaatttttcactttgagtattttgtgtaaatggaatcctatagtttgcaaccttctgagattagcttttattctgttacgttagcataattccctggagatccagccaagctgttggctgtatcttttttttttctttttattgctgcctcattaacttttttttttttttttgagaccgagttttgctcttgttgcccaggctggagtgcagtggcacgatctcagctcactgcaacctccgcctccgcctccgcctcctgagttcaaacgattctcctgcttcagcctcctgagtagctgggaatataggtgcctgccaccatgcctggctaattttttgtagttttagtagagacatggtttcgccacgttggccaggctggtctcaaactcctgacctccagtgatccacccacctcggcctcccaaagtgctgggattacaggcgtgaaccaccgcgcctggccgcctcattaactttttaacaacatcagtaatacaacaatttacatcactttttttttttttttgagacggagtcatgctctgtcacccaggctggggtgcagtggcgtgatctcagctcactgcaagctccgcctcccaggttcacgccattctcctgcctagcctccctagtagctgggactacaggtgccggctaagtttttgtatttttagtagagacggggtttcaccttgttagccaggatggtctccatctcctgaccttgtgatccgcccgcctcggcctcccgaagtgctgggattacaggtgtgagccactgcttacatcagtgtttcttgagcactgtgcattggacacaaagcttggcttattcactgggaattctcagttctaacaggttagcgaaataggtgtaattattaccgtattttactggtaaagaagctgaaacttagagagtttagtaaccattgcgctaattttttgtatttttagtagaggcagggtttcaccgtgttagccaggacagtctcggtctcctgacctggtgatcctcccgcctcggcctcccaaagtgctgggattacaggcatgagccaccgagcccggcctcatttggctgtttgataatgtttgtaggcgcctgtctgtccacccgtgccaaaagtgctgggattccaggcctgaccctctgcgcctggccccgttcggctctttgataacgtttggaggcgcctgtctttccacctgcgcagggaggctgagggcgccgcggtcctcaatgcgccaacttttaggtggtttctttgttcttgactcggctgccctgtgcattttctctctctcgttgatttttcttctggagaatctgcttcattggcaaatcgatattgatcaattgatcaattttcctctttatcggcatttcttctctttctaaagtttttggtgactttcagatcacaggccccttttgctgacttctgccctcttctgttccatcagtgtggtgttgagggttccaccccgtgaaccccatcccattggtttccataatgcatgtttttctcatattactgacatttgttcctttttttttttttttttttttttcctaatttcctcttcaggtcaggttgcttcagaggtttctgagttccaagttggaggtcctttcttgatttctagatctccagtgccaaaactcagctttggcttaaacggtagctactgtttggaggacgcagagctcctctgccgaggctgaaacatggattatttttgtccttctttgtgagtacttgagggatagttggatgtggagctgcgaggcctttgaaccatatttagatttttaatctgtttaatgtcaggctgagagcagcgccatccccctctgttctgtttgtcggtttctctgttgacgtatttagatgccaggattgtgggcttgtgtgggctgagacagtgggatttcgttgtgggtcgagccattgtcaacaacaaaaaaatccgttccttggctggtggtggtggctcatgcctgtaatcccagcactttgggaggccaaggcaggtggatcttctgaggtcaggagttcaagaccagcctggcccacagggcgaaactccatctctactaaaatataaaaaattagccaggcatggtagcaggtgcctgcaatcccagctgctcgggaggctgaggcaggagaatcacttgaacctgggaggcagaggttgcagtgagctgagatcgcgccaccgcactccaccctgggcgacacagcgagactctgtctcagaaaaagaaacctcccttgaattgaaacttcgatatgaaggttgcaacccttcctttttgttggtgtggcttggcagatctttgtgctcctggttgtatctcctgagtcgcttgtttcaaaactgtctttggtcggcaccrtgttttcagattaaagacgttaagcacccgtccatcttcgttctcagcttttccttccatcgtcttattttgtttttccatctgtgtgctcccaactccggattgcttcccccggtgtgtgttttctgaagctctgtaccgctttgcggctctgccagtggttcttttctagttttgaataacacgtttaaggccgtgattgaatagcggttagtattctgcgttgtgaagaacacgtttaaacacgccgtttctcgcgctctcaacgtccgaagtgaaatcgcatctgcccccttctgtgagaaggtgaaaattgagcctgtatatttctcttccctgctggtatttgctaccaataaattgctacttttaaaaaacattgtccgaggccagcggatcatgaggtcaggagatcgagaccatcctggytaacacggtgaaatgccgtatctgttaaaaatacaaaaaaattagccgggcgcggtggtgggcgcctgtagtccagcctgggcgacagagccagactcagtctcaaacaaacaaacaaaaaaaacaaaaaaacattgtatctgttcataattgtgtatttgcatcttactaggaaacatttgtatcattaaatagtgactttgctacttactgtgagggcttgagcaaatggcatctatcttttgcgtcagtttccttatctgtagggtaggggtaatgtagccactgcaaggattcagtgaaatgagagagaactcacaaagtgcccccagagggctttccttgtgtgcctgtcttgttacggcttctaggaatctcttgattcgtaattaaatgtgctcactgtctacttcattccatagaacccccaggctctgccatttctttgaggatccatggggcttacaggcttaagacagtcttctcgttttttagggtaaatcattgaacttcttgaacttcatcctttttgttccatgttgggttccctcttgtgtctctttttctttttcttttttttttgaggtggagtctcgctctattgcccaggctggagtgcagtggcacgatctcggctcactgcaagctctgcctcccgggttcgcgccattctcctgcctcagcctcccgagtagctggtactacaggtgcccaccaccacgcccagctaatttttgtatttttagtagagacgggggtttcaccctgttggccagcatggtcttgatttctggacctcgtgatccgcccgccttggcctcccaaagtgctgggattacaggcgtgagccaccgtgcccggccccgggttggtttctgagcttgttttgaggggcaggttctccggtccccacactcaggtgtcactggtgatgcccatagacatggaagcaagagcgggatggggtctcggttatctctgtggtcactgaaattcaaagcggggccctgtttctctgagttgttacttaacatctgtgctcgatgcccactctcggggccagctctgccctccagggaaaccccagggccttgggggagcggggttgcaaggcgcccctgcttctgggggagaaggttgtccctggttctggtggaggaggttgtcctcggttctggtagaggaggttgccaggcatccccggttctggtggaggaggttgccaggcgtcctcggttctggtggaggaggttgccaggcgtcctcggttctggtggaggaggttgcgaggcgcccctggttctgggggaggagcttgtccctggttctggtggaggaggttgtccccgcttctggtggaggaggttgccagttgtccccggttctggcggaggaggttgtcccccgtgctggtggaggaggttgcgaggcgtccccggttctggcggaggaggttgcctgtgttgcccgcacagcctcactgtgcctctacccgagggcacgtcctgccactttaggtgctgtggggacccccactcttagggtggtgtgtggtctccactcacattctcttcagcctcaggtttgtctgctcgcgggcgggccacagggccctgctgtcccaccccccatcgccagacattagaggcagatcgaagtgggaggctttgcgggatctcgtcagccccccaacaaggaagggctctgtggtgccccagaagcattttctcccccactcgggatcctcctcagaagctgggagcatgtgctacacagcctgcgggccctgaccaagaagacacgacaggaagataaacccagggcggctgcagtgcgcgagctgggccgagggcatcctggtctttcatcttctcccatagcttgaatttagataaaatggaggctgtgcacgcctgtgaccccagggctttgggaaatacaaggtgggaggagcgcctgagtccaggagtttgagaccagcctgggcaatgtagtgagaccccatctctacaaaaaaatttttttaaattcaccaggcgttgtggctcatgcctgtaatcccagcactttgggagtctgaggcagacggatcacttgaggtctgggattcaagaccagcctggccaacatgtatgaaaccccgtctctactaaaaatacaaaaattagctgtgcgtggtggcaggctcctgtagtcccagctacgtgggaggctgaggcgggaaaatcacttgaacccaggaggcggaggttgcagtgagccaagatcgcaccactgcactccagcctgggcaacaagaccctgtctcaaagcaaaagaaaaaaaaaattttttaaaatactgctccacccaaggaaaggccacccccggattcaaacctctgtctgatctcacccgtcatgacccccagaggggctgggaatgggtctgagaagcatcacaagctgcaggggccagacccaggcagggcggtgggacaggctgccatcggggtccttcacgattttaattataaggaggaagaagagacggggcgaggcacgggcttggggggtcatagtgaccctgtatcgggtggcccgctcctactcccgagtaaacggaacctgcgtgaggagctgtcgaggtgttaattggtttttagacgtgaccgtggtatttggtggtggctgttatttcatttgcttttggggactgggttgttcagtacagcaggcattagccatatacacatttttaaatgtaatttttaatgtgcttgaaaaaatgctggccacgtttccagcagttggtagtgtggtccccgtattggacagcagaggtggagaatattttgatcctccaggaaaatgttcttggaagcacagttatttatgagtaaaatgaagacgttgagggtgggtgttttgggggcgtcagctgtgttccaggcagtgctgcagacaaagaggggtcccaggctgggaaggggctcaggcagggggtgtgggtgggggtcacctcctgtgttggggaagaggagagtggtgagatcaggaaagagtttggtctttatcctgaggacggtggggagccatgagagagggtagagggagggagaagagccaagttttgcttctaaaggctccatccggctgcctgaggatgtcagcagacttggaaggaagctgctgcagggactgggcttaacccgctgctgtagctatggggcaagctgctgttctttgggaggagggaaggtgaggaggactcccaggactttagcctgagcacctgagtgggggcacattgcagagctggggctataggatgaagtccccaggcccatctgaagccagaccacctggtggtgtgcctgagggtttggcaggggcggtacacagggctgtgttcagggcccgtgtccaccaatagttttgcctgcccggcatggtaaccccactcctggtactgaagtctgtcgattgggtttcttgtgcagaggcagctgaaggcacttggacagtctttttctgtatcaaggtcagccagccttctccggaaaggaccaaggagtgaatattgttggctgtgcaggacagatggtctctattggaattgattcaactctactgttgcagcaaaagcagccgttgatagtacatggacaaacgggcatagtgtgtgccaataaaactttatttaaaaarcagcttaggggccagacttggtccttgtgtactgtttgcagatccctgctgcagaccaatctcagtcctacccggtatttactaagcgccttttgaagcctccctctcccatttgccaacgagccaccaggcaaagaccagtccccggtccctctcaggaggggacccaacagggaccgggactgggaaaccaccagcctggagcrttccttggctacggatggcctctctgaagcagcatctttcattgttatcctcacggcagcccaggcaggtgggcggcttccacaccccgtgactggaattggaactgaagcccaaggggtgggccgctcctggggccctctccccagcgcccctgcgccgtccactcgcaggcctctcccgaggcagccaggctggcccagggcaggaaggtgcccttcccgggtaaaactctgcggtgcttcaccaaagaaatcacagaaaaccacactctgacagcagtgtcttattctattagtacattttaattagaacaggagcaatggatgcattatgaatattcatggtgggttattaaaatgcatcattaatcggtgggggggattttaataactgtattaatgtgggggctgtccttatttttgtcatttctaggaggaggccaaggctgggtgagggagggttcccccaaagggcagattgaggccgcagtgcctctggcacaggcctgttggagtgaacttcgggggcgatccctgggcatggggccccaggaggtcccccaccacaccaggccttccaggggatgagggctggggtgccaggagcctcccgtttgctcagttgggggtctctgcacctcctggggtactggctatggccggaggggaccmgacaacatgcaggtggtatagaggcaaactgagacccagrgggtgccggcgctgtgcccacccctacacagccagcccaccctggcctcagcagctgccctgttcaccagggcccacgtgcaggaccaggatcttggggtgcagatggcccagacctggcagcgaatgccgtgtggattcctggagaccacaggagccccctgcctggcccccaacccagccaaggcagcatcccagccccccactcataatcacattggaaatttttgattagaaaacaaaatctaaatgaggcgcatgaatattcattagacttggagattaatatgcataattatgcaaatcagacagcaattaaacaccaatactccccggggggaatgattaacacaaaggcaccgaaatagaaggatgcgatttgaaagaagtttctggtgtggatgagcagggagggcagggggcggggcgggggagcctgcagaacagcctgaggtggtgccggtcacagacatcagcactgggctgggtcccccaggcctggctctcgggaagcctctggacttgggagttggacatggacacccccagccctgcaaaagtagggcctgtttgtaaatcatttatagagagggaaaccaaggcagggcagcaactccgtggccaagctgaggaggcccagggcccgctcctgcttctccacgggtgtgctctgtggcccccgatggaagggggaaggatccaagcaggccctccctgcccagggcagaagattctggagtcctgggcgttgcctgtgagtgttctgagagataagggccccgcccgccccgccccgggaccaaggtcctcgtcccgtcccttgctgcgccgggaactcctgccccacgcaggcttctggtctccacactgggcttgttcctgggtgatgagattcggctccaccctcacgggctgccagcctcctgcccgatgggtgagcctctgctgctgcttcagcaaagggcggccccacttcccacactggcaggtggggacagggagaccctgggcctccccagagctcatgggttagcttccacaccctcatgctgtcatgagcctttctcacagggtcagaagagtctgcatctgacacagagaccccagtccacatagtcagggctgggccagagggagggacttggggctgatggggaggaggctcggcgtgagagtgaggtctttgcccaaggagggtatgaaagctggggctttagtgggtgggtaggagttggccagcagagagccgacggaagagttaatttaagtttatggacctgtaagtgctccgagtcccagggtgtctgggtgttagctgctgactggtgtcctcatgagtcgggctgggtgaggctgggttaggaagggttccacaagccccccgggtccactgaggtttgcccctgagatgatgaaccgaagcttttagagctgggcaggcgygagggtgacccataactctctctgtcctgcctgcaggtcttgaggaccggcccagctcaggctcctggggcagcggcgaccagagcagctcctcctttgaccccagccgggtaggagtccccgtgaggcctgagaccctgagtttcctgtccccagagttgggggcgaggggtgtggggaaactgaggctgagagaaggggccasccttccaggggtttggactgggggacatgggtttgagtcctgcctctccagctgtaatgcggggtggagggggggcctgtgaagccccagcacctctcatccccaccccatctcccctagaccttcagcgagggcacccacttcactgagtcgcacagcagcctctcttcatccacattcctgggaccgggactcggaggtgagtgcctggcctggtgcggtccctctgctgtgcacagatgtgcagacgtgggccttggcatggtcagtgcacgcacagcgccaggcaagtccccagcgttcacccagagggtgtggacagccgaagcctctgcccgtcctgggagcagctgcggggaggtgcaggggacgtggcccggactccctggcacggcactctgcaactaggcttccccgcctgagcgtagaggcagggaggccgttccagaccccacttcctccctgggatttctgcagggctcctcctgcttcccggggaggggtcagccgggctggcctgtgcccgctgggaaggaggcgtaggagttctggagactcgggagggcggccagagtgtgcggtggtcagagcccatgcccttccgcagaccgcccgcccgccctctttccctggggggccctcctgttaaccgagagaatcgtgactcaggttgggctcggtggctcacgcctgtaataccagcactttgggagagcgaggtgggtggatcacctgaggtcaggagtttgagaccagcctggccaacatggtgaaaccccgcttctaccaaaaacacaaaaattagccggtcatggtgttggatgcttatagtgccaactactcaggaggctgaggcaggagaattgcttgaacccaggaggtggaggctgcagtgagccgagatcacgccattgccctccagcctgggtgatggagcgagattccatcttaaaaaaaaaaaaagaatgaagactcaggcctggtgtctggtcccaccccaccacggaacctgggcaagcgccatcctcttctgagcctcagtttccccactgtgggaaagggaccctcccagaaccttcttggagggaggcggtgaggactgacccagctctgcaggccctgcccaatgccaggtgggggttggtgcctggtcttgggtatattccagccccgctgcaggctcacccgtgctgcaggggaacgaaccgacgcttgggaagggcaccctggccgggggtctgcggctgggtggggctgactgggacgccctcctccaggcacctggggctgcgactgggacagtgtcccgtgtgcggtccctcctgcgggtgacacaggaaatgccccgagcttcacatgctccgcctcctgcgggagtgtcaagtcctgtgccccagggttcgggggctcaggtaggggtcttgggggggtcccgctgcttggggggctggtaagggcctcaggggtcccgctgtcgtggtcagcctcctgccccagtgcctcagctgtggaatttgtggtttcatccctcagtcatcctgggatgcgggatccttcccttctctggaacccgacggtttgaggcagtgtttctgctggcttttcgtggtgcagtgggggtgtgcgctgcttagaagccgggagctgtggggcactggacctgctgcggggcccaggtgctcaccgtgtacccctcggcattgttggcttgcggggaaactgaggcccggaggactttggccgacccagccttttccctggaccctgaggggcagcgcctgtttgggccccacagcggggcagggacggtcctgtctcgctttgcccggcctcgaacttggagtacagtagagtcagttggtgtcctgagtaggaagcgaatagcgtgaaggtckggcgggtgtgtctgagggcccaccacgtgccacgggcgatttctgcccgttccccttacggggtaggtgaggcctggccccgcccccctgccgggggtggcccctgcacctgggagcctggttcctcactggctgttccttcctcccagcctcttcctcatacccccgatggccccagggtgggcagggctgacgtgggcagttcccacggcccggccagcaatgcccagagcccagccatgtcccacctgccacccccacgggtggggcccaggccatagccaggcagcttggagagggcaggcgggggtcccggggaggcayggggggcttttgccataacctcagtctcctatggcctcagttttctcacccgaggagccgggcgagtgactgctgtggccgggtgtggcctgtggggtgggtcgtggctgtcatcttccccatgtccccccgggtcaccaagatgaggaaacgggaggcaaaaaacagcagcatttgttccaggagttgggaaatcgttgaacttttaaaattcaaaaatcgggaaatttttttcctgctttgagaataatgtacattactcgatcgcgcgtcccagcccctcacagcagccccagtcacattccgtgcccagtgtcagccagaaggggatttaagtggctcaggtcctgagtaatcggggtgcctgcttcaggcaaggctggatccaggtgtcacygcatcagccccaggccctccacactgggggctcgccccggcaggctgtcctcctccgtagcccaggccctccatgctgggggctcgccttggccagctgttcccctccgtagcccaggccttccatgctgggggctcgccctggccagctgaccccctccgtagccccgaggcctcacctgtcctttgtcactgagcgccccagggaagtgctcattggtggggtgcaggtcacgtgctcattcgcgaatgaaccctggcctgaaggctgaatgctgggcactttgggggagcctgtgcggtgaacctgatgcggtgtgcacaggccccggggctccccgccagggcccccaggcctgtcccctgggacagacaaatgcctctgaccccagcaccccagggcatcagcccctcaacgcctgaaacagaggaaactgaggctcaggaagggcaggggcctggccagcaggaagcagggccactgtgagctctgctgtccccttcccgcctcaccccgtgagctctgctgtccccttcccgcctcaccccgtgagctctgctgtccccttcccgcctcaccccgtgagctctgctgtcccyttcccgcctcacccccgtgagytctgctgtccccttcccgcctcaccccctgtgagctctgctgtcccctttccgcctcaccccgtgagctctgctgtccccttcccgcctcaccccgtgagttctgctgtccccttcccgcctcaccccgtgagttctgctgtccccttcccgcctcaccccgtgagctctgctgtccccttcccgcctcaccccgtgagctctgctgtccccttcccgcctcaccccgtgagttctgctgtccccttcccgcctcaccccgtgagctctgctgtccccttcccgcctcaccccgtgagttctgctgtccccttcccgcctcatcccctgtgagctctgctgtccccttcccgcctcaccccctgtgagctctgctgtccccttcccgcctcaccccctgtgagctctgctgtccccttcccgcctcaccccgtgagctctgctgtccccttcccgccycaccccctgtgagctctgctgtccccttcccacctcaccccgtgagctctgctgtcccctttccgccccaccccctgggcagggcttctgtgggctgcagatgctcagagttggccccgaaatcatcggggaccccttcttgtccccaagcctgtcattgggcaggagatgggcacactgagggcagggctctgcgggagatgggcatactggggcyagggctccccgagatgggcacactggggtcaggctctgccagcatcctgccgtggcgctctcagtcgtgtgcacttactgagagcctattgtaggcacatggcaggcactcgggggccctcaggatgttccttggggtcgcctcccactaaccttccttctccccttgcaggcaagagcggtgagcggggcgcctatgcctccttcgggagagacgcaggcgtgggcrgccygactcaggtgaggggctcgggccrggctggggtgtattttgattttaaacaaatctgtcacccaccctctctgatctgcagaagctctcctggcttagctaggttatgtttgcttcctgatagcgaaaccaggctgggcttgggccagggtgggctgggtgggtgtggaccgggagcagaggggaggtaggtgaggaccagggaggccaaggcctgcagggctgccatgcttagctggaggggctcggttgccctctcctctgagtggcaggcaggaaaacaggccatgcagcagggctttgcaggtgtggaccccctggggagcccatacaacaggcccctgtgcagccgagatcctcacccacgctggccctggttgtgaggctgggggaggatgttgggggctgtgaccagccacaggggtcccatgcagcctccggtgctgggcacccccagggttcctccctcaccccaggacttcatctctgtccccgccgtcagctcctagctctcggtggggctcggccttgtcacaggtggggccgtctgtgtgctcactgtgcccaagccagagcaacagtagccatagtgatggagggggccagccgggtgccaggctctgcgccaggggcagatgcgcgtttccctatcagtccccgcaacgaggggccgcggcctacgtgcccattttacagacaggaatacgcaagtgcccgggctccccatccgagaagcagaactagggctcgggccctgctctctggcgctcccgggtgactcatcgagccccgcggtggccacacagggtgcgggctcaggacaggccgggcctcgggagaaggccctgtcctgggcgctgggccaccccgtggggccactggatgatgatagaacagatgattcttttttttttttttgagacggagtttcgctcatggcccaggctggagttcaatggcgcaatcttggctcaccgcaacctctgtctcctgggttcaagcgattctcctgcctcagccttttgagtagctgggattacaggcatgtgccaccatacccggctaattttgtattctttgtagagacggagtttctccatgttggtcaggctggtcttgaactcccgacctcaggtgatccgcccgcctcagcctcccaaagtactgggataataggtgtgagccaccgtgcccggccttagaacggatgaaatgcaggagtcagttccgggacccggctcagggcagccctggctccccaggaagaaagcccgtttcacactaacatgtacagaatccaaccgagggctttacaaaacaaaaccaaaaagataggaagcagccgggtgcacagacgcttagccacgcagctttgtactttgcrtctcagaatcgggggagcagccccttgggttggccacactggtatctgtttctcagtctttcgttcttcgtgaaaacagcagtgtgggatgcggtcagtctcaagtcagaaaaacacagcaggtgtcacagagaaacaccgtgacaggcagaaggggcatcacccactgmrgggcgggtctgagtggcttcggcctttgcagttttttcttgaatggaacagcctggggtctggatgccagctgggcgctttctgaccatccgctccccaccaggctggcttcctgtcaggcgagctggccctcaacagccccgggcccctgtccccttcgggcatgaaggggacctcccagtactacccctcctactccggcagctcccggcggagagcggcagacggcagcctaggtgagcggggtctggcyggggcatcgggggcttctgggagggagcctgcaaagggaggtaggaggcttcccgttagctgagggcaccagagggagcagaccccgcaccttccaggtcctggctggacgtcgggcgctcgggccgtgggagggatggacggtgacggggggtcgaggcaggggccggcgggcgtggcacgtccagggagaggttcctacgagcctctggtcccgaggttcctgcagctgacgggcacgggctctgccatgtgctttctgtgtcagatgcctcatggggctgcatcgtggctcctctgcactgagccctgctgcacacgcgggcatcccccgcgaggcacgtcacagcctcgggctcaggagcactggacggcgccttgaactacccggggcccattccaggcagcacagtcgccaggcatggcggcactcacmtggggtcccagcttctctggaggccgagacaggaggatcacttgaggccaaaagttgcaaaccattctgggcaacatagggagatcccatctttgcgaaaaattttaaaaattagctaagtatggtggcacacacctgtggtcccagctactcaggaggctgaggcaggaggatggtttgaccctgggagttcgaggctgcaatgagctgcgatcgcaccattgtactccagcctgagcaacagcgcaagaccctgcctgaaaaaaataagcgtgaaatcacccacaaaaagcacaaaaacgtaaaagatcgtggctctgaatagaccaaggacaggagccccatgatgcgggaggaggcctctgttccgccttggctgggcacatgcgcctgggccactcgaacttttcccactgtgcgcacgtccgtgagtgatcaggaaggcgcctgagtgctggtttccgggttacggattttatcctgtaggcgagtttgcaaacagcagcccctagtggtgaagcctgactgcgtgggatagtcggggccatcttggaaggagggtggggccaaggggcttctcagcagagccttggcttagaatccaccaactcctcgttttccaaactgcgcgtcgcgggagaaaaccatcgtggttcttcgacatctttggagccgtataaatagacccggggctttttgttgttgttgctgctgctgctgttgtgttttgagacggagtctttctctgtccccaggctggagtgcagtgacacgatctcggctcactgcagcctctgcctcccgggttcaagtgattctcctgcctcggcctcccgagtagctggaattataggcacccrccaccacgcccggctactttttgtattttcagtagagacggggtttcactgtgttggccaggatggtcttgatctcttgacctcgtgatctgcctgccttggcctcccaaagtcctggtattacaggcatgaggcaccgcacccagccgacccgaggtttttaatatatgraacgggaattgtgagggtctctcctccagggtgtagggcaggggttgttctcatgkccggtggccrgttctcaccccttttgctyctaacagacacgcagcccaagaaggtccggaaggtcccgccgggtcttccatcctcggtgagtcgcacgagggagaagggaccccacagctcgtcagtggcagtgccaggccctgtgtcctggcgaagcttgggaacacacatggcggggtgggccstgagtggacaggccccctgtgatttctgagccaagatctgagctctgacccgaggccgcctccaagggaaggcggggaagtccttccctaggtccagcctctgtctgtcttgttttgagagaaaggcagtcctggtggctgaggcccctttagaaagggcacaattgtgctgggtgtggtggctcatgcctgtcatcccagcgctttgggaggccgaggtgggtggatcacctgaggtcaggagttctagatcagcctagtcaacatggtgaaaccccatctctactaaaaatacaaaaatcagccgggcgtggtggtgcgtgcctgtaatcccagctacttgggaggctgaggcagaagaatcgtttgaacccaggaggcggaggttgcagtgagccaagatcatgccgctgccctccagcctgagcaacagagtgagactctgtctcaaaaaaaaaaaaaaaaaaagcggggggtgccgcaattggggctccctgttacatcctcacagcttcaggctgccccgcatccctgcctccctaccaggcctcgcagatggtccaggctgctgtgccacactcctgcggtctcatctcgctggagggagagggaatttgccgattccctggctcagtagccaccaaccaccctctgcccagtgcctgtgctggccccaagagccctgggcatacatctcctcacccctccagccgaccagctccccacaggcctgggttcggggttagagtcaggttgacttcccaggccaaaggcgtggtcaggctctgctcccaacagtatcactcactcccctccttccccagggtgcactttctctgccctgaaaccgccccccagtttattacaacatcaggcccacccagcatacttcccgctccagcacagcagcagacgttaccaacaggccccagccccacagtccaggcagtgccaaccagtcagagctggcgctactcacagacccctcttcctgttactttagtgaaggacgaatgttgctctgggaccaagggaagctcagcactggaagattgattccagctgrggaacaagggagaaggatgggatggggtgttggagctggggttttgatgggtcgataggagttttctggattaaggaggaaaaaggtttagtaggcagagccagatccaagtcctcaagtacaaaggtcagaagttcagggaggcgggaggtgggggctggaaaaggagtaggagagagagaccaggacatcataagaacctcaaacttggccaggggctgggwtttacctaaaggggggtggctttacagggaagggaaacggggtggtagatgtgctaccaggaggggacaggaggccggcaaggtgcatgggctgatcgtggtccctccgtcctgactgcaccccccaccgcccacccgcccgcaggtgtacccrcccagctcaggtgaggactacggcagggatgccrccgcctacccgtccgccaagacccccagcagcacctatcccgcccccttctacgtggcaggtacatggcagggcgggggctcgccagggacggtagggcagggctggggttccccactcggcccccaccttaccagctcccctccacagatggcagcctgcacccctcagccgagctctggagtcccccgggccaggcgggcttcgggcccatgctgggtgggggctcatccccgctgcccctcccgcccggtagyggcccggtgggcagcagtggaagcagcagcacgtttggtggcctgcaccagcacgagcgtatggtaggacccagggcagggggcagggggtgggcggagggtggcagtgcccatctaacccaccctcctcctgcctgaccccccagggctaccagctgcatggagcagaggtgaacggtgggctcccatctgcatcctccttctcctcagcscccggagccacgtacggcggcgtctccagccacacgccgcctgtcagcggggccgacagcctcctgggtatggcccctccctgggatgcggcctctccgaggggacactgggctccaggcagggtctgggtggggggtggcgaggactccacgggaggcgcaggcgcgtctgctggccctgagagcgggttgttgtcagttctcattgtccgctgtctgcagggcctgccacgtgcgttgggcttgggatgtctggaaacagatctttgaggagcggctttcccgccttacagctgggaaagaggctcagagagggactcacccacccagggtcagagagggactcacccacccagggtcagagagggactcacccacccaggcccagagagggactcacccacccaggcccagagagggactcagttacccaggcccagagagggactcacccatccaggcccagagggggactcacccacccaggcccagaaggggactcacccacccagggtcccctgccagtggcctgtccccagtgcctcaacccctgcagaggctggtttcagggggtcagacagaaaccggacccgagtcaggctgctctccctggcgcagcagtgtctgtgcaggacggcagaacgcaggagagcttgccgtcggcggcagcacccaggccgggctgcgtgggcctcacctctcttcacccacaggctcccgagggaccacagctggcagctccggggatgccctcggcaaagcactggcctcggtgaggcgtggggcatggggggtggccaggcaagtgacctgagaggccggcccctgaccgcccatctctcctggtcctcctcgcagatctactccccggatcactcaagcaataacttctcgtccagcccttctacccccgtgggctccccccagggcctggcaggtctgtgagggttttggggggaggggaggctgaggtctgtgagggtttggggggaggggaggctgaggtctgtgaaggctttgcgggggaggggaggctggttctggtgtctgcaccttgctgggataggcaggcagcggggagggagcagatggcccccaagggcccgtggcatcgctggtcaggaaccgacggtggaagggagtcccccatgggcttgtgttccactgggcaatccaggaaagctgcctagtggaggcagcctccaagccagccctccaaggctatagcacataaccaggcagtgagggagggctgggaggtggcgtccaggttaggtcacagcacaggcaaagccaggaggcaggacctggcagttcacactgcgtgaacatgaggggacattggcgtgcctagcagctcccaggtccgatggggccagcatcgccagggctgtggcctggactctagaatgtgtgcgtgttgccatttgctcacccactgggtatttattaggtactgactgtttaccctgtgcggtgctccggcatgggagggcagaccctcctatccctgtgaggacgtgcttgcttatccgcagggggtcgggggcaggtacaggaggagggggagtgagaactggaggtttccagaaggtctgggtgtttaaaaacacccgtgagtcctcatctctgcccccatgggaagcgccaggaaccctcacttcacctcggcctgtctggtcccacctggagcttgccactttcttgcctgctgctggagcccagcgtgggtcagccagggtggggcagcatggggaggagccccctactgtgtgctgccgagccactttatcctctgagtggggagttggattttgtagatggggaaactgaggctcagagataggaatggcagtacccactgggcacccagcatccctgcctggcggggccgagcagctttgcatcagtgtggggtgccccggaatggccatcttgggcatcaccggaggctggacaggcggggtggttcatgaatccctccccatgggcatcaggccatgctcacaccccgcccctcgcaccccattcacgtccccactcccttccaggaacgtcacagtggcctcgagcaggagcccccggtgccttatcgcccagctacgacgggggtctccacggcctggtgagtgcctgmcccgccccascccacccttccccgacagaatttgcaggacagacgctccttgagaaggagaaacctttttgttagtttcttgtaaataagccccaagctgttattgaggcctcgtggccgccaaggcacacacattttgtgtgtgctcccgggcgccagatgcctggcatatgcagcttcctggggaaggggaagatgggaccaccggccacttgcatgcggaagggacatgaatggaggcctgtggggtccctcggcttgggcccctcaccacccatccccccaccctgcagcagagtaagatagaagaccacctggacgaggccatccacgtgctccgcagccacgcygtgggcacagccggcgacatgcacacgctgctgcctggccacggggcgctggcctcaggtttcaccngncccatgtcrctgggyrggcggcacgcaggcctggtgagcgctgggcgagggtggagctgggcagtgggcggggaccyggctccccctgatgcacccgtctccccacgcctgcaggttggaggcagccaccccgaggacggcctcgcaggcagcaccagcctcatgcacaaccacgcggccctccccagccagccaggcaccctccctgacctgtctcggcctcccgactcctacagtggtaagcccttgagcttgggactgtccgactcctggttccagttggggaaactgaggcactctagtggtgggggtcagggtgggagcccagggcaggtgtcaccgtgggggcacctggtgacatgggcgccccagtcagcaacttcaggagggtgggtaagaccggcggggccggcgttggccctgggcgtgtgaggtggacagctctgggctgcctcttcattcgcctgctcccagacgctgtgtgcctggcagcgctcagcactggggaaggggcgaggggtgcagcaggatgcctctgcctcaggggagacagaccaggagctcgctgcacagtacaggtgccagggagaaggaacgaagtggctgcggtgggttgggggttttgtatggctttgaagatggtggcccatgaggccacaaggtggtgtttgggcagcatctgggaggaggcaagagtaggcaagtacctggaggaggagggtttcaggcagagggcgcagcccaggcaaaggccctggggctggactgcacctgggaggaacagccaggagacccgtggggttggagcagagtgaggagagggagagagggaaggggggagggcggggcagggcaggtcatgcggggccttgtgggctgcggggaggacttgggatttggccatgagaaaggtggcagccgtggagggctgaggagggatgggacctgacccaggtgctcacagataccctctggtggctgcttggaggacagactatgagtggcaccgggagaccaaggcagaggccacagggctggtccaggggccttggaggggtgagcagtgggtgggccctgcatctcctgaaggcggggcccacaggatttgtgatggacaggacttgagggtgagagaaggcagggtggctctgggatttctggcccgagctgtgggtgacactggggctgggaactccgtaaggaaggggacaaaggaaaaggttggggacaaatctggacctgggcctggggattgttgagtgtctcagacacccatgagaggcccaggagaaggtggggtcattgtgggcgctgtcctggccctgtgccttccaccagcccaggaatcctgcctgctttccaggcagactttccaagtaccttgattctatcacycctaggccagggcatctcaccgcagcggctctgcccccaggggacactgggtgatgtctggggacatctacagttgtcagggctgaggggagctcctggcatggagtgggtgggggccagggatgctgctyascaccctgcagtgcccaggacggccccaccccagagaagggtccggacccacaggtcagcagtttccaggggcagccccaagcttagtctttcacccataggctcccctctgtttccttcctgtccttcacttcgtgtgctgaggcctgggctggtcctggtggctggcgttggccgattggagcagagttcactgtggggagcgggtgcatttctgaggctccccctcagggtacgggggtctcaggggatggcagctggtttgctccatgtgagccctgactgattcctggactccccaagcccgggttttgggggtggcccaggccctgctgaatgcagagtggccgcattcatttggggcactgtgtacccttaagccacatgttttgcaattattgttcttgagcttcatgaacacggcgtcccactagcgtgttctttacacgctggtttgctggcttatgttgtgtgtggggtacatgtgtggtgtgagcggctggggtcccattgtgagtgtgccgttggccctggcccgggcgtggggctgtaggtcattccaacatcacgctttcctgccaacctgctgatcaagggtgtgatacacctgttgtcaattcagaggaaaggctgatgaattattttccaaagcagccaagttgccctcccacaggcaagattttgactgttcaggtccctcaactttgctagctgactgggtatgaaagggtagcgcaaagccaccctaatttgcatttccttaatctcttgatgtgctgaagcggacttccacgtgtttctagccatgtggtttccttgtctgtgagatgcctttttggataccttgcttatttttctactgagttactttctttttgtcctttcccattgattgtgggagatcacctcctggttggctacatctgtggtgggtgtcttctattctttggcaaatgcttttcttttcctggtatctttgctgatcaggaactctcaattctgatatagtccagcttactgatttttgttttttcttttttacttgttttgttttgagacagggtctcaccctgtcacaccagagtgcaggggcatgatcacagctcacggtagccatgaccccctggcctcaagtgacccttccacctcagcctcccaaagtgctgggatcacaggygtgagtcagccactgtgcccggcctgtgttctttcaaaagcagcgctttgagcacttgcttggacagctcttggactaaaatgagaatgataaagattagcatagcatctgcacaagggtgacgtggacattcctgaagtgttccaaagttttattcttttttttttttttgagacggagtcttgctttgtcacccaggctggagtacagtggcgcaatcttggctcactgcaacctccgcctcctgggttcaagtgattctcctgcctcagcctcccaagtagctgggattacaggtacccaccaccacagctggctaattttttgtatttttagtagagatggggtttcaccatgttagccaggatggtcttgatctcctgacctcgtgatccacccacctcggcctcccaaaatgctggcattacaggtgtgagctggtgtgagccactgtgcccatccgaagtgttccatatttttaagttaatgattgaaacagtttactttcaccaaaaaagaagagtgttcttttagcatcttagtagattcctgccattgagttgctgcagaatttctacacactttgttccaaaggtggtaaaactgtttccctttcatcttgtggtccttaatctgtctggcattggtagctacacatggcgtgaggtagggatccagttctggttgttggttttttgtttttatttttggccaagacctggtttttccaggaaagcccaagtccctcaccacaggagcacaaagagatatgtcagttggccctggaggccgacgcaggcccctgaccctaggcctgttgcagggctagggcgagcaggtgccacggyggccgccagcgagatcaagcgggaggagaaggaggacgaggagaacacgtcagcggctgaccactcggaggaggagaagaaggagctgaaggccccccgggcccggaccaggtgccaacccacccctcggcactccccaccctcaccccatcaggacgcacatgtgcacaggccacacgcacaccgcacccacactgggaggccgtcggcgggccccacgctcttcccccaacctcactgtctccctctggccccctcccggcgccctccccatagcccagacgaggacgaggacgaccttctccccccagagcagaargccgagcgggagmaggagmgscgsrtggccaataacgcscgggagcggstgcgsgtscgkgayatyaacgaggcctttmaggagctggggcgcatgtgccaactgcacctcaacagcgagaagcsccagaccaarctgctcatcctgcaccaggctgtctcggtcatcctgaacttggagcagcaagtgcgaggtcagtgggggcgcgggccaccagcgtccctgcagcgccaccctccctcgtgttcctgccctcgttctccttccccgcccgccttcctggagccagccctccctctgcagcagttgcctccttgcagtgactgtgcccttcacccctctgaccgcattgccatgactgtccactcctgactgccagcccttctccctgcctgcctcagcatcccctccacagtgggaggactggactctttctggacccctagtccttcaggcctgggctctgtggctcagaactgtatctcccagctccacggggctcccactcgccgtggtcctcctttcttgggaagcccagaacccagctcacagaggccagtgtcccccgatcccagagacaggagctggtgtgcaaaccaccctggccccttcccgtcaggcagatgccacgcaaggccacatgagcccatcccctgtctctgactcagtttccctatctgaaggtgatagggaaacttcctatcacccccatttcccagggccagggggaggaaggatacagacagaccctgtccccacccgcagatgtgagctgactccttccccccgctggcgctggcggctgcttccttaactccttcctttcctcgcctgcaccccgttaaccctttctctcctgcagcactgttgctgggaccggagccagagccccggcccggcccacacgctatcccctcagctctaaggtttccgagtctctgcagccgtgtgtggcacgcctcgcgccccccaagcccgcctctctgctgtctgccttccgccctcccctccatcccgcccgtccgtccctctgcttcccgtggcagcccctcctcacctcgcacttgctgcccgagcaccgggagcggctgggctgcaacctcagggcgtttcctcccccaaagccccccgtcagggcttgcgggaagaaaccagacccgggagcacgcagcccctggtcctgtcagtttggtctgtgcgcttgtcctgggctccaggggccgcccccaccacctggagggatcccctcaggcccctaaggcagggtgggcaggcaagtgggtgaggcagccccctagagactaagacagggcaccaggcatgctgggcactgggccagaccttcacccatttcatcttcaccacaacctagagcagtgggtgccctgatggggaccggcatccattctaccaagtaggaagccagggaacagagcgaggtcacccatgcagggccatgcagcacagaggcctgggccgggacccgcacccctgcggcagcagcaacagtgcccrctcgccagctgcatgctgctcggctggagagggggctcagccttgggcctggcacagaacaggctcttggaacctcagagctcctactgcgaccattcacggtggcagtgacaatggggttcctggaggcctagggagctggccttcccagccaggggcaggagctcagggagggctcatcttggggcagccggagttcactgtaggggacgggtgcatttctgaggctcctccccagggtgtgggggtctcgggggatgggagctggtttgctccatgtgagccctgatttgagtcctggactccccagtcccgggtttttggagtggcccaggtatttgcctgctgagcccgtgtcttcaaggcctcctctgtccacagtgagtctggccaggcctagctgtccatcaccccgcaagtggctgctctgagcagggaaagtcatcatcttgggagggaagaacaaagagaggagcaggcactgggcctcccctgcccccagccctgccctggggcccacagagtgagcagggtcaagggagaagcagttaccctgtgggctcccagacggggaagcagggccccatctccctccacagaaacgtctgggaacagtcagaccttgggtcttcctgggtgtgaccacatccacagcctcccctagagctgagtctgagggcacttgcacctgggcagccagtcgcgtacacacacaggcgccccaccatggggctytgctgcattccagggagcacattcgccgcgtgcacagagaagcacattttcacgcatgtgacaacacacacatcagcatgtggacccgtactgctgcccacaccaacaccagccgtgtacccccactgctgtccacacccacaccagccatgtacctgcattgctgtgcccgacaccagccgtgtacctacactgcagtgcctgacaccagctgtgtaactgcactgctgcccacagcagcaccagccatgtacccacattgctgtgcccagcaacgtaagctgtgtacccgcactgctgcccacaccagccgtgtacccccactgctgtccacacccacaccagccatgtacctgcattgctgtgcccgacaccagccgtgtacctgcactgcagtgcctgacaccagctgtgtaactgcactgctgcccacaccaacaccagccgtgtacccacactgctgtgtccaccaacgtaagccgtgtacccgcactgctgcccacacccacaccagccgtgtacccgcactgctgcccacaccaacaccagccgtgtacctgcactgctgcccacaccaacaccagccgtgtacccacactgctgtgcccaccaatgtaagccatgtacctgcactgctgcccacactgctgtgcccaccaacaccagccgtgtacccacactgctgcccacaccagcacaaacacaagtagctggataccctctccacaacccagccctgccctcccacccagccttggcgcatcactaacagaggcctcggtgctgtgacccagcagtacggacgaggtgctgtccctggaggagaaagacctgagggaccgggagaggcgcatggccaataacgcgcgggagcgggtgcgcgtgcgggatattaacgaggccttccgggagctggggcgcatgtgccagatgcacctcaagtcggacaaagcgcagaccaagctgctcatcctgcagcaggccgtgcaggtcatcctggggctggagcagcaggtgcgaggtaggctccccggccagggctgccccagcaccctctcccttccccacacccaggtgcagatgctggggtcctcctgtgcttgccgcccccggactctgtccatgtctgtctttgtggctggactcagacccagtgatgttccccagacaccccctgatacccactctcttctttacaagcctccaccccatccccccagccttctcaaggaaggaggtgagagccggaaatacaggaggccacacgtgatggggctctgcccccacccccccccccgacatcctacccmccactcccacctcacatctttctcctccctgggaccgtctcccacagagctctcccccctccctccagagcggaacctgaatcccaaagcagcctgtttgaaacggcgagaagaggaaaaggtgtcaggtgtggttggagacccccagatggtgctttcagctccccacccaggcctgagcgaagcccacaacyccgccgggcacatgtgaaaggtatgcctccgtgggacgagccacccgctttcagccctgtgctctggccccagaacggccactcgagaccccgggcttcatccacatccacacctcacacacctgttgtcagcatcgagccaacaccaacctgacaaggttcggagtgatgggggcggccaaggtgacactgggtccaggagctccctggggccctggcctaccactcactggcctcgctccccctgtccccgaatctcagccaccgtgtcactctgtgacctgtcccatggatcctgaaactgcatcttggccctgttgcctgggctgacaggagcattttttttttttccagtaaacaaaacctgaaagcaagcaacaaaacatacactttgtcagagaagaaaaaaatgccttaactataaaaagcggagaaatggaarcatatcactcaagggggatgctgtggaaacctggcttattcttctaaagccaccagcaaattgtgcctaagcgaaatattttttttaaggaaaataaaaacattagttacaagattttttttttcttaatgtagatgaaamttagcaaggatgctgcctttggtctctggtttttttaagctttttttgcatatgttttgtaagcaacaaatttttttgtataaaagtcccgtgtctctcgctatttctgctgctgttcctagactgagcattgcatttcttgatcaaccagatgattaaacgttgtattaaaaagaccccgtgtaaacctgagcccccccgtccccccccccccccggaagccactgcacacagacagaacggggacaggcggcgggtcttttgtttttttgatgttgggggttctcttggttttgtcatgtggaaagtgatgcgtgggcgttccctgatgaaggcaccttggggcttccctgccgcatcctctcccctcaggaaggggactgacctgggcttgggggaagggacgtcagcaaggtggctctgaccctcccaggtgactctgccaagcagctgtggcccccagggctaccctacacaacgccctccccaggcccccctaagctgctctcccttggaacctgcacagctctctgaaatggggcattttgttgggaccagtgacccctggcatggggaccacaccytggagcccggtgctggggacctcctggacaccctgtccttcactcctttgccccagggacccaggctcatgctctgaactctggctgagaggatgctgctcaggagccagcacaggacaccccccaccccaccccaccatgtccccattacaccagagggccatcgtgacgtagacaggatgccaggggcctgrccagcctcccccaatgctggggagcatccctgggcctggggccacacctgctgccctccctctgtgtggtccaagggcaagagtggctggagccgggggactgtgctggtctgagccccacgaaggccttgggctgtgcgtccgaccctgctgcagaaccagcagggtgtcccctcgggcccatctgtgtcccatgtcccagcacccaggcctctctccaggtctccttttctggtcttttgccatgagggtaaccagctcttcccagctggctggggactgtcttgggtttaaaactgcaagtctcctaccctgggatcccatccagttccacacgaactagggcagtggtcactgtggcacccaggtgtgggcctggctagctgggggccttcatgtgcccttcatgcccctccctgcattgaggccttgtggacccctgggctggctgtgttcatccccgctgcaggtcgggcgtctccccccgtgccactcctgagactcccaccgttacccccaggagatcctggactgcctgactcccctccccagactggcttgggagcctgggccccatggtagatgcaagggaaacctcaaggccagctcaatgcctggtatctgcccccagtccaggccaggcggaggggaggggctgtccggctgcctctcccttctcggtggcttcccctrcgccctgggagtttgatctcttaagggaacttgcctctccctcttgttttgctcctggccctgcccctaggtctgggtgggcagtggccccatagcctctggaactgtgcgttctgcatagaattcaaacgagattcacccagcgcgaggaggaagaaacagcagttcctgggaaccacaattatggggggtggggggtgtgatctgagtgcctcaagatggttttcraaaaawtttttttaaagaaaataattgtatacgtgtcaacacagctggctggatgattgggactttaaaacgaccctctttcaggtggattcagagacctgtcctgtatataacagcactgtagcaataaacgtgacattttataacgawgccctgcagtccccgggttctttctggtgtcacatgtttaggaagggaagtgggggggggccctgacgttcacctcgggtgcagcaaggaccgtggtccaccctgtgcactgggcttcctcgaagcgactcctcactctgaggagcccatggctcccagggcggctgggaacctgcatgtgtactcagggctccaggccacctggaagcaggattggctcccggggaaaagcagctccctgggggctgcacttgggcgcgtaggaaccatccaggacctgcggtcctcccagcccccatctgggagggctccccatctcccaacgtcccccccccgggctgttggaacccacttccctgccccttcctgctccgaagtcggctcgaagtctgagtctgtcactgctcctctgaaaccttccacggctccgttgctggcagcgtcaaccccacactccttagtgcggcatctgtgacttcctccacaaccggatgcccacggaacccacggacagagctctcggggggaaggggtgtggcaggacctgtgggggcgctgctcatcccaaagtgcccactggcaggcatctgctgctgtgcccagggacttggccgctgcatctctgcgaggacacagctggactgccctgctcccctacagggttggggtggaaggagtgccttcctggccacttgacggggggtggcccccaggagagagccctttggcacacaagtgccttagggaggagaaggctcagcacagtgactcatatctgtaatcccagcacttcaggtggctgaggcgggaggatcgcctgaggccaggagttccagtccagcctgggcaacatagtgagaccccatgtctataatttttaagggaaagagagtggccaggagttgacagaaggtgctgagggagccctgtccaccactctacccagctggcctctaaattcatgctggaaaacaacttttaaaatatacattggccgggcgcggtggctaacgcctgtcatcccagcactttgggaggctgtggcgggtggatcacttgaggtcaggagttcgagaccggcctggccaacatggcgaaatcccatctctactaaaaatacaaaaattagccgggcatggtggcgcaagcctgtaatcccagctatttgggaggctgaggcaggagaatagcttgaacccaggaggcagggattgcagtgagctgagattgcaccactgcactctagcctgggcgacagagcgagactgtctcaaaaaatcaaaattaaattggttgtacctggtgacacacacttgtagtcccagctacttaggaggttcaggtgggaggatcgcttgaggtggcagtgaactgtgattgcaccactgcactccagcctgggcaacagagccagaacctgtcaaaaaaaaagggtgggccaggtgcagtggctcatgcctgtaatcccagcactttgggaggccaaggcgggcggatcacgaggtcaggagatcgagaccatcctggctaacggtgaaaccccatctctactaaaaatacaaaaaattagccaggcgtggtggcgggcacctgtagtcccagctactcggtaggctgaggcaggagaatggcgtgaacctgggaggcggagcttgcagtgagccaagatcataccactacactccagcctgcagcctgggcgacagcaagactccgtttcaaaaaaaaagggtggaggggacatccagatggtccaacaaaataacaaaaaccggctcaagaaacaaaaaggaagttctatgtcatgttgaatggcttcaggcacagctggatccaggtgtcattacaaatctctctccatctctcagctcttgtttatgtcactgtctctgatgaactcttttttttgtctgtttgttttgagacggagtttcactcttgttgcccaggctgcagtgcaatggcgtgatctcggctcaccgcaacctctgcctcccgggttttcaagcaattttcctgcctcagcctcccgagtagctggaattacaggcatccgtcaccatgtccggttaattttgtatttttagtagagatggggtttctccatgttggtcacgctggtctcgaactcccagtctcaggtgatctgcccgcctcaacctcccaaagtgctgggattataggcgtgagccaccgtgcccggccactggtgaactcttacattgtggcatctggaaactctgggctgacattccagcagcccttgtgttcctgtcctttctcttaatagtctctgtgtcagcccctgcatcccacttttttaagtttccaccaatgggaagagtcttattcaggtgctctctgatcccaagctcaaaaaccccaagccaactggaaagttctacaaacaatgcccagggccgggcccggtggcttacacctgtaatcccagcattttgggaggcggatcacttgaggtcaggaattcaagacaagcctggccaacatggccaaaccccatctctactaaaaatacaaaaactagccaggtgtggtggctcacgcctgtagtcccagctacttgggaggctgaggcaggagaagcttgaacccgggaagcggaggttgcagtgagccgagatcgtgtcattgcactccagcctgggccacagagcgagactccgtctcaaaaaaaaaaagaaagaaaaacagtgcccagactgtggtgtccaaaacctatttccggctcccaccctgagtccttaaccagggatagggatgggttagcacccgcagtccccagagagctgcaggcttggggtgtactgaggggctgaccccaggaggacaggccaggctgggcagaagaacccacggtgtccattccttatcacgaggcctgcaagtgacgctggcgcccgagagacaaatcacgcccagtgccccgtctaggctatggcctttccgttcatgctgtaaaggtgcctgtgggtcaggcagtccaggagggcttcctgagggaggcaactcttgaatatgggggaaaaggcacaaaagtgcaatggcggtgtctgggaatatgcccctcttccttctgcccacaccggcccggtgtgcaggggggaggctggaagctgggagctgagtgagcatgtacggtgctgcgccgggttgtgggagagcagaggaagcagggactggagaaaggcgagcccaagcgagcctggtgcggtggaaagcaggaggcagaaagacctgcctgtcatcagctaagagcatccagagacgttcaccgagcaaggagccaggccaccctctgctgccggaatgaggaataacccaggctcgcaaacggaatcctgcaaagagatttccgacagggcctccaagcaacgggcaacgctgaggctcagggaagcactgccgctcgaccaaagtcctacagcgaatcaggaacaacgcctgacgcctccaaaagtgggctccaatcccagctcttcccctctgtgtgactctgagcaagacccttccccgctggacctcagtttccttcattgtaaataacgttctggcacatactaggcgcacaaaatcactggcaggtagccccgcggagcccagaagcacaatcggccgccagaccacgtggccagaaagcaccgccctaacgccgcccactccggaccacttctccgcggtcgtccaaccctcgccggaagttactgtaagtggcttccgggtctgcgcgcacagtggcggatgatgtttttttttccttcccccccccccgccctccccgcgcgcgtgcgcgccgcggccgcgcctgcgcagtgtagccgggtcagctggacagggtcatcctgagggtgcgactccgccgcgatggtgacccggttcctgggcccacgctaccgggagctggtcaagaactggtgaggacgccgacccgcggccccatccgcgctcccgcctcggcccagccccgcgccgctgcgttccgtatttgtgcgcgtttccgggggccgggccgggccgggcccaggtcccttgttgttcccggtgacagagggggaaactgaggccgagaggcggagcggcgcgtcccggcgtgaacgggacgtgacggacccaaggccaaaccccagcatgcccggctccgcggctaggccgctccaagcctcagtttccccatctctaccgggggatccgaatggtgaccccctggacggaagcgcccagaaggtgccgagtcccgatccccagcccagcactcgcggcatcttcggcctttgccactattttggtttttatgatttttaacaaggagcgtgaaagcttcagctgcgcctgagcccacgtgggcagcgggacggcataggggtggcccccatagaagccgggctgggggtggcctccgtagggttgtctggtgtttccacgtggggtgctaagaagcaaggcctggctgggtgcggtggctcccgcctgtgatcccagcgctttgtgaggccgaggcaggtggatcacctgaggtcaggagttcgagaccagcctggccaacgtggtgaaacccgcgtctctactaaaaatgcaaaaattagccaggcgtggtggcgggtgcctctaatcccagctactcgggaggctgaggaaggagaatcgcttgaacccgggaggaggaggttgcagtgagctgagattgcgccattgcactccagcctgggtgacagaatgagactgtgtcccaaaaagagaaaagaaaaaaaaagcagcaaggtcttagccgggtgcagtggctccggcctgtgatcccagtgctttgggaggcccaggcaggagaatcacttgagcctgggagttcaagaccatcctggacaacacaatgaaaccccatctctacaaaacaaaaaattatcagggcatggtggcacctgtctgtagtcccagctactggggaggctaaggtgggaggatcgtttgagcctgggaatttgagaccagcctgggcaacacagcaagaccttatctctacaaaaaaatttagagctgctgggcgcagtgactcacgcctgtaatcccaacactttgggaggccaaggcgggcgaatcacccgaggtcaggagtttgagaccaacctgaccaacatggagaaaccccgtctctactgaaaatacaaaattagccaagtatggtggcgcgtgcctgtaatcccagctacttgggaggctgaggcaggagaatcgctcaaacccgggaggtggaggttgtggtgagctgagattgtgccattgcattccagcctgggcaacaagagcgaaactccgtttctaaaaaagaaaaaagcaaaggcttatgattggcagtgtctccggaagccagaacatacttcctctatcccagactgggggacaggtcggggacagggtctgcacggtggagctgactgggaccttcaagtggaatgtgatggtgccggtggcgttttacagcgtgggtaactcaggcctgggatgaggaagcctgctcctagctgagaacccagtggcccatggtagccagtgcagcccctcccgggtgcagcaggtctgcttcttctgtgttcagtcacagcggggaccacccgtcatccgtgctttcatccaacagcaagcatttatttatttatttattcatttatttatttagagacggagtcttgctctgtcgccccggctggagtgcagtggcgcaatctcggctcactgcaagctccgcctcccgggttcacgccattctcctgcctcagcctcccataagtagctgggactacaggcgcccgccaccacgcccggctaattttttttgtattttttagtggagatggggtttcaccgtgttagccaggatggtcacgatcttctgacctcgtgatccacctgcctcggcctcccaaagttctgggattacaggcatgagccactgcgcccagcccaacatttattgagcacctactatgtgttagg

SEQ ID NO: 8901 - DNA, 16355 bp, Homo sapiens
cttcattgcactgatcttactctactgctgctgacataaaaccaggaccctttctccacaggcaggctcatttcactaagctcctcctttactttctctctcctctttgatgtcaaacgccttgaaaacaagcctccacttccccacacttcccatttactcttgagactacttcaattagttcccctactacactttgctagtgaaactgcccaggcaaagtgcacctcaaatcttctaattccaagatccaataggatctcgttaatcatcagttcctttgatctcgctgtaagatttgtcaaggctgactactcacttctcctttaaattctttcctaccttggtcctgcctctttgagtatattagtaggttttttttatttgtttgagacagggtctcactctgtcacccaggctgcagtgcaatggcgcgatctcagctcactgcaacctccacctccgggttcaagcgattcttgtgcctcggcctccctagtagctgggattacaggcgcacaccaccacacacagctaattttttttttttttttttttttttttttttagacggagccttgctctgttgccagactggagtgcagtggcacgatctcggctcactgcaacctctgcctcccgggttcaagccattctgcctcagcctcccaagtagctgggagtacaggcgtctgccaccatgcctaatttttttctatttttaggagagaccggttttcaccacgttggccaggatggtctcgatatcctgatctcgtgatccgcctgcctctgcctcccaaagtgctgggattacaggtgtgacccactgcgcacagccccagctaattttcatatttttagtagagacagggttttgccatgttgcccaggctggtcttgaactcctaacctcgggtgatccacccaccttggcctcccaaagtgttaggattacaggcatgagccactgcgcccggctgagtgtactagtagttaagagaataaactagatctagaatcagagctggattcaattcctgtccttcacatttactagctgtgcaaccttgggcacataacttaatgtctttgagccttagttttttcatctgtaaaacagggataataacagcaccccatagagttgtgacgaggattgagataatctaagtaaagcacagtccctaggacatagtaaatgattcatatatccgaactactgttataattattccttcttactctcctcttctagcatttcttccaattattacagtccttcaagattccatttcttaacagtctccaatcccatctattctctgcctttactatatgttgaccattccaaagttcttatctctagctcagacatctactacagcactgtgatgctttatgcaactaactgtttacatatctgtcccctgctactagattgtgagctccttgagggaaaggaacatgatttatttgtccttttcccccagcacctagagtagtgcttggtgcatgatagtaggccttcaataaattttttctaaatgaatgaaatctttctggacaaggttaccttaatcccatgccagctgtcctcatcctctaaaccgttcataggcagcagtaaatgtgctcagacagttctgattatggactctcctaacacattctaattctcaaacaaatggttttgttgtcattgttttttctggctccaaatatacccactgtatcagtcagggtcttggaagaaatagatgacacactcaaattgggtaatatgatgacagtgtaataaacggcaaacagtatttacaaagatgagggcaagatttgggaaaaccatcaaggaacagtgcaagtgcctctgaggctaacaacaacaaggtgctggcactagccctaggcatcaaggggtaagggagggagtggttcccagatcaccagagagtagctgtaagacagggctgccaggaaggagtcatggcctttctttggtggaggggtgcagccaacctatgggcaggtggcaatgagagatccagggggatagacagctcaatttcatgctcttcccattccagtcttgagtccctaggagtaaagtcagagcctttcatgtggctggggaggaattatggagattgggtatactggatgtcatccatttgtcccacccagacctattctccatccttctccatcttgtcctatgcttagcaaggctgattcatatggctggcatccaagcattctcctgggctttggtttctgcttgggttccaacagtaggaggatattatggattgaattctattcctctcctctccctcaaattcacatgttaaagtccttttttttttttttttggccgggcccggtggcacacacctgaaatcccagctacttgggaggctgaggcacaagaatgacttgaaaccgggaggcagaggttgcagtgagccaagaccacaccacaaaaaaagataaaagtttttttgtttttttttttttttttgagacagggtcttcactctgtcgcccaggctggaatgcagtggtgtggtcacggctcactgcagcctcaaactcctggtctcaagcgatcctcccacctcagcctcccaagtagctgggactactggaattacaggtgtgcaccactagcttggctaatgttttctgtattattattatttttttttgagatggaatcttgctctgtcgcccaggctggagtgcagtggcgcgatctcggcctactgcaagctccacctcccgagttcacgccattctcctgcctcagcctcccgagtagctgagactacaggcgcccgccaccatgcccggcgaattttttttatatttttcgcaggacagggtttcaccgcgttagccaggatggtctcgatctcctgacctagtgatccgcccgcctcagcctcccaaagtgctgggattacaggtgtgagccaccgcgcaggcctgttttctgtattttttttagagacaaggtgatactatgttgcccagactggtcccaaactcatgagctcaagcaatcctctggccttggccttccaaagtgctgggattacaagtgtaagccaccacacccagccagatgttgaagtcttaactcccagtacttcaaatacgaccttattaggaaatagggtcattgcagatataattagttaagatgaggtcagggccctagttcaatatgattggtattcttataaaaagagaaaattggacacacatacacacagaaagaaagccaagtgaagatgaaggcagagaacagggcgattcttctataagccaaggaatgacaaagattgccggcaaaccaccaccagaagccaggagagaggcatggaacagattcttcctcacggttctcacacaactctcatgacaccttgatctggaacttctaacctccagaattgtgagacaaccaatttctgtcatttaagccagtttgtggtactttgttacagtaactctagcaaacgaatatagaggatatcaggggatgggctacacaagtcacctatacttgccggcttcccgttctccctatttcattctttccgcaactcctccaaaatggatctcaagcacccactttcctgatcctgctctctccaaagtcatcggtaatttgattttcaatggccaaatctgaccctttctgtcatcattccacttgactacatatattagggtatctcccacttcaagatccatgtctggataatttccattgccttccttcattcatttattattattattattttgagacaaagtctccctctgtcacccaggctagagtgcagtggcgcgacctcgctcactacaacctgcgcctcccaggttcaagcgattcccctgcctcagcctcccaggtagctgggattacaggtgtgcaccaccacacctggctaattttgtacttctagtagagacagggtttcgccacattggcccgactagtcttgaactactgacttcaagtgatctgcccgccttggcctcccaaagtgctgggattacaggagtgaaccatgacaacctgcccaaatcctttatttttaaatgtacaaattccctgaggctataccctttatccttctctatagctaccaccagaagttgcaaattattgccatatcccccccctcagatgttttatttggtccttccctacacagaaaccccacaggtaccacaatgcctagcagatgaagtccaaagtctttagcttaacatttaagaccctgaccaacttgacatgagacaaccttttctatgttttctgggaattccccacctctaacctaagcatatccaattccttattttccaaggtaattggaaatagagaatgcaaaggcttcaagtcaaagataataacattatctgtaagcatcggagtggactttaagctaatgactgaaaatgatttttccagcctctttctgggacagtatagcgtattgtttagattgcagggattagtcagatagtttgaatcctgggctcccctacttattattggctgcatgcctttgggcaagtttctaatctttctgacccagtttcttttttctgtaaagggaagatggggtatctatctgccttatgggattaaggattgaactcgataatgtatgtaaactttttttttttttttcagacagagtatcgctctgttgcccaggctggagtgcagtggctcgatctcggctcactgcaagctccgcctcccgggttcacgccattctcctgcctcagcctctcgagtagctggaactacaggcgcccgccaccaagcccggctaattttttgtatttttagtaaagacggggtttcaccgtgttagccaggatggtctcgatcttctgacttcgtgatctgcccgcctcggcctcccaaagtgctgggattacaagcgtgagccaccgcgcatggcctgtaaattgttttaacacagtagttagatggtccataaatggtaccattattacttttatgattgctgctccacctctgagcacattcatacaattcactcaagtcattattagagcactagattgagtgcgagtcagacctggattcccacaaacttctttgtatgacctcgggcacatcccttccctgggcctccgtttctccatctgtaaaatatggatttgttgtcggggtggggaggctgcaccacgcacaggttagactaatggatctctaaggtcctcacatctttaaagccccaaggggataagccacagtgcctcctgtagggcagtctaagcttatcttccagataggcaggtttgaataccgatcctttttcttgaccttaaggaattcattcacccttttcaacctcattttccctgtttgtaaaacaacagcaaacgagacaaacacacgttacttcctttctagcagggttcctacccggcgccaagcaaaagtggaatgtaccctaagtagctctggccttcttcctgctcccaagcttcccaattccgtcccctgccccgctgccgcccgcggctctccttccccttctaggaacggctcaagcgccttgggcactccatcgggttctgcaccgagttctgcatcataaatacgactctcgtgtaggatttaagtgtgaacttctgcaggttctcggaccctgaagcacccggggccagacattccgagctcgcggcggtggaaggcacgcaaaagggcgaaccgagacgactccaggacgctgaggcagcgcaggccccacccggccccgccctgccccgccctgtcccgccctgtcccggccggctttccagtactagtcctctggcgccggctcccagcccctctcgtacccttcaaatcgcgctccgcgctagactctcgtgatagctgagactttccccggaaggcccgcccccttcgccggagaggccaatgggctagggcaacggttgcgacggttggattttgaaggagccaataggcgctcggagcggagagtttaagaggcgtaagccaggcgtgttaaagccggtcggaactgctccggagggcacggtgagaggtggtggggctgagccgaggtggggccgtggccagggggagggggtgctaggccggaaggggctgcagccgagggtggccctgattttgtggccggccaggagcgaaggggtccctttctgtcccctgagcaccgtcgcctcctttcctccagggctccgtaggcaccaactgcaaggacycctccccctgcgggcgctcccatggcacagttcgcgttcgagagtgacctgcactcgctgcttcagctggatgcacccatccccaatgcaccccctgcgcgctggcagcgcaaagccaaggaagccgcaggcccggccccctcacccatgcgggccgccaaccgatcccacagcgccggcaggactccgggccgaactcctggtcagtgaggtgccaaaggaactgagtgagagcagccttcatactttctccctggggagcctggtcagactgtcttctctttctccgccccaggcaaatccagttccaaggttcagaccactcctagcaaacctggcggtgaccgctatatcccccatcgcagtgctgcccagatggaggtggccagcttcctcctgagcaaggagaaccagcctgaaaacagccagacgcccaccaagaaggtatgtgtcccagaggggcttaaggcacgggacctgactgttctttggataataccatcttgctccttcactaccctttatgccaggaacatcagaaagcctgggctttraacctgaacggttttgatgtagaggaagccaagatccttcggctcagtggaaaaccacaaaatgcgccagagggtaagacccgaagttcctggttcctggagggaggtgtcagttcatctccagggctgagcacagatayctgtctcctcttcctatctaagattgagggcaagggaggtgttgattttcccagcgtctagactcactccgttgccacaggttaycagaacagactgaaagtactctacagccaaaaggccactcctggctccagccggaagacctgccgttacattccttccctgccagaccgtatcctggatgcgcctgaaatccgaaatgactattgtaagtgcatccttatcctcrcctcatgcatggagaaagagggcctgggaccacacaaacaaggaagctcatgctcttctctccacctctgacagacctgaaccttgtggattggagttctgggaatgtactggccgtggcactggacaacagtgtgtacctgtggagtgcaagctctggtgacatcctgcagcttttgcaaatggagcagcctggggaatatatatcctctgtggcctggatcaaagagggcaactacttggctgtgggcaccagcagtgctgaggtgcaggtgagacgtgtccagtgctgtcattctcaccagtcccartgggcttgcacagctggaggatattaatgccaagtcccaatctctgatcctagtgggcttctctctctagctatgggatgtgcagcagcagaaacggcttcgaaatatgaccagtcactctgcccgagtgggctccctaagctggaacagctatatcctgtccaggtcagtggtttttgttggtctatggtagtctgatrtttgcccaccctmcccttgactgtacacccctgaactgaaccagctctggcttgcttgcatttggtgctgccacagaacctgattcccttctttcctcctccagtggttcacgttctggccacatccaccaccatgatgttcgggtagcagaacaccatgtggccacactgagtggccacagccaggaagtgtgtgggctgcgctgggccccagatggacgacatttggccagtggtggtaatgataacttggtcaatgtgtggcctagtgctcctggagagggtggctgggttcctctgcagacattcacccagcatcaaggggctgtcaaggtgagtagggttgggctgaagcctctgcagaccctcacctataatctggggactgttaaggggagaagggatggtaggattggactgggttaatctgtgacccctagagctccttgtctggctctagtacctgctgaccccacctttattccatctaggccgtagcatggtgtccctggcagtccaatgtcctggcaacaggagggggcaccagtgatcgacacattcgcatctggaatgtgtgctctggggcctgtctgagtgccgtggatgcccattcccaggtaatcttttgcctgttcctgcctctcccacatgcattcttaccgggcaactacattcactccaatggcttcaccaactctatgccctggtgattcccaaacttctaactcagctctcactcatgagcttcatttccaacagtctgtggctatctccaatcctatgtcctataggcaccaccaccttgatctgtcccaaattaaccttgtcacttccccttgcctccctgaaatgtgttccttcctgtctcacattgctttggaatggcagaamctgctcagaaatctgagaaacctcctagaatttttcatcctcctcaccaggatctatcagttttacctcaaaatatcattgacatctgtcccctcccctcagcctcatccttccaagtggaggcccactacaatggcttcctcactggtgtcaagcattctttgttatctcctgcaatgcatcctccatgctgtggtctgttatactgtactgtccttaaacctgtgatggcttcccatcacttatggcatataatccaaatccattagaaagatacttgaggctctctccttccactccccccacattcagccttcactgtagatatggactctagagccagatggcccaagttaaaattctggctctgtcatctactaaacttgaatgtgacctttggcaacctattgaacttccttctgattgattcctcatctatccaatggataatacagatgctccctgatttaagtcccagtaaacccactgtaaaggtaaaaaatggttacatcagcgagtgtctataatttgcctctcaaggaacttttgtatggactatgatcattcaactctgagtctggagcatgtggcagggtgcctaacactagaatgggctcagttctgatttaagtagccttggctatatgtcatgcccacaccagctcctctccacaggtgtgctccatcctctggtctccccattacaaggagctcatctcaggccatggctttgcacagaaccagctagttatttggaagtacccaaccatggccaaggtggctgaactcaaaggtaagtggctaggtgaaaagccggacataaaaggccacataatgtatgactgaaatgtccagaataagcaaatccagagaaaaaacacattaatggktgccaggggctgagagagggtaatgggaaatgttgaaaatgtcttagaattagttttaacagttgtacaattttgtgaatatactaaaaatcactaaactgtacactttaaaaggatgcattttatggtgtgtgaattatatctcagtaacaccattgaaaaaaaagggaggaggccaggcacggtggctcacgcctgtaatcccagcactttgggaggctgaggcgggcagatcatgaggtcaggagatagagacaatcctggctaacatggtgaagccctgtctctactaaaaaacacaaaaaattagccaggcgtggtggcaagcacctgtagtcccagctactcgggaggctgaggcaggaaaatggcatgaacccaggaggcggagcttgcagtgagccaagattgcgccactgcactccagcctgggtgacagagcaagtctcaaaaaaaacaaaaaggtaggtgggtggcccagtgcctcctttatggctatggctgcatcagcattcgtatgtactgttctcatttgctccaggtcacacatcccgggtcctgagtctgaccatgagcccagatggggccacagtggcatccgcagcagcagatgagaccctgaggctatggcgctgttttgagttggaccctgcgcggcggcgggagcgggaraaggccagtgcagccaaaagcagcctcatccaccaaggcatccgctgaagaccaacccatcacctcagttgttttttatttttctaataaagtcatgtctcccttcatgttttttttttaaatctgtttcagctaatgcctttcttctttcatgacctatgtcccagcagccttcctaggggctctactctactgggatcagagagctagatatgtcctgtgggagcctggaccatccatccctcttgtttgtggacagggctaagcgtgttgtgttcccccacctcctctgttcacatacgtatacacacagcctccgtggtttcctctgtcacttttaattaagacacaagttgagtaagcagcctccacaggctgtattcccaggcccccgcccaccctgacctttggcccagaagctactgcttcagtgtgtggggtggaggagtgagactgggtccacagtgacattattgctgacctcttctgtgtgaggaaaaaggccacgagaccctttgtggggccagccctgagtgctcctctcccaagttttaaggcagggagggggaaataactgtacagcccttttagcccccagctctggagtggcagacagcaatgaggccacatccctggagctgcccgggggaagtgggtgaggaaccaaagccgtggtccctgtagagcagctgtggggaggggagggccagtcccctgctcagtcctgaccacataagccttggtcacaggtgtaggtggagagggcactgacggacactgccctaaggtgcagtcctgaggcacttaggtgggcgcctatctaggccatgcttctcagttggccttgaccttggcaatacctggagctccattttgctgaagtgcacggggcagccgcttgcccttggtataagagtgataccagaagttggagaacagcatgaagaagatggtgccatacatccagatgaggtgaataatgactgggtactggtagttacagctggacataaagtagtactgggagatgtgcagtgagaccaggacaaactggatctaggatagagaaagaccagggtcagagggaatagtgagaggactagaggggaagagggggtagagaaagagacaaacgttgagtagggagagatggggtcaaaggtgagacagactggataaaggcaggatccaggctaggaatgtggggggatggttataggtaagtcaggccaagcccctcaccagctgaatggctgtcatgtgctttttccaccaaaggtagggttgtgccacagggccaaaggcagataatccgtagtacaggtacattatgacatgcacggaagagtttatcatggcatggaaagagcccattcctcctgtgagtggacaataagacagggtcagcagagtccagcctctggtgcccaccctttcccatagtggccttcaccactcacccggggcaatctttaccccccaccaccagctccagggaagcacagagtgatggaagacatgtaggaaggtcacctgcccgtctttctttcggagaataaagatcacctgagagaagagtgagggaaggggattcagaacctgggcttctccacctcattctcccctcaagttctcacatctcatataactactcactgtgtccatcagctcaatgaacttggagaagaggaagagccaggccacccgaaccatctgcaagaagttgggatagccttaggacctcatacactattctaagagcctccctaaactgggccttgagcacaggccccaaactggtcatatctaccaggttgcttatgacctagccccagcccctacttaccctaagtgcctcagggctgttggaatagtccacagggtcacagcgccaggtataggtgctcagccagcccgacatcaggaactgggaagggatgtggattagaccaccagagttctcccttcccagccatccctccccttcgctagctgaggacatggatctgaacctctctggaaaggagaaatgccatgctctggctctatggcctgctccttatcctgctgacagaaattaaagcccggcatcccaggggcccacctcatagacaatgtagagggagagtgccaccagtgagaagttgtagacaatcatgaagccacggagctggaagggcttccgattagccatgatgcgaggcccaagtgagagaacgaagtacacgtaggtcaggagaatggaggtcattagcaagggggaccccatcagagggtagccctggatccggggatctatgaataagggtcaaaggaatcaggaagagtcacagggttcgaagggtcttcatttgaagggtctacagacatgaggtcaggtcacaggatcaagggtttcataggaactctccattagaagacagccgtagatccagggatcccgggaaagaaggaaggaaagggctggtggatagcgtcttacctgcgtgcttcatcacctcttggtacaagttcacaacagcctccatcctggctaaggactctggggaggtacagagggcggatgtcagacagatcccactgcacacccccatcccacagagataagacacagaaccagacaagacacctgcaatgcctcattgcagaaaggacagaacagtgaaaggaaggaattactgggaactagggggaggaggcagtttggttgaggcatctgctccccacacatcctgcttgcctgggaagagctgttccacccttcctctccacaccttactctcctctcctctccacagttttacttcctggcctcccttcccctcttcctccacaagataactctcaattccaggtctcttactggagaatcttaccttctcaccaacagggagctcttgaactccgtctcccttcctcacccgagtccctcacctccccagctctgggtctttcttctctccagggattctccccttcaatctctcctctcctgccctctcctcttcccatccctctggacccttcctgaactctcttctccccagggtccctcctgtccctgccaggactctcacctctctgggcccttctgtccctccagaaccttatcctcggattcctccttgcctgtgctgggacacttatgtccctacgattctcctctgcctttcctgggactctcacctccagcctctcctctccagcgctctcctctctcctctcgcagagcccttcctctcctggagcctggctctttgagactcctgccccggcggctccacctgtctgactagatctggcagcagccccgccctctgcccgcccctgctgtactgtgcagggggtggagggtgggtccgggccacaggtcagtgcctgggggagcaggacccaccaggattgggaaagccaagtaaagccccagactcgccacccacccacccacgtgggaccagcctgatgagctaaggtcctagattctgagccagaaacctcctctgaccccagccccagccccagccctggcccaaagcactgctgaaaatccacacccagcatcctctcctaagccggccataactgctcagtttgtcctacttcagaatgggtacaatcactcttcccttcctgggaagggcagggaagccagtggcatgtgaaggggttggggagtgggggaggtcgcaggaatcttcccctccctcagggaggggccccgttgggctaggccccctccccctcagggcctgaaggaatgtcgggggaaggctcccagggacacaaaagcctctggccagacccaggagagcatggtactgacagtccctgagggacaaggcattcttggaacagagcagggcccagggcagcaggtgccccagactccctgcttccagagaagcacctctgcagatgccaagtgaagaggcgcacctctgacacctccctgccccgcacacccctcacctccaggaggcccggcttctttaggcccaccgtggtcaggccccaagcctgcggtccacacccacctctcacctagctctccacccccaacagcgaaggtgccacgccgagggctggcacacacgtctcctgcctgacacaccacgcaacacctccgtgggctgacacgcatggctcccggccctcacgcagctcggccaccgcccaggcacacgcacgggctcacccgcggggccactcacacacgtgtgcgcgctgcctggccacgctcggatcccctccttacttgctcccccaccatcgggcttgctggccgcccatcgccggcagggcccaggccggggcgagggcgccaacacaggttcctccctgacacatgggagccagccagcctgttatctctcaaccaccagcccccaatatcaacccacacacccggcaggccaggagggaccaaggctcctgggaggacctctccccaagctgcaggaaaatctgggtgtgtctctcgtcggggaactcagcccgtcccttccttcctttaagatggatggaagggaaaaggtgcctggcaaagttagggtagcggggggagggaggggagaggaggagggagagaggtaaatgcaggggtggtggaggaaggcccgggagtaggcaaatgggggccagagacgggggtgtgggggagggagggtgctggcgaggcccggccccagggagctgggacctcccacccactggccccgggaacaccctcgcccacagcctgggcagggcagggcagggctgggccgggctgggccgggctggccaggcagggggcgccggcacgtggagagtccgtggaaggtccagactcacccgtaggggccaggcgggcaacggcggagcgctcggagggagcagggccagagagaagtccccggggccagcctgcctgcctgccacttcctcatctgctgggccgactttctgtcaccagagggggaggggcgggccgcgcggggggcgcccgctgattgggcggccggcagggccggaggccggcagcgcaggctcggccggggcgggggcaggggcgtgccgccgggtcccagcaggaagcgccgcggcccgggcttcccaccccttccctcgccgcccgggcccgccctggccagttgcagcggcctggccacctcaggagcacgctgtctcttcccgacgtgcagcccggggcccggccctgtccccgggtgactgctccccggcaggactgcacatctgtggcggcaggcccagctcagggctcgggggaggttcggccttgccttcaaagagctccctctcctgcagggcgagcgcagagcggcgggcgagaccacactgcgtgtgctgagggcgcactggtcttagcgggagggaagcctcacgagcctgtacacttggaggagccctaagcgttaggatctgctgcgagggctgcctggaacggaggtgagaggatacaagtggcccggggcaagcatagtgaatcactggctaatctggccttcgaggtagtgaaaggaaaaaagggaaatgaagctgactgtggctgaatgtagtaggtcttgaaggccaaatggggcgatctgatttttattctagaagcagaggagaaactaaagatttttttaggagactatattcaagcttgtatcattagttcatcagacgtttatggaccacccaccgtccgtgcactcacggggcttgcagtctatctggctgaatcactttggcagccagtgtgaggagggcacagaaaggagaccaggtgagaaagccagcctgaccaaagaagatgtggcaactgatgggattggaggaggcggacaatgtcctccagacagctggactggctctctatatatttatttatctcttctacacctccagcccccacctccacactcactaactggactcaactagtgggggcaaaggacagactagattttagtgaaatggaatttctacctccagcggcccctggaacagtagcacacaacgatctaacaactgcttgtatgattggatggtgtaagtgcggacagaattagggaatttgggctactctgggcacactgcttatggggcagccctgctccgcaaggaaaataaacacatttttttaaaaaaaggccgggcgcggtggctcacgcctgtaatcccagcact

SEQ ID NO: 8902 - DNA, 95812 bp, Homo sapiens
acagcaggttgggcatggtgcctcatgccttgaattttgggaggcagaggtgggttgattgcttgagcccaggagtttgggacctgcctggccaacatggtgaaaccacatctctactaaaaatacaaaaattagccatgcatggtggcgggcgcctgtagtcccagctacttgggacgctgaggcaggagaattgcttcaacctgggagacagaggttgcagtgagccgagattacgccactgcactccagcctgggcaacagagtgagacctgtctcaaaaaaaaaaaaccccgtctctataaaaaatacaaaaattagctgggcacggtggcacatgcctgcagtcccagctacttgggaggtttgccagggcctaggaggtggaggttgcagagagccgacatggagccactactcaaacctgggcgacagagcaaggctctgtctcaaaaaaaaaaaaaaaaaaaaaaggatgacagtagaaacgttagactggaatggagaatttatgcagtaggtaagaaacaggctgagaagtgctggtgtatcgtgtcaggaattggtgggttcttggtctcactgacttcaagaatgaagccgcggaccctcgcagtgagtgttacaactcttaaggtggcgcgtctggagtttgttccttctgatgttcggttgtgttcagagtttcttccttctgatgggttcgtggtctcactggctcaggagtgaagctgcagaccttcacggtgagtattacagctcctaaggcagcacgtctggagttgttcgttcctcccggtgggctcgtggtcttgctggcttcaggagtgaagctgcaaatcttcgcggtgagtgttacagctcataaaagcagtgtggacccaaagagtgagcagtagcaagatttattgcaaagggagaaagaacaaagcttctacagtgcggaagtgaacccgagcgggttgccaatgctagctcgggcagcctgcttttattctcttatctggccccacccacatcctgctgattggtagagccgagtggcctgttttgtcaggccgctgattggtgcgtttacaatccctgagctacatacaaaggttctccacgtccccatcagattagttagatacagagtttccacacaggttctccaaggccccaccagagcagctagatacagagtgtcgactggtgcattcacaaaccttgagctaaacacagggtgctgattggtgtgtttacaaaccttgagctagatacagagtgccgattggtgtatttacaatccctgagctagacataaaagttctccaaggccccaccagagcagctagatacagagtgtggattggtgcactcacaaaccttgagctaaacacagggtgctgattggtgtgtttacaaaccttgagctagatacagagtgccgactggtgtatttacaatccctgagctagacataaaggttctccaaggccccaccagagtagctagatacagagtgtggattggtgcactcacaaaccttgagctaaacacagggtgctgattggtgtgagcccagctgccttcacctagtggatcccgcaccggggctgcaggtggagctgcctgccagtcctgcgccgtgcgctcgcattcctcagcccttgggtggtcgatgggactgggcgccgtggagcaggaggtggtgctcgtcggggaggctccggccgcacaggagccaatggagtgggtgggaggctcaggcatgggggctgcaggtcccggagccctgccccgcgggaaggcagctaaggcccggcgagaaatcgagcacagcgccggtgggccggcactgctgggggacccagtacacctccgcagccactggcccgggtgctaagtccctcattgcccggggccagcagggctggctggctactccaagtgcggggcccgccaagcccacgcccacccggaactccagctggcccgcaagagccgcacgcagccccggttcccgctcgcgcctctccctgcacacctccctgcaagctgagggagtgggctccagccttggccagcccagaaaggggctcccacagtgcagtggggggctgaagggctcctcaaatgccaccaaagtgggagcccaggcaggggaggcgccgagagcaagccagggctctgaggactgccagcacgttgtaacctctcagtatgacttaaattgtgtgggtatttcaaataattgaaagtttttggacaaaagaatatgtaatgtctaaagcactgtttttagaaaattattttggtagttgtttagaaggaattaatgcacaaaaccatcataatgattcaagtttgaaatgaaaaaataattcataaggtttagaaactgatgaatttatttagaaatacccggtttgggccgggcgcggtggctcacgcttgtaatcccagcattttgggagggcaaggtgggcggatcacgaggtcaggagttcgagaccagcctgaccaacatggcgaaaccccgtctctgctaaaaatacaaaaaaattggccaggcgtggtggcacatgcctgtagtcccagctactcgggaggctgaggcagaagactcgcttgaacccgggaggcagaggttacggtgagccgagatcatgccactgcactccagcctgggcgacagagtgagactcttgtctcaaaaaaaaaaaaaaaaaaaaaaaaagaaatacccggtttgggccgggcgcggtggctcacgcctataatcccagcacttccggaggccgaggctggtggatcacctgaggtcaggagttcaagaccagcctggccaacatggttaaaatctgtctctactaaaaaatacaaaaattagccaggtgtggtggcaggtgccttaatcccagctatttgggaggcagaggcaggagaatcgtttgaatccgggaggcagaggttgcagtgagtcgagattgagccattgcactcaagcctgggggacaagagcgagacttctcttaaaaaaaaaaaaggaaacaaaaaaaaaagaaatacctggtttgaggccgggcgcggtggctcacgcctgtaatcctagcactctgggaagctgaggtgggtggatcacctgaggtcaggagttcgagaccagcctggccaacgtggtgaaaccccgtctctactaaaaatacaaaaattagctgggtgtggtggcatgcgcctgtaatcccagctattcgggagactggggcaggagaattgcttgaacttgggaggcggagagctgagactgtgccactgcactccagcctgcggagagctgagactgtgccactgcactccagcctgggcaacagagtgagactccatctcaaaaaaaaaatttttttttaaattcccggtttgaaattgaaaatcagaaataaaattaggtcaggcccatttatttatttatctatttatttatttatttcctgagatggagtctcgctctgttgcccaggctggagtgcagtggtgccatctcggctcattgcaacctccacctcccgggttcaagcaattctcttgcctcagcctcccgagcagctgggattacaggcatgtgtcaccacgcctggctaatttttgtacttttagtagagatgggatttcaccatgttggccaggcggtctcaaactcctgacctcgtgatctgcccgcctcggcctcccaaagtgatgggattacaggtgtgagccaacacgcccagccattcaggcctagttatttagatttgggtgttgcttattgaatctttgaatatggaggaaaagttatgagataaaaagaataaaaatagagactattcaaaggctatgcatgggactgggcactgtggctcatgcctgtaataccagcactttgggaggccaaggtgggtggatcagcaggtcaagagatcaagaccatcctggccaacatggtgaaaccccatctctactaaaaatacaaaaattagctgggcgtggtggtgcacatctgtagtcccagctactcgggaggctgaagcaggagaatcgcttgaacctgggaggcagaggttgcagtgagccaagattgcaccactgcactccagcatggcgacagcgagactccatctaaaaaaaaaaaaacaaaactaaaccaaaggctatgcatgagacaaagtgaacagtttattactgtgattataataaaatgttgaatttatatagggtaaaatcttgatagaatgcttgaattatataggtattatgggaaatacaatgttatggttaattgaagaataatacaaaattttgttttaacttttgctcgctgggttttttccccccccaaaaattatactttttttcctcttgataattaggaaacacagataaattatttttagatgattcaagatgccactatccttcaagttgattattgtaaaatacgtgttttcaatgtaaaataacacagttatggagtttgggatatagccatggtaacgacagaacataccctggtgttttaagattagggaaagtcggataacatcaaaacaattctaagaaaaaattttaagtatttttcaggctctattaattaagaagtacttcagtgcttttttttctttttttttccaacactacaaaggctaaagatgttattatcaaatgtattactacatcattggcacagtttctattggtatctacttgctttttaatacggaagatgtttatgatttacactcctcctactttagaaattctctccattcacttcttttgtgcccctccagatataatctgaacttccaggaatagatcattcttggtgttacaaatgttggcttcccccctccctggaattctattagaatgtttctgtcactttagaagctttcttattctggtgtaacatgccaagaaacccaggtataaaatagtgattgttgaatcttactttgacacgtgtgcccgtccttataaatctagaccctgtacattacatgcatacaactatccctatggatctactagtaaataatctcacagactccacctgaggcttctggaaaaaaaaacaattaccttaaattttattaagagctcttcgtaacctactgagcaagatcagtgaatcctaaaaagattcagtccccggttcccaaagcgcttccccgccccgtgtttctgaacagctggagaggacaaacctccgctaagaagcggaggccgccagtgctcatcacacgcaggaattaggatatctggcttgagaacacctatgctgtaccacattcttctctccccctaccccgcctgaaataaaacatagtgaagcgtaaatcttgagtcccttggtaccttctcagaaacggcggcgaggaggcttcagaggggcttcctgggcggggatccagacggtcgcgcgggtattcagcactctgggcgggacagtccctgtcccgaagggagggcccaggaggggtggagccgtccccgcccgaacacgggggcatccgcgctccccgtagggtaccccgcgtgctggctccgaagcggtggccgtcggggtggcgctcttcctccgctctttggggtcccggcgcccctcagggcagggcgggagaccgctgaggaggcaccctcaagttcacctcaggctcatgacaccagccccgccgcggttccccctgaccggctttccgctggccctggcggctgcggaacggtcaactagaccccactagctgaagccggcatcacctgggaagcagccatgccgcccggaggccacacccgggggaggagcctgcggacgcccagtcgggtggagcacgccaggtgagcacgcctgcgcagtcgggccgtaaacaagcccaccccttccctttggcccgccctcgcagggctggcccgcgggtgggaggggcgagaaggaagaggcagggggtgggggaagagggagcaccaggaacagcgcctgcgcggtgggcgtgatccgggcacttagggcaggatgaacgctgctttccaagatggcgacggagggaggagggaaggagatgaacgagattaagacccaattcaccacccgggaaggtctgtacaagctgctgccgcactcggagtacagccggcccaaccgggtgcccttcaactcgcagggatccaaccctgtccgcgtctccttcgtaaacctcaacgaccagtctggcaacggcgaccgcctctgcttcaatgtgggccgggagctgtacttctatatctacaagggggtccgcaaggtaccgacccgggcgtcaccggagccagccagcggcgtaggcagaggccgggagcagggcggtgacagtggggccagggtgaccgagaggggtggccgtcgctcttacttttgagtgggccggtaactccactggggtactcctgaggagaggggattcaggagtaaggagggtggtggcggtggcgtttcgaaggggtgggggcagtggaaagggaccgtggggcgcgggggttctggctgggaggctcccgggggagccggctgcgtcccctccagcctggtccatcaggctctgacatggccagggagcgggcctgcgagtccccggaagaggtgaggtggccgtcttgtctgcttcgattgcctcgcctccctggagggttggaagtctcgccctgggttagagaacagggacgcaagacggcttaacaagatctctktaaggcggaaccggggccgggaagcggagcattgagactaggtcagaaagaacctgctcggcacgcagggctactccacctgctgccgcactgacacttcctaggagcctctcctggtgttaacatttctatttccaaaaacatccgcgggaggacggctgtcactgtctccgccgtggggaccttctgaaagattgttaaggagagtcatcttgtcccttgtagtatgcgaagggctgagtactacagttgaaatgatgtttccagtgaactaagctggttcagaggggttgtgtgagagtgcccagattaatcttgtccaacaagtcagactgtgtcccaaacagggagtgatatgctttaaaagctgctttaaagggaccatccttcttggcgggcgagttaccggtaattctgtgaaacatgtaagcatcctttaaaagtatctctttaaaagcagccatttattagagtttttctttcattggctatgtaactrtgttttcactgagaattgcttatttttgagattgtagtctttgacttgatgtcatggaagagtgaggaaattaatgcatcccacagcacctccaaataggacaaggtgataaaagattaagtcgtaaatgcatgttagcatgaaaataaattgttcatattgaagagtgaacattcttcaggatttaatatagccagatccagtacaggattttcgcttgttacaagagctagggaaatgacagtggtatctaaatgtagcaaagttgtttctttgattcagggtgaatctttttttcttagtctttatgataataagtgtaccactgtatttagggtatgctgttggaagttattaagggtaaatcgcttgaccttttttttttcctcgtttggaattgcaaaagctcgaagtagtcttcagtctaggggctgaagttttactcctactcccaactttgtcactgacttgtttgggtgaccttggataagttatttaacttctatttgcacctctttaaaaagggaatgttacagtgcacgttgtaattaataatataataatcataatgaactttaaggccctgaaacactcagtagatgtaaaatatagttaaatactgactgtcaaataagaagctgcygtcttgacaktgataatcagagtgaaaggaccaattttgtctcaggaaattaagtttagaattttaagttataaaaatttatatttatataaaaatacgatgtgcttaaaaactaaattcactaactagcaattattaatgtaggaattacttaaaaawttttttttctttgaaatgttatgacttctgaagcatcctaatggcagaccttatctggatctggtagccctgttttacatcataaagacaggtttcttgcctggaagtatcattacaatagtgttctcttttagtgggacgctattccctgaagggtaaaaggaggcaaggtttttaaaaccacaccaaaaaattattttaaacaagataaatgtgaaatacgtaaattgcccttacctgcataatttgagtgttttaacgctttttgggtaaaatttcattttcatgtggtagtatcttgtagatacatttgcattgtgttgcagatgtttctactctcttttaattgtaacttaaacatttttttccatgaatgagttggcatttatttgttgttatttctgagtataagtgactttttatgactattttctgatttaaaatataggaaatacattttccttaattggaaaaccaaaatttactttttagagttagtagttacaaacatatttttgacagttggctattaaacatgtttttgtttttgtttttagagacaggatctcatcctgttgcctaggctggagtgcggtggcgtgctcatcgttcactacagcctcaaactcctgggctcaaatgatcttcccacttcagccttcctagtggctggaactacaggtgtgcaccaccctggctaattaaaaaaaaaaatgttttttagagatggaggtcttgccgtgttgcccaggctggtcttgaactcctggcctcaagcgatcctcccacctcagcctgctaaagtgctgagattataggtgtgacccaccatgcccagcgcacagttggctgttttgacttttttttttttttttttttttttggkcctttgaggcgtgtaaaattttacaataattatttggattattcagaagatctaatttagatgagtaaattcaacttaagtctgtgtgtaaaatgagtagaaaataggtcttttaaagaacttaactcattaattacgtgctaccattcctgagaggaaacatggggtcctggggaaatggagtaggtgaggaagtagtctaacgttcatgctgaggagtgcaatcttgatccttttaaaaggtttacaggtcagtgtctggagctagaaggaactttagagtttgttatttcaccctcctcagagcgaaccaaggccagagaggggatgcaaacctgttagaattttttctcatagtaaggaaaatgaagcacagctgagtctaaaccagcttagaagagactgatccacctttttgatcacagggatattatatactccgagcacttcagaatytaccccggcattttgccatatattattttattaaattcttgaggtagattaaaacatcttttcacaatcgaggaagtttagartggggtttcttgtgtgaggagatgtagttttgcaaatttatttaactaaagacagtattaacattgatttaatactgacactaatcattttaccagatttgagtgactactgtgatagtaataataccaggcaaggtgatgtgaggtattcagagctaaataagaccctgtccctctccccaaaagactttcaactactagcttttaaacatcttttttttttttttgagacaaagtctagctctgtcacccagggtggagtgcagtggcacaatctcggctcactgcaacctctgcctcctaggttcaagcgattctcctccctcagcctcccgagcagctgggactacaggtgcgtaccaccacgcccagctaatttttgtatttttggtagagatggggtttcatcatattggccaggctggtctcgaactcctgacctcgtgatccaccctcctcggccttccaaagtgctgggattacaggcgtgagccactgcgcccggccgtaaacatctttattacatactttgttctccttttttaaaaaaagagattgtggtcgggtgcagtggctcatacctgtaatcccagcactttgggagactgaggtgggaggatcgcttgagcccaggagtttgagaccagcctggataayatatcaataccctgtgtccacaaaaaaataataaaaaaaaaattagctggccatggtggtatgtgcctgtagtcacagctacttgggaagcgaggagggctcttgagccgaagagttaaggttacagtgagcyatgattgtgccactgtaccccaacctgggcaacagaatgagaccctttctttaaaacaacaaaaaaggggagtggggctatgcgccatggctcacacctgtaatctcagcgctttgggaggccgaggcaggtagatgacctgaggtcaggagtttgagaccagcctggccaacatggtaaaaccccatctctactaaaaatacaaaattagctgggcgtggtggtgcttgcctatagtcccagctactcgggaggccgaggcaggagaatcacttgaaccctggagtcggaggttgcagtgagccaagatcataccaccgcactccagcctgggcgacagagctagactctgtctcaaaaaaaaaaaaaaaagattgttttaggatgtaggataaaagatgccaaaggtaaggtagctgggcttattggaccaatcctctcattttatggacatctgtttttacataaatatgaatggcctccattcagatctcagcttaaccatcacttcctcaggaaatttttctttgaatccccatggtgtatcagttttaccctattacatgtttttttgttttgtttttttttttgtttttgagacagaatcttgctctgttgcccaggctggagtgcagtgatgtgatcttggctcactgcaacctctgccgcccgggcccaagtgattcttgggctactcccgagtagctgggattacaggcatgtgccaccatgcccagctcatttttgtattttaatagagacggggttttgccatgttggccaggctggtcttgaactcctggcctcaagtgattcacctgcctcagcctcccaaagcactgggattacaggctctatgttcttagagcatcttgtgctttgccttcctagcacttttctgaatttgtaattctgtgtgatgatccaactgtgccttctataaaacaaagctcccttagaatagggacattatctttcctgctctccatcttctcaatgcacagtgcagtgtccagtttagagttaggcccttgctgtgtacttgttgagtgaatgactgagtaaagccatgtctgtctataccaaacttgaaagagatctttagaagatgaaaaacctattcagttttgggcccaaaagtaacttgggtattttttaatagctcatatcttttaaaagacatttaaaaatattgctagtaggtaaaaaatttaaccttcttaaaatagggaaatcgtgtaagagacaatgaagtaatagtaaacaaatgacacagattacttttgatctacttctgtcaaaccatgtcacctacaagatccatgtacaacttttaaaaactgttctcaggccaggagtggtggctcatacctataatcctaacacttttgggaggccaaggcgggaggattgcaggggtccagcctgggcaacacagtgaaacctcgtgtgggttcgagaccagcctggacaacatagtgaaaccctgtctctacaagggtgggcgtggtgtcatgtgcctctagtcccacctacttggaaggctgaggtagaagggtcacttgaactggggaggttgaggctgcagtgagctgtaatcgtgccactgcactccagcccgggcaagagagtgagagcctgtttcaaaaaaaaacaatcaataataaacaaaaactatactcagaattacttaacattcaagccaaagaaccttcctaccttcccacatcttaagattccaggtcacaaatgtactgcccagagaagttactgaagtggtaactacaggaggtaggaagtagatttagaggattctaaggtttttccatctctaaagcttatatgattctgtactcagttgttttttttttttttaaatggaaatggattcatcattctattggggaggtatcttcatctctttgattcattgcctacttgatttggaattgagaggggtggggtgtttgggaaagcaagctgaaaacattgtgatttctaggtatttatgctggaagagtttttttgtttgtttgtttgtttgtttgtttttgagacgaagtcttgctctgtcgcccaggctggagtgcagtggcttgatcttggctcactgtgacctctggcacccgggttttaagcgattctcctgcctcagcctccgaagtagctgggattacaggcacttgccaccatgcccagctaatttttgtatatttagtagagacagggtttcagcatcttggccaggctggtcttgaactcctgaccttgtgatccacccgtctcggcctctcaaagtgctgggattacaggtgtgaatcaccatgcccggctagaagagctttatgttcatgatgctgagatgaagttggggccagaagaagagtcagttgataaaagctaaagtatttttagatcctgattaaagaagaaggtaatgggttgacttgagagagaatgagcgttctgttatgggaatgctcatatgggaaatgttctgtctctttgtcaaaaactgcaggaccacctgttggtgacattggaggaattcctgctttgtgtgggagggtgaactagatgcctttaaaaaaaatttcccccccacagacttgttttagatattttactgcttcagagagggtcatgttcacaccattctccccttttgtaatttttcacacctccctggctccccttttataatttagaaagaggtttagaagtctgtaactttttgtattagatttactttgagaaatcttgtacttaatttagtaggtcacagagggttgctgaatgactggaaacttgtgtttcttttccattaagggctatttgctgacttctgaaatattgatgatttatttgactttagaattttgcatactgaggggaaagcatcttaatgtatcatttaaagcaggagatactttcatactatacctgggttctcttggctttgaagaggagggtggtcatgagatattgaaagattgcatgggtggcytgtaatcccagcactttgggaggctgaggcgggtggatcatctggggttaggagttcaagaccagcctggccaacacggggaaaccacatctctactaaaaatacaaaaattagccaagtatggtggcgcatgcctgtaatcccagctactcaggaggcaggagaatcacttgaacccaggaggtggaggttgcagtgagccaagatcgtgccagtgcactccagcctgggcaacaaagcgagaccttcccaaaaaaggaggacttcatgggtagatatgagcaatggtgagaagcacctggaatatgtcatggaagtccgtgagatagtcatgaatgccattctttcagcaaatattcatggagtatgcctaccagatatgaggtactgttttagatgctgggtgtagtcagagtctctgccctcaagaaatgtgtcacttatacgatatttattatcattgacttaatatagtgacttaagggtaaagtgctttgatggcaaacttgagcttgagcaagcatcaaaacatggtggattttgtcactgagtggtttggctgtatggctaaagaaccttgttttattttattttagttttagttttagttttggagacagagtctcactctattccccaggctggagtgcaatggcatgatcttggttcactgcaacctctgcctcccgggttcaagccattcgcaggcctcagcctcccgagtaactgggattacaggcacctgccaccacacccagctaatttttgtctttttagtagagacggggtttccccatgttggccaggctggccttgaactcctgacctcaggtgatccacctgcctgggcctcccaaagtgctgggattacaggcgtgggctactacgcctggccaagaaccttgttttaaaaataggaagatttttgtcgtctggaatttagtatctcagagaataattctgtttgtttctcagtgaggttagtttgtgcagtaatatgaaatgtgatcttgtttggttattcaggagaagaccttaaaaatagaagtaaccttaattggtagacatttctaattggtagacttcagttttaattttcaggacacttgaaattgacagcatcagtgacaagttaccttggctcttgcccttaatcccagtattttaggagaccgaggcaggaggattggttgagccccaggagtttgagaccagccagggcaacatagtgagagctcatctctacaagaaaaaattagccaggtgtggtggtgcacgcctgtggccccagctattcaggtggcttaggtgggagaattgctggagcctgggaggttgaggctrcagtgagcggaaattgtgccactggactccagcctgggtgacagagctgagactctgtctcaaaaaaaaaaaaaaatcataatcctcattcatcaagcatttattgatgactggtatatacaaggcactgctgtctattgtggckgatgtgaagtgtatttaacactcctgtctttaaagagtttggctttgtgtgtgtgtgtgtgtgtgtgtgtgtgtgtgtgtgtgtttggaacagggtctcactgtgtcacctaggctggagggcagtggcacaatcatagctcactgcagcttcaacctcctgggctcaagtgatcctcccgcctcagcctcctgagtaattgggactacaggcatgtgccactgtgcctggataatttttaaaaaattttttgtaggccaggcgcggtggctcacgcttgtaatccctgcactttgggaggccgaggcgggcggatcacgaggtcaggagtttgagaccgtcctggctaacacagcgacaccccctctctactaaaaatacaaaaaaatttagctgggtgtggtggcrggtgcctgtagtcgcagctactcggaaggctgaggcaggagaatacttgaacccgggaggtggcgcttgcagtgagctgagatcgtgccactgcactccagcctgggcgacagagtgagactctctcaaaacaaaacaaacaaacaaaaaatacatacataaatacatttttttcttttgtagagactgggtcttgctgtgttgcctagtctgaccttgaactcctgggctcaagtgatgcttttgccttgtgctcccaaagtgctgggattacagatgtgagccattgttcccggctgattttgtatttatcattataatacaaagtagaggatatgtgctctgcatgtggcatagcaatgtaagtatcaagtggaattaaggagtaaaggtgaagtggaaaagtatttctctgcctagtagaagaatattgcattgggtttcaaatagataatttgccctaaaatgttgtgtgcagatcatattttttataaatttttaaatttgttgccttgtatttctaatttcagaaatgctttatttttatttctgattgagcgtaagatgtccactgctcttttagcatttttctcaacttttcagcttctctgccagttggtaatttgtaaattgagaaatattttgtgtcatcaattctattttatttatttatttatttgagacggagtctcactctgtcgcccaggctggagtgcagtggctcgatctcagcacactgcaacctctgcctcctgggttcaagcagttctctgcctcagactccagagtggctgggactgcaggcacaygccaccacgcccggctaatttttgtattttttagtagagatggggtttcactgtattggccaggctggtctcttaactcctcacctcgtgatccacccgccttggcctcccaaagtgctgggattacaggcatgagccaccgcacccagacgtcgattctattttgtagtagatttttaaaaagtagatatattattctaaaaacatgccaaatcagtttgtgttacagcttatcttgctttgtatcaataggaaaatagcttaaatatataggttttataagaaagaagcaagaatcattcatgaggaaggaatttataaggattttatatttacaaagtaagaatcaggcctggcataggattacatcacgcctgtaatcctagcacgttgggaggcygaggtgggaggatttcttgaggctaggagttggaaacaagcctggacaacatagtgagaccccatctctacaaaaattaaaaattagctgagtgtggtggtgtgcgcctgtagtcccagctactcggggccgaggtaagaggattgcttgagcccagggtggggaggtcgaggctgcactgtgattgagccactgcactccagcctcagcgacagaatgagaccatctcaaaaaaaagtaagaataattcagtaagagggaatattttaacatcttagttaccgcattgtagattattgctctgccatgaagctgtttttttctttagttgactcacagccagcttacccttttactacccttttttgttctgctacagtaaaacttgtacaggtgctcattctctttacttacttggatctctgctttagagctctgtcttgccttaatatttcatttaataaatatttgagtagtttttgtgtgaaaagcagtatgccagactttgggaaatcaaagaagtatgaggtatgggccctgaccttaagagtatcatctaaccaaggacggacatgatattcacacactcattctaagaggacttactgagtgcctgctctatattgttaagaatctctgctgtcaaagagttcacagtccaatggaataatcaagggcttattcattcaactaacatttattggacctgtggatccaaagataaataagacatagtccctggcccaaagtgcctacagtctagtggtgagacagataagtaaaccagcaatgataaggcagctgctaaaaggcattcagaactgaacattgcctattaataggtgctgtgtacagttggtgagaggataaatgcataactctttaaagtttatagcctttttattttctcttcaaaaccatccattggggaatttttttttttttttttttttttttgtcattggagagattgtagtgtgtccacggataatgaagggctacagtagagcctgatgttaaacccaaggcctgtgcmtaggcctcttacacgagcttttctgtcaaaaaacgaactatgactgatactgatgtgattcctgagagtgggaaatagtaggctaaaaagtaattaggaggtgtttttttgtttttgtttttgtttttgtttttttgagacagggtctcactttgtagcccaggctggagtgcagtggctcaatcatagctcactgcagccttgaactcctgggctgaagccatcctcccaccttagcctcccatgtagctgggactacaggtgtgcaccaccacgcctggctaattttttttttggtagagacgaggtcttgctgtgttgtctgggttggtcttgcctgggttcaaacgatcttccttccttggcctcccaaaatgttgggattataggcatgaaccaccatgctgggccaggaaatattttatagaagagatatgacatgggtactcttttcttttcctttttctttttttttttaatgaaacaagatttcactttgtcacctaggctggagtgcagtgacacaatcatggctcactgcagcctcaaccttctgggcccaaataatcctcctgcctcagccttccaagtagctgagtctataggagcatgctaccacccacacccacctggctaatttttactttttttgtttttggacacagggtcggtctcrctctgttgcccaggctggagtgcactggcacgatctcaactcactgcaacctccgcttcctgggatcaaggggtcttcccacttcagcctcctgagtatctgggactataggcaccatgcccggctaatttctgtatttttttatagagacagggtttcaccatgttgcccaggctggtcttggactcctgacctgatatcatcctcccatcacagcctcccacagtggtaggattataggtgtgagccactgaaccctggcccatgagtactctttttcttcctctcggatataaagaaatgatctgaacatccctggaagtattgataagaaagacagcaagatttaagagatcacataataatagtaatagctgacattattaataacatattaatcatgttaataatagtgtggattatggataatkatggatattgtgctaacagattatgcagggtctctcttttttttttttttgagacagagtcttgctctgtcaccaggctggagtacagtggggtgatctcggctcactgcagcctccgcctcccaggttcaagcaactctcctgcctcagactcccgagtagctgggactataggcgtgtgccaccatgcccggccaattttcgtatttttactacagacggggtttcaccatgttggtcaggatggcctggatctcttgccctcatatgatccacctgcctcagccttccaaagtgctgggattataggcgtgagccaccgtacctggccccatgatctcgttaaatctttgcaaataatcttataaagtagacactattagtatccttattttacaggtgagaaaatgagatttgtagcaactggatactttgcataggttataaaactaataagccattgtcctggggtttgaatccagttctgttcaaccctagaaccagagtgcttaacaataagctagggacttatattgtcagtwagcacaggactaggagtctcattgggagctctggtccctgcccaawtctcatgttgattagtaatccctagtattggaggtggggcctggtgggaggtgattagatcaaggggtggatttctcaggaatggtttagcaccatctacttggtgctgccctcacgctagtgagtacgagttctctccagaactggctgtttaaaagtgtgtgtggcacttccttgtctccctcttgcaccttctttctccatgtgaagtgcctgcccccccttcaccttctgccatgattgaaagcttcttgaggcctcactagaagctgagtagatggcagcactatgcttcctgtagaggttgcagaaccatgagccagtgaaacctctttcttttttttttttttttttgagatggagtcttgctctgtcacccaggctggagtgcagcagtgtgatctcggctcactgcaagctccgcctcctgggttcacgccattctcctgcctcagcctctggagtagctgggattacaggcgcccaccaccacgcctggctaattttttgtatttttagtagagatggggtttcaccatgttagccaggatggtctcgatttcctaacctcatgatctgcccgcctcagcctccaaaagtgctgggattacaggcgtgagccaccgcgcccggccacctctttctttataaattacccagtctcaggtatttccttgtagcaatggaagaacagcctaatacactgctagatgagatttgctagtacaacttgtgccctccctagaacctctttatactaactgcttcctctactaggaatgctcacctcccttattttatgcattgctggctccttcttgctgtttagatcacagctgaaatgtcaccatccatcagagaacctactcttgaccatcgatttgtggtagctattggccaccttcagtaatatcactcttttaaataccctttgtctgggtacagtggctcatgcctataatcccagcactttgggatgctgaagcaggaggattgcttgaggcccagagtttgagaccttgtctcactatgttaaaaatttttttaaatgagctagatgtggtagcacgcacctgtagttccaggggagactgagatgggaggatctcttgagcataggagtttgaggttgcagtgagctgtgctcatgctactgcattccagcctgtgttacagagcaagaccctgtctcaaaaaaagaaaaaatctktcatatactacttactactggttgtcttagtctctcagactactgtaacacaataccatagattaggtagcctgtaaagaacagaagtgtatttctcacagttctggagtctgggaagtcaagatgaaggtgttggcggattcattatctggtgagggctctctttctggttggtgtctactcactgtgtcctcacatggtggagggggaaggcagctctgtgggacctcttttataagggcaccagtcccatccatgggagccacaccaccatgatctaatcacccagaagcccctacctcctgatattatcacattgctgatgaggtttcaacaaatgaattttgaggggacacaaacattcagaccatagcactggtattgtcatgtttacttatgtatgcatttgtctgtctctttcaccttccttattgaacataagcttcctgagagcatgaataagcctttctgtcttattcatcattgtatcccctgttcggtacctagaacagtgcttggcatgttgcaggcactgaaatatttattgaatgaataaatgagtgtatactttgttgcctttttgtttgtatgctatccttgattattggtgagaatgataacttcacagtctataaagcatttacatagagcactttagttgagctttatgggaggtaaggtcaggcagtcatttattgttattgttcctactttatggaagaagaaatggattcaaggacatagataataattgataggattattaataattgataggacaaagacttgtgactttgtccagcttttactccctgcattaacctgaagctgccatcccagcagttctgagtttaaaatagaccaactcatgtttggagcctttttagaggttgagattgctccaacagtgcatattttgccttttgtacgatgatctgtgtgactttgagcaggttgtttaacctctcagagcctcgggtttcattttttgtaaatagagatgagaatatctgtcctgcctacttcactgtttttttaggattagtgagataattatataaacactctttcagaaatggtaaggtactgtcaaatgtaagatatttcttttagttatacaaggatataccaaagggctgcaactgactcattctactatctctcacatgtgacttgctaattgactgctgttttctttcatctggagccctgcaaggataagggggaactgggtaagaatgrggaaaggagagcagccttagagagaccagagagagattactgggagagcagtgtgggaattttcaaaggttgaagagactctggggagaagggaaagcagatayaggagctcagcattttccatccctttgtagatgtgcagactatgtctgctctattagacagcattgactcattagggctccttagcctgactagaatttagagggtagcctgaatgggaaaaatatttcactttaaaaaawttatttatttattttactaacttctgacatttaacatgttcctcagttatgaatatagacatcacaataataatgggacctgtggcaattatcaatgaaaatcacagacattttttccttttttttttttgagagggtctccctgtcacccaggctggagtgcagtggtgtgatgtgggctcactgcaacctccatccccgggctcaaatgatcttcccayctgactttctcaggtagatgggtctacatgaagcttggctaatttttaattttttttttttttttttgtggagacaaagtctcactatattatagcctaggctggtgttgaattcctgggctcatgcgaacctcccacctcggcctcccaaagcattgggattagaggcatgaggcagaggcagcactccctgcccacagatgttttcatatcacattgtggttgttgcatgtgtgtcaaatatcatttacatccatcactactttgaaattaccattagatcttttttttttttttgagacggagtcttggtctgtgccccaggctggagtgcagtggcatgatctcggctcactgcaagctccacctcccgggttcacgccattctcctgcctcagcctcccgagtagctgggactacaggcacccacccccacgtccagctcatttttttgtgtttttagcagagatggggtttcgccgtgttagccaggatggtctcgatctcctgacctcgtgatctgcccgcctcggcctcccaaagtgctgggattgcaggcgtgagccactgcgcctggccccattagatcttgttattcaatatgtaattaagaaatttttgaaaagttatagttatttagtataatacaactgtactttaatgtagaattttttttttttggaaaccgggtctcactgcagccttgacttcctgggctcaagtgamccttctgctctggcctcccagagtcctgggattataggtctgagccaccatgcctggccatagatttcttttatagatttatgcatttaaaaactattggggscaggtgcggtggctcatgcctgtaatcctagcactttggaaggctgaggtgggcggattatctgaggcaggaattcgagaccagcctgaccaacatggtgaaaccccttcttaaaatacaaaaactagctgggcgtggtaacaggcacctgtaatcacagaaacttgggaggctaaggcaggagaattgcttgaacctgggaggcggaggttgagtgagcggagatccgcgccgttgcactccatcttgggtgatagagcaagactccgtctcaaaataaaaaataaataaaataaaaattattggggctgaggtgggaggattgtttgaggccaagagtttgaggccagcctgggcaacactgtgagacccccatctctgcaaaaaatttttaaaaattatcgggcattgtggcacgtgcctgttgtcccagctacaagaggctgaggtgggaggatcacttgaacccaggaggttgaggctgcagtgagtcatggtcacaccactgcactccagcctgggcaacagaaaccctgtctctaaaacaacaaaaaacagttgtaaggagtccatggcacagaaagtttaagcaccctgatttaggtaagtcttcccttaacttctttagtatctcatgtgtgattgaatataagaagggtgactagtttcttatgtcctgtgaagtgtaacttttagctccatgaagagctctcttgtggtactttcactcagcagttgctcatctagaattctaagctggccatgctttttgcttcatttttcttcttcctgatcattcttgctgccctaactagagggcagaatacaagaaccactccacaaggtggactctgttccatttggttcagatagtaggtgatgacagtgtaatatttgtctcaattgcagcaggaactttagagaagatttaataaggtgtcatttgaattcagatggtgggtcagctgaaaggggaggggattctaaaccaagagaactagaagttcaaggcctaaggatgtggcagctgctggctccttctgggagtgtgagctgcagtgtgagggctgaagcttgtgcaaggcttggggagggtaggattatcttccttagtggtggtcatttaaatgttggcctcttttagaattcttagtatgatttaaaaagtgtgtcttaaaatgtattttcttttggtgctagttccaaagtaatgtactacattagtgtattgtcctcctttagggctgaagtcatcagattgtatcagtgctgtctcggggtgctatcgcttcccttcctttctcaatgttttcagcccctgcctmactgccactgtctcaagcattacccctgttccagtgcagtgagcaatcattataacgcccctcgtatacacactcgatcccagtcttggctaaagtgaatcctctgcctactgcacatctgcacgtgtgccctgcatgtggttgaaggatagcacatctgtgctgcctacactcccctaagattcagaaccatcaccttggaggggtgcatggtgctgacaagcagttgcaccacactgaccccacccttctagatgacaatttttttttttaagatggagtctcactcttgttgcccaggctggagtgcaatggcgtgatcttggctcactgcaacctctgcctcctgggttcaagcgattcccctgcctcagcctcctgagtagctgagattacaggcatgtaccaccacgcctggctaatttttgtattttaaatagagacggggtttcaccatgttggtcaggctggtctcaaactcctgaccttatgatccgcccaccttggcctcccaaagtgttgagattacaggcattagccactgtgcccagcctagatgacaattttacaactttgtcctcagatcttcaataacctacttccctatccttattcttagttgatgactgtacttcttatttcacttagaacaattaaacagtcaaaagagaatttctccagatttctaccctcacatctcagcttctgtctgtaccggatgccttcccttctattkttaaggaagagctctgcccctgtctaaagtcacctccccgactcgttcgctaaatcccacctcattttggctaatcggtattctctgtttcctacaaacgtgtcgctgtttctctcattttaaaacagttgtcagggggagagactctttctgacacccactcattttctttctttttttttaaggcagggtctctctcagtcacccagactgtagtgtagtaatgtgatcaaagctcaccgcaacctttaactcctggcctcaagcgatcctcccacctcacactcccaagtagctgggactaaaagggtgcwccaccacacccctggctaatttttacattttttgtagagatggagtctcactatgttacccaggctggtcttgaactcctgggctccagtggtcctgcttcatcctcccaaagtgctgggatgacaggcatgagccaccgcacccagcccacccactcattttctatgggtcatgtgcctccagttgctgctggcccatttctcagctacttcttagagcaaagcacctctagttgtttaaattgtctcagccctcaaagtgtgatccacagagctacatcagcatcatcagcggtcacctgggagcctgttggaagtgcagaatattggccccatttactgaattaaatctgcattctaagacaatcctcaagtgtttcaggtacacactaaagttgaagaggcactggtctttactagctttctttgattgtttcaccgcctcttaaaacttaatccagctgggtgcggtggcgcacgccggtaatcccaacactttgggaggctgaggtgggcagattgctttatctcaggagttccagaccagcctgggcaaaacagacctcatctctattaaaattttttgaaaagatcaacgaggagtggtgacctgtgcctgtagtcccagctacttggaaagctgaggtgggaggatcatttgagctggggagacagaggttgtagtgaaccgagatcaagccactgcactccagcctaggcaacagaggaagagcctgtctccaaaaaaataaaaaccttgatccagttttgggaggctgaggtgggaggatcacttaagaccaggaatttgagaccagcctgggcaacattgtgagaccctgtctttacaaaaaatttaaaaactagccaggcatggtggtacacatctgtagtcctgctacttgggaggctgaggcgataggatggcttaagcccaggaattcaacgcttcagtgagctatgatcataccactgcactccaccctgagtaacagagcgaaaccctgtctctaaaaacaaacaaaaaacttgaatgcgctcaaattatttcttcttgctatctgttttaagtgtacaattgaatgatttttagtaatttattgagttgtacaattatcactgtagtctagttttagaacaggagagattggttttaaaatttaattttatatttcagttatgcagaacatttacatggttgcagcatatagaacaaggttatattcagagaggtctgtcttctagtcctgtcctccttccccctcctagctcccttcctctaactatagataatattttatttgtttttgacttattcttttgttgttacacgaataagacaacatttgagcagagatgggaaggaattgagggaacatactgtgtatggtattttacatcttgttttttctgcttaatgatctatattggagatctttccattttagtaaaagagagcttcactctttcttgtcattgctttgtactccatgctgtggatgtaccataatttatttgacgacatcactcttgattgattgatgatccctttaaaaaatatgaataatggccgggcgcggtggctcacgcccataatcccagcactttgggaggctgaggcaggtggatcacaaggtcaggagatcaagaccatcctggctaacacggtgaaaccccgtctctactaaatatataaaaaaaaaaaattagccaggtgtagtggcaggcacctgtattcccagctacttgggaggctgaggcaggagaatggcgtgaacccagcgagtggagcttgcagtgagccgagatcgcgccactgcattccagcctgggtgacagggcaagactctgtctcaaaaaaaaaaaaaaaaaaaaagaataatgctgcagtgaataacctcacatgtatgataaatttccagaggaggatcatttcctcacatgtatgataaatttccacatgtatgataaatttaacctcacatgtatgataaatttccagtggatacactgggtcaaagcataactgcatatatatatatatatatatatatatttttttttttttttttttttttttgaggcagagtctcactcagtcgcccaggctagagtgccgtggcacaatcttggctcactgcaacctccgcctcccgggttcaagcagtcctcctgcctcagcctcccaagtagctggaattacaggtgcctagcaccatgctcagctatttttttttttttttaagacaggatctctctctgtcacccaggctggagtgcagcggtgcgatcatggcttactgtagcttcagcctcctggtctcaagcaactctttgacctcagcctcctgagtagctgggactacaggctcgagccactgtgctcgtttaatttttgtgttttttgtatagacagggtttcgccatattgcccatgctgggttcactagtgtgttttagcatttagcatacttaggaatgttgtggtttacaagtaacaggaaacccattcaaactgtttaaattttaaaggggtgtattggtgtatgtcactgaaaattccacaggtacagtgggcttcaggcatggtttgattgggatgccagctccgttttgctgagattccattggttctgctttctaccgtgtttcagcccggtttaggtggcaaaacagtggtggaaatgttaggcttcacatcaccgtaccacatagaccaaaatgagagctaatatccaggatgagaatgaacagctcttctaatcaggctgtcataaaaataaggaagcttattttatagaagcctttaccaaacctccttctttgacttgttgttccaaattggattaaccagcccattcctgcggccaaggaaatacrcactggttaacccagtctttactaacccatacctttagcaaagagattggattacccaacaacttgattgctctggagactactttggagttggggtatgagatagtagataggagaatgatctgtaagtagatattggataagcgagtaagaaatgcaaactacactgaggtcttgcactggtctaggttttgggacccagatgtaatagacatagttcttttctcgagacaagctcataggagaaccggtacagcagggaatacaacacactggaattggcacattgagtgcacctttgactgcattgtactgtttcgtggtttaaacctgtctttcctttgcccttgctgtttgactactatgattgagctgccaccttttcacacaatattggaattttttgtttgaatctctgtttaccctactggactgtgaatcttgagggaagaaaccatatcttattgatcatatcaataagtgcctgtacgtagtaggcacattatgttcatttttaagttgaacaaaattggaactaatttgttgaaattatagtcctccaacaaggactcacttgaatacatcagataatctttctttctttttctctctctctctttctttctttttctttctttctcttgctctctcacgctctctcgccctctcacactctctcgctctgttgcccaggctggagtgcagtgtgatctcagctcactgcaacctctgcctcctgggctcaagccagcctcccacagtctcccaaacagttgtgactacaggtgtgtatcaccatgcccagctaatttttgtgtttttttgtagagacagggttttgccgtgtagcccaggctggtcttgaattactggactcaaggtatctgcctgcctcagcctcccaaagtgctgggattacaggcgtgagccaccttgccaggcccttagataatctttcaaaatccctttcacaagccaaaattatctgctggtgactggaactcacagacagaggcttgctagcccttttgcattgattgagaggcttttcaaaattaatcattgctatgatttcaatatctgttcccaccaaaactcattttaggatttaattgacatggggcctttaagggctgatgagatcatgaaggctctgcccttacgaatggattaatgccattattgagggagtgggttagttattatgagactgggtttgacataaaaacaagttggccaatttcctgtctctgtgttgggcacttgcttctgcttctgccatgggatgacttccaccagataccagcgccatattcttggagtacccagccatcagaaccgtgagccaaataaacttgtttataaattactcagtctggccaggtgcagtggctcacgcctrtaatcccagcactttgkgaggccgaggcgggcggatcacctgaggtcaggagttggagaccagcctggccaacatggcgaaaccgtgtctctaccaaaaatacaaaaattagccaggcgtggtggcgtgtgcctgtaatcccggctacccaggaggctgaggcaggagaattgctggaacccagtgggcagaggctacagtgagccaagattgcgccgctgcactccagcctgggtgacagagcaagactctgtctcaaaaaaaaaaaaaaaaaaaaaaaaaaaattagtctgtggtattctgttaatagcagcagaaaatggagtaagacagtcacaacctccaatcttatgttgttagaattcttttgggataacccagaaggaagctttacatagtgtcttcattgcctgaaactagctttgtttggaagttttgctttccctatcctggtgtcctggagaaaatgcttgcactctcccttccagaagcaggtggctttgctgctgtctctacttctttcccattagttgcaagaattacactactccttacattgcctttttcctccctttaaattatagaatcggtgtacacgtagttagcaagactgaaggcattattagctcagctaatttaaaaatgatggctgttgtgctcagggctttccttgatgtggcagcagtctgactttgccagggagctcagagagtatctcacaagttgagctggaaagggcttcacagaaccctgactgatacactggaagtgccacattagaccaggctttggtccatttgccactcctggcatccctttggagcctctacccttagactcatgacacctttctctctcttcctcatggccatatattgacttcccagccacttttaatcattgaagactccagtgcctgactcacagccttcctttccactccagttcccgccatcatcttgggtggtttcatcttcatcacatgacccaggaagtaccttggctgctagctttcttggcttccatgtccaccctactaatctcctctagtccacctctggcactctctcccacagtgacatgcgggatcttgtcatcagctgaaatggtttagctccaaaatcgctaattcagatagaaacagccttctrctgcaatatggccttgcttctcactgctctaatttctccaggatactgatgactcaacttcatgttgccagatccattggacaccgcttggcccacaacttccttgacctctcagcagcatttgacacaattgatcatcttctctttattgaaacattctttgtcttgacattttaacctcaacttttttttatacatttttgacccactcagtacttcacctcctttgctagttctttctactctacctagaatttaactatcggatttctttaattgctcagtcctcttcccttttcttttccattataagtttctgctatatcagaagtcatatttmctttttgttcctaaaattgtttcttgtgccttttctccatcaccaaaggaaaaactatttattgcaataaattaatacagcaggtattcctgtgaaagcgcaagttagtttgttagggcaattaaaacttctacgacatatgctccggcagagttccgtctctgccactggcagcttaagatctgccttcttgagagtggtttttgccagttccttttcccactcagttgccttttgctttctggaccacctgtttccagtcgtgggtgtggtcatttttgggtggaactgtggctctcccctcctcagctccagtcatgggtgtggtgatatttgggtggaactgtggctctccctcctcagctccagagctcctgtgcactgtcatttttctgctgctgcttgggtggctgctgggttcagtcaccagctttagcttcaccccttcattcatattttaatttttttcttgaacagacttataagagtttgtcaattaaaatttttttcaaagagtcagctagtatctgctttctgttttgtgaatgtcatctttatttcctttctttaggtttactctgttctttttctagcttactgaattgaaaacgtgttcatcctttcttgctttttaatggtggctcaaggctgtaacattccctctaagtgttgtttgaggagcttcttgtatgttagctgtgtgggtataatcattgtggtattaaataatagtcttcagcatgtcaagacctaattttttgtttctttttcttttcttttctttttttttttttttttggagacagggtctcactstgttgctcaggctggagtgcagtggttcgatcacaactgtctgcagccttgacctcccaggctcaggygatcctcccacctcagcctcccaagtagctgggactacaggcacgtgccaccatgcctagctaattttttatttttttttagtagagacagggtttcatcatattgcccaggctggtctccaactcctgggctcaagcagtctgcctgcctcggcctcctgaagtgctgggattaccggcatgagccactggaccaggcctagtttgttatttccatttttattctctccttaatctttgagttctaagcaagtgattttcttttttttaaagacagggtctcacttggtcacccaggctggagtacagtgacatcatcacggctcactgcaaccttcgcctcttgggctcaagtgattcccccatcccccaccccccttctcacccccagattggactataggcgtgtaccaccacgcctggcagagaccgggttttgccgttgcccaagctgatctcgaactcctgagctcaagcgatctgcccgtctcagcctcccctaagcaagcatttttaagtttctatgctgtttaattttttttaactgattaatttatttgcattgtgtggtcatggaatatgtttttatgatattggttgtttgagatttggtgagtctttctttgtaacctagttaaaccattccatatctttttaaaaggatgtatattccttatctgttaggctgaaggtgacatatatctgtgcatgcatgtttgatgaagtttgtaatactgttcacatgtccatatcattactatttttatgactgcccctcttatttatcagtttctgatagatgtgttataaatatctcattgtgattctggacttgacagtttctctttgccagttttgctttatattaaattcaaaattgttagtctgtgcattgttctttgtgttggtatactatactcttcattatctctatttgtttttgccctaattttgttttgaggattggacagtttattttggttactatttgcatggaatgtctttatatgccttactgtcttgtcactcatgagactgtcttttcctttacctcactccctccacctactttcactctatcactaattcctattgattttctctctgaagtatatatcttgactacatctgcttttgttttcactgccctcactcatctcacctgggcactgtacagcctctgactggtctcctggtccactgttgctccctctaatctattctctggagagcagtcagtgatctttaaaaatgtgaatcggattgtcactcccaggcttgaaaatctttcagtggttcctgttgcttttagcatgaaagactaaattcctaacacagcgtacaagccctgcatgaaactaccccttgcctaccttatcagtcactcttcccttcattatatctttctgacttgctggcttccttttaattcctctcacaaaccttaaccttttttgacatagattcttcttcttatttatttatttatttgacacagggtcttgctttgtcttccaggctggagtgcagtgctgcagtcatagcccaccggtaacctcaaactccttgggcttaagctatcctcctgccttagccttccaagtagctaggactgtggacatgtgccgccacactcggctaatttttttctttcttatttttttagagacaagctctcgccatgttgcccaggctggtctctaattcctggcctcaagctgtcctcctgccttggcctccagagcactgggataatagttgtgagccacygtgcccagcctagattcttcttaatatactgtttcctttgcctggaatgtgcttctattcctcactctctgccccttcatctgtttaactcctactccttgaaatcttagctcatatgtaattttgtccaagcgttttaccctgaccttcagactagatccggtctccctgttaccgtctaccaagtcgcctctctaatgcatgccacggtagtaattaaataagaaattgaaatgtaatgtctctttactccctacccaccaaactagattgcagactattgagggctgattttatctgattgattgctgaactcctgtctattctgcatgctagctcagtgcctttgatgcattataggtacttcataaatatttgaatgaatggataaatatacaagggactttgtcatttacttattgacagtgggcagactgctatggtaagcatattgtatgcagtaggtatttggttaaatattttcaatgaacagttgttcgcctgatctttctcatctgtgtttggtgacatgatatatttaaagaacagcaggtggttatttgtacccctcatttctctctactgtatttctctcttccccccacttcccatacatctcccatatcttaccatagcactggtaacaaacaggtacaggcatgaaagaaagacctgagaaatctgcctagtttaggagcttttttagaaggcaagcctgttaatcattcaaatcactaaatcartttgctgtgtgggaattttttcttaattggcagcagtaaaaaggaaaaatttttccccccaaagataaaaatagagtagtttattgtagaaaattggaaaactcaaggaagaaaaaaactccatatcccacagctgttagtaatttggtatttttacctgtcagtcttttttttttggtgttcagttatatattttaagcataatttaggtccctagtaccgagtattatgcctggcacggtgtaggtgctcagtagttagagaatgaacccaagtatgtgttttttcaattttaaaatggctgcagcttcmcagtttggtatgtagatgagcattgcttttttttgatggtgttcataacctgttttagagtagttgaactttatatgaaggtgtgacttttaaaaaatgagcccattagatcattgtaaaaagttgtttgggttaaatatttttggagtcacctgtgagttctttttttcacgatctacttccagtcctttcagtagagcctgttgactctgcctctaaatatatccagaatctgaacacttctgcttctaccactaccaccctagtttaaggaagcascgtctctcacttggattattacagaggtctccaactggctgcccacctctatccttgcctcttacagtctgttctcctgatgtcagccagagygatcgtttaaacagtataggtcagatcatattcttcgctgcttaaaactttctaatgtgtttctatagcgcttagaataagatctgaattgcttttgatacagtgcttttcccctccccgattccccagtgtgatttgctgccacctcctcctcatttattccatccattgcattccatgaagagcagctgcacccctccccgtcccacccgtggagccaatggtacacgctctgcttagaatccttagcccctctgcttagaatcccctccccagtggccatggcgctggctccctcacttcttcaggtctctgcccaaatgtggttctgtgaaagaagctttctcttagccctgcccagaaaggcactgccatcacctttccacctcagtcgttccactcccctttcctgactgattgttcttcatgttccttgctgatgttcattttgttgcctgcttactgactagtcccacctaaaatctacaagaggagggctttatctgtctttgttggtgagataccaggatctaaaayggtgcctgaagcatatagaattcaataaatattggatgaatggatagtggatattctcaagtaacttttttttttgaggtgaagtctcactcttgtctcccaggctggagtgcartggcgtaatgctcactgcaagctctgcctcccgggttcaagtggtyctcctgcctcagcctcccgagtagctgggattacaggcgcctgccactacacccggcttatttttgtatttttagtagagacagggtttcaccatgttggccaggctggtctcgaactcttgacctcaggtgatccacccgactcggcctcccaaagtgctgggattacaggagtgagccaccgcgcccggcctttctcaagtaacttagtgagaaagtctgcattgggaattaggtattgtgacgtctcataggcctattttattttttaataggtaatacgttcacatggttcaaaattcaaagagcatgcaatgaagtctctcacactttgccctccagygccaccctgtccccctcctctgaagtaaccagtattaagttcttgtatgtatttccagagatagccaatgttttaatacacaaaattacagatatagttttcctcctttataaaaatgcaaactttagcatctgcactgttttacaccttgttttgatttgtatacttcggagattgttctttgtcaataaagacattattgtgtaaaagcatctttaatgcctgtacaatatcccattgtgtacatttatcataattcttcttttgatggacattgatgtttctagtctttacacgctatactgcaataaatcactttgtacatacatcattttgccttgttgctagtatatctgaggaataaattcctgtgaggaattgctgggtgaaaaggatatgtgcatttgtaattttagagacatagtcaaatcgccttctaaaaattgtaccaatttttacttgtggcatagtgtattgttattttgatctttgctaatttgacagatgaaagatggtataacactagagttttctggtgtttcttgtgctatgaattaagcattgttttgtatatttaagagccatctgtattttctatgagttgttcatgtcctgaacccgcttttctactaggattctggtctttaaaaaaaaaaaaattaagttggtaggagatctcttttatgattatttatttttaatttttaaatttttttagagatgggatctcactgtgttgcccaggctggtctgcgatcgttccacctcagcctctgagcagctgagactataggcatgcaccaccatgcccagctttttatataaattagcccttaatctgtgatctgagggacagacattttgttccatttgtcagttgtcttctgattttgctcatggtagttttttcctacatagaaatttgctttttttccctttatttttcttcttcctcctccttgggaaatttcatttttgttttaataattattattattttttgacatggagtctagctctgtcacccaggctagagtgcagtggcgcgatctcagctcactgcaacctctgtctcccagcaattctgtctcaggctcctgagtagctgggattacaggcatgcgccaccatgcctggctaatttttgtatttttagtagtgacggtgtttcaccatgttggtcaggctggtctcaaactcctgaccttgtgatctgcctgccttggcctcccaaagtgctggaattacaggtgcaagccaytgcgcctggcctctctctctyttttttttttttttttttttttaggagacagggtcttgctctgttacccaagctggagtacagtagtataatcatagctcattgtgacctcaagctctttggctcaagggattctcccacctcagtctggtgagtagctgggactacaggcatgagccacactgttggcctcttcttgtacytctgaggtttcatttcttacatatgatttctttttgatactgctgagatttattctggtataaattgtgaggtgagatttcaccccatgttttaaaaaacaattttaggatttcttgatcttttatgtcttgtctggagagtaatttgtcagctgttttctgctaaactgtgagtggtgtaagaccagttagctatgccctgtgtacttttcagtttaagacatagttgcctgtatcttcccaaagatcttatctttcgttgacttaaaaataacggtggaaatacagcctattggggagtattgtgttaaaacaaattttatagaattttcagttggtaaagattgataagattagtaataataggtaattatgcattatatttaaggaatatgtttagtacattatataatgctaacgaaatagggatttttctgttttttatttttgtttttttgtttgttttccttttttttttttaatttttatttttattgatcattcttgggtgtttctcacagagagggatttggcagggtcatatgtggagggaaggtcagcagataaacaagtgaacaaaggtctctggttttcctaggcagaggaccctgaggccttccgcagtgtttgtgtccctgggtacttgagattagggagtggtgatgactcttaacgagcatgctgccttcaagcatctgtttaacaaagcacatcttgcaccacccttaatccatttaaccctgagtggacacagcacatgtttcagagagcacagggttggggggtaaggtcacagatcaacaggatcccaaggcagaagaatttttcttagtacagaacaaaatgaaaagtctcccatgtctgcttctttccacacagacacagcaaccatccgatttctcaatcttttccccacctttccccgatttctattccacaaaaccaccattgtcatcatggcccgttctcaatgagctgttgggcacacctcccagacggggtggtggccgggcagaggggctcctcacttcccagtaggggcggccgggcagaggcgcccctcacctcccggacggggcggctggccgggcsggggsctgaccccccacctccctcccggacggggcggctggccgggcagaggggctcctcacttcccagtaggggcggcctggcagaggcgcccctcacctcccggacggggcggctggccgggcagggggctgacccccccacctccctcccagacggggcggctggcctggcgggggctgacccccacctccctcccggacggggcggctgccgggcggagacgctcctcacttcccagacggggtggctgctgggcggaggggctcctcacttctcagacggggcggctgccgggcggagggtctcctcacttctcagacggggcggttgccaggcggagggtctcctcctttctcagatggggcggctgggcagcgacgctcctcacctcccagacggggtcgcgactgggcagaggcgctcctcacatcccagacggggcggcggggcaaaggcactccccacatctcagacgatgggcggccgggcagagacgctcctcacttcctagatgggatggcagccgggaagaggcgctcctcacttcctagatgggatggcctgttttttatttttattttttatttttatttttttggaggcagccttattctgtcgcgcaggctggagtgcagtggtaccatctcagctcactgcaaccttcacctcctgggttcaagtgattcttctgcctcagcctcacgagcagttggaactacaggcttgtgccaccatgcctggccagttttttgtatttttagtagagatgaggtctcaccatgttgcccaggctggtctcaaactcctgagctcagacaatccacccaccttggcctcccaaagtgctgggattacaggtgtgtgccaccgcgcccggcctgtttttttctttttttaaaattattattattattattattattattattattattattattattatttttatcaataggtttttggggaacaggaggtatttggttacatggataaattcttcagtggtgatttcctagattttggtgcagccatcacctgagcggtgtacactgtacccaatgtgtagtcttttatccctcatccccctcccacccttccccctgcgtccccaaagttcattatatcattcttgtgcttttgcatcctcatagcttagctcccacttacaagtgagaacgtatgatgtttggttttccattcctgagttacttcacttagaataactagccgggcgaggtgattcacgcctgtaatcccagcactttgggaggccaaggcgggcagatcatgaggtcaggagatcgagaccatcctggctaacatgctgaaaccccatctctactaaaaattcaaaaaattagctgggcgtggtggcgggcgcctgtagtctcagctactcgggaggctgaggcaggagaatggtgtgaacccgggaggcggagcttgcagtgagctgagatcgcgccattgcactccagcctgggcaacagagtgagactccatctcaaaaaaaaaaaaaaaagaataatggtctccagcttcatccaggttgcttggaatgccatgattattattattattgttacattttctttatccacctgattgatgggcatttgtggtggttccatatttttgcaattgtgaattctgctgctataaatatgcatgtgcaagtgtctttttcatgtaatgacttcttttcctctgggtagataccctgtggtgggattgctggatcaaatggaagatctacttttagttctttaaggaatctccatgctgttttccatagcggttgtactagtttacattcccaccagccatgtaaaagtgctcgcttttcaccacatccacaccagcatctgttatttttatttatttattattattattttttgagacagagtcttgctctgtcacccaggctagagtgcaatggcacaatctcggctcactgcaacctccacctcctgggttcaagcgattctcctgtctcagcctcccgagtagctgggactacaggcgcccgccaccatgcctggctaattttttgtatttttagtagagacggggtttcaccatattagccaggatgatctcgatctcctgacctcatgatccacccaccttagcctcccaaagtgctgggactacaggcgtgagccaccatgcccagcattttttgttttttaattatggccattgctacaggagtaaggttgtatcatattgtggttttgattttcatttccctgataattagtgatgtttagcattttttcatatgtttactgtcaatttgtatatcttcttttgagaattgtctattcatgtccttagcccactttttgatgggattattattattaattattttcttgctgatttgttttagtttcttatagattctagatattagtcctttgctggatgcacagtttgtgaagattttctctgcaaccctgtgggttgtttactctgctgattatttcttttgctgtgcagaagttttttcatttaattaagtcccatgtatttatttttgttgcatttgcttttgggttcttggtcatgaaatctttgcctaagccaatgcctagaaggatttttccggtattatcttctagaatttttatggtttcaggttagatttaagtctttgattcatcttgagttgatttttgtataaggtgagagatgaggatccaattttattcttctacatgtggcttaccaattatcccagcaccattcattgaatagggtgtcttttccccactttatgtttttgtttgctttgttgaagatcagttggctgtaagtatttgggtttatttctggattctctgttatgttccgttggtctgtgtatctgtttttataccagtactatgctgttttggtgactatagccatatagtatagtgtgaagccaggtaatatgatgcccccagatttttttcttttttgctttgtcttgctttggctatgtgggctcttttttgttttcatatgaattttaggatggtttttcctagtttggtgaagaatgatgatggtattttgatgggaattgcattgaatttatagattgcttttggcagtgaggtcattttcacaatactgattttacgcatccatggcatgggatgtgttttcatttgtgtcatctgtgatttcttttagcagtgtcttgtagttttccttgtagaggtctttcatgtcaatkgttagatatattcctaagtattttattttatttttttgcagttattgtaaaaggggttaagttcttgatttgattctcagcttggtcgctgttggtatatagcagagccactaacttgtgtacattgattttgtatccagaaactttactgaattcatttatcagatctaggagcttttgggatgagtctttagggttttctaggtatatgattatatatcatcagcaaacagcagcagtttgacttcctctttactgatttggatgccctttatttcttttctcttgtctgattgctctagctaggacttccagaactatgttgaataaaagtgaaagtcagggcyggaaacggtggctcacgcctgtaatctcagcactttgggaggccgaggtgggcagatcacgaggtcaggagatcgagaacatcctggctgacatggtgaagccccatctctactaaaaatacaaaaaaattagccgggcgtggtggcatgcacctgtagtcccagctacctgggaggctgargcaggagaatcgcttgaacccaggaggcagaggttgcagtgagccaagatcgcgccactgtactccagcctgggcgacagagcgagactccatctcaaaaaaaatcaagtgtaagtggggccgggcgtggtggctcacgcctgtaatcccagcactttgggaggccaaggcgggcggatcatgaggtcaagaaatcgagactatcctggctaacatggtgaaaccccgtctctactaaaaacgcaaaaattcgtgcccggctgaggatttttacatctccgttcgtcagggatattggtctgtagttttctttccctttttttttttggttatattctttctggttttgggtattagggtgatactggcttcatagaatgatttagggaggactccctctttctctatcttttgtaatagtttcagtaggattggtgccaattttttttttttgaaacggagtcttgctctgtctcccaggctggagtgcagtggcgccatctcggctyattgcaagctccgcctcccgggttcattctcctgcctcagcctcctgagtagctgggactagaggcgcctgccatcacgcccggctaattatttgtattattattattttttttagtagagattgggtcaggctggtcctgcactcccaacctcaggtgatccgcctgccttggcctcccaaagtgctgggattacaggcgtragccaccgtgccccaccttgcagttaccatttctaccatgtggctaacttgcccgagatttgtaatggttcactttactgatgacatcaaatccaagctaagcctagtaagttaccctgtcagtgcctcttcaaaatctctctatcatcatttctcctgatgagattctcccattcagatattgaactagctgagctgagaccattgttttcacacacttgtttatctatttgtctcactcttttctcaagtgccttcccacatatttctacttgccaatgccattgcccaagtattttacttcttacgtttacagaagctgtgagactgcaggaactgtgaaaaacatcggtatttgtcccagtgttactaggcaaaaggggcttgctgtccaatgtgccagaagcctgtactgtgamactgggtttttgagaaagttttctcaaaacccagtgaagggagtctactagctatgagaaatatagccagatgagaatcgagccactgggtttttgagtattttctcaaaaacccagtgtcgtgatattggctttctttttattgcaagtcgactcacaaggagtcaggagttcagctcaaatctgtctctctgtgctggctttaaggcagtaactttattagaaaagctttagggagtggattctgggagtagcaggtgattgatataaggaaaggggtggtctggaaagtcttcaggcttcckcagttatctattcatgcctcctcatgggtcccatgtgcaaatttgggggaagttagtatgaaccatgtggtagaaatttaagcttgttctacacaaactccagtcacctatattgattccaaccaattttagcctgttatgttttctgtcttacaagtggagggcatgtcagtaagttgtttcttttcttatctgcaatcctgcaaacttgagaatttctgttagtcattggtgtctttaactcttggggtcatggtttcaccagtcctgaaggatccctgtgccttggcatcctcattttttataacatgagtttgtatcttttgtagggtggtggagtttgagatctgtatatatggggttgaattgttatgtggctaggtgcagtggctcatgcctgtaatcccagcactttgggaggctgaggtgggtggatcrcttgaggtcaggagttcgagactagtctggctaacatggtgaaaccccgtctctaccaaaaatataaaaatcagccaggtgtggtggcatgagcctgtagtcccagctacttgggaggctgaggcaggagaattgcttgaaccccagaggcagaggttgcagtgagccaagatcgtgccattgcactccagcctgggctacagagtgcgactctgtctcaaaaaaaaaaaaaaaattgtttggcgtgtgtgtattccagatcctcagtgagttccttgtaggaatggaccatgtttgtgcacctcttctccctctcttcccttacaccagtggttctcttaggcgtggtccctgcccagcagtatcagcgtcccctcagaacttgtggcaatgaagattctgggcccctgcacttgaacactgcatcaggaactgtgagagcaggctcagcaatctgtggtgtaactagcatgccaggtaattctgatgggctagtttgagaaccactgccttataggatctagtattggtttacctcacagcgaacgaaaactcagctcactgactatttaatttgtagactatactaatcactgctgatttgtttctatctcatcacagctcccatttactgaatagctacactgggctaggcactgaactaggtgctgtcacatgcattgtcccttatgatctcacagatackttgcagaagagggagtggcgcgtcccactttatattatatagagatgagagaggggaatctctgagggatgtagtaacttgccaaggctacacagctggtaagtggcagccggagatttcagcaaggcctgtcagactccaaagcctatgttctttctagcaccccaccccgcttttcatgtaaactcttgctcccagagaatgcgtgtgcctgtgtggctgtcatgtggttttataataaatggttgtaatacctgtatttctagatttctctcctcatatacttaacccacccaataagcagcaacctttcagctttttaaaaaaagactattttctatttaataatattcatttatttacaatgtgtcagaattaggaggtattataaaagcggcctttgagatcatattctaacctctgtattttcacaggtagagccatcatatgtgctactctatttttgtctcagaaattaaactttcattgaggtgtaaattggtatactacacagttctgacctctgaacttctaacttttttttaaagtatttttttttttctaaaaaaaaaaaaagaaagaaaaaagaaatggggtctcactatgttgcccaggctggtcttgaactcctggccccaagcagtcctcccatctcagcctcccaaagtgctaagattacaaacatgagccaccacaccctgtctgtatttataacttaaaaaaattatgctacatcaagtacagtaaaatcttaactgattggaaagagtaattttactggtttaactttgcccttcctcacccccttcattttcaaatccctcccctcatatttgtacatacattttccaacaggtggctaaatattaacttttattttttaaatgctttgtaaggaatcaaatacttatttccacgctaactcactgtagttcttggtttgagtgcatttaaaaaatgtaaattgatactattaataatgataacagttacgtcgggacggtggctcacgcctgtaatcccagcactttatgaggccgaggcaggcggatcacttgaggtcaggagttcaagaccagcctgaccaacatggtgaaaccctgtctctactaaaaatacaaaaattaaccaggcgtggtggcaggcgcttgtaatcccagctagttgggaggctgaggcaggagaatcacttgaacccaggagatggaggtttcagtcagctgagactgcactccagcctgggcgacatagcaagactgtctcaaaaacaaaacaataataataataacagccagtacttacatagcacttactttgttccaggtatgattctgatcactttacatattttaactcctttaatcctcgaacgctgcctgtagcagggtcactgttgtattaaccccattttcccattttgtggaagtggtggtatataaaagcaaatagcttgttcaagctcacaagacagaacctgaaggcatcttggctccagagtctctgctcttaaccactctttagagtgtcttgcacgttttcaaccagagctttctctatataacatatcactttacacttttaaaatagcatactatttattgcaactcctgggttcaagggattctcctgacttagcctccggagtagctgggattactgcttggggtgaagaattctgtaagaattttgtgagagcagggcaagtactcaggcttgctgtgggcaacaagaaaagtggggacgttgtgttattttgggtctcttcatatttaaagacaaatctagttgtagtactctacacggaggagagatcagatcttgctgtgtcactttagagattctcttttggtttgtagtcacagctgctgtctatgagacctgctgctatttggagctttaccctttgtcrtaaccatgtgaggggctggcctgcatttcttagctttccatatctttgtaccctagtttaaaattgctgcctgtttcygccatccttgtatttgcatacagaattttgcatacatccttgctgactagagtttttttggtgagtatttggctgcatggcaaagggatgattttcctgaaggtggccaaaagctttggaaagagctgtggatgtggtctttgtcattagttcatcaggacacattcagcttgaaagctttgaattatcaagaggcaagcaactcatgtcttccagtacagttgctgtctcctgaagaaggctggcagcattcagaacataacttatgaactttaaccagatgagtgtcatttggtttatcctaaatttaatgagtttgggtaagtcttctgtagttcatggcactgtgttataaataatagaataatttcaggttctgtctggtagttactgtctgatgtagaagcaagaagaccacaggtgagaggagaaggagactgagaaatgagggctttgggttagattaccttagtgctcttcctagtttcctgggcatggtgtacttacagtgaatgagatcagagctccgagttgagctgctgtgttaattggttgtatgattttaggcagttaacttctttggtctgagttgcagcatcttgagaacaagtgtgactttttttttttaatgaccattcacctgaggtgactttttaaagtgccactccagctttatctattatctgatcccctgatgtaagacttagattacataagatttttccatattataaatatattacagaattattcacactgggaaatgagttgcttctgtagtctacttctttgggaatagctttatatttaacttttaagctagtagttgcaaaattttaattctatatatyacgtcatatgagactgcagtgcattatacgagatcatgagtggtaagcttagcatagagcatagccatagcatatgtggaattgttgacaagcgttaagttttggattatggttgattttagccttcagtgtggagcttcctattcagttctaagtgggttggcctgctaacctacattttaaatacagcactgtcccttattgagactacaaatacacctcctttccctttcagtgtaatatttttatttcaggtttcaagattttaacttctaaatgctaaaaatattactgaatacttgaaaacaaatttcactgtgtaacccttttagctgtttcttctggattaagggtagtgtaggattcagttttcctagaatctttagaagactgtaaaattggtgataaattctcagttcagttcttatgaaaaagatatggattcatattataaatatatattagagaaaaaatagggagctaaacttggaacagattggatttcccaaagaggactctggggaaagctatctttatttgccactgtagcaaattaagagcacacagtgaactgttctaacactgaatgccatttgaagagtaaaacaaaagaactagccatggcttcctcatctgttgcctgaatggttggcttctttaaataattttcctggcctctctcctctcattgagtgatgtcactgatgccacagaaagatgagtaatagactcctgtggtcttaattggtgtgaaactttatgatttggcctgtttggaatatattatcatctgttgatgatatatcattcccattcatgcatttgctcagtgttacagtaagcttccttttattgtgaattttactgttcatcaagtcacagatttttctgtgaccctaataccaagcaatgacatgcttttaaactactagaataattttgaaatagttttagtagtttttttggttatttttttctattaaaaaattatatataatatatgattattgacaaaaaggcaaaaaatattatctaaatattaccccctcttttaatggtagacacttttaatattttggtgaatatcttttcaaactgttttctttgcaaatatgtacatgtaaataaatatatggcccaaacagaattagactttttttattccataaaatacatatatatacaggtggtgcatacctgtaatatacaggtggtacatacctgtaatctcagctacttgggaggctgaggcagggtaatcacatgaacccaggaggtggaggttgcagggagccgagattgcgctactgcactccagcctgggcaacagagctctccgtctcagagagagaraaaaaaaaagaaagttgtgccatgaacattttttttaggttatktgaggatattcgacatatatgacaaatgactaacagcacaagtgccaagtgagtagttgcagtgatgaactaatgctgttgaacttccgatgaaggcgagatcaaagcttttcctcacactagtatttggaagatcagctctctgttacccaaattgatttgaggctgtattcttcagctcacgcctggttggatcagagattatttgaattacagaagccaagtcaagcattttggccacttgttttagtagctgatctccattaatgtttaagatatgtttaatgttctctcactctagctcttttgcttcctgtttgaaacacagcagtgtactatgtccaaaatgctgtcatatgatatacaattactgctacacgtgttgtttattgaaattttagacattacagattcagtagcttgttctagctgacgctgggtgattgaaaagggagaaacagctagatatggttaaaggtgaagttgtaagcattatgaaccttgggcagatcaccacctcttcctgggcctcagtttctctgtaggatgaggaaatggaagtttgtaggccctctgcacaactggggacttagggccgttttcacttaggatgggaactcttctaccgattgttgcttatgttactcagcaacttgaattggaaatttaaaatcatttatgtgctctgctgaatataatgagcccatggatggcccaaaggttagaacaacaacagtgtagtagttaggcagcacacaggaattactctctgctctacaatgctctgtaatttaccagtgttgtctcaacactttcagaaaggcatagaattctatctttaaaaaacatttttttctaagaatttgaaatcatcttttgcagaaatgaatgcatcttgccttttcgtcagtgtgagatactggtattccctttagaatgggaatacgtattcctatacatatttaacagaagggttcaataaaaataggtcatttgaatatgtcagcattttaatgtgatgagatctggtgttagtatgtgtgcaaattgaatttatcttgatgtttattcatagcttttctttaatgaagaaatcagtatttcattagcctaaggaagcctcacaacagccatttgtggtgacttgccttgcgataggagatctaaccttccgtggagtacagcatcagagaatgaagagctggtaaagatgttgcagtgtagctgttttttaagttcatctttaagaagctactctgaaggaagagaagtagattgtaatagctagcagtttctaaatgacaggctgccttaggaaaaagtgacatgtgagaacaacagaagcttgttatttcagcagatgcttgactgagggtgctaggccagggaagatgctgccacagaatgtccgccctctgcttgttcctgctttcccctggtggccaccctctccccacccgatgcagagctccaaaggaggggctyttgctggcccctgggagaagccatctgatgagcagcaagcaattccagagattgtcactgtgaaatttttacttaacgcatgttacgcactttgtgactgtgtgtctcttctcattttgggatgacatgaaggtgatgttccacacgtcttacrtcttgctatttgctgacgtttgacttattgtcttgcctgcctcccctctgtctaattctctgtgccgcctctcaaagccttgctgcggctaaacgcagccccttgaacgtggttggccggggctcattccaggtcagagcccatcagaagcgcgctagagacaatgcaccaacggttggtctttagtgaaggggatgggtttggaatgccaagcaagtgtgggctgtactagtatgtttgagaatgaaggaggaatggaaactaagaaagagaagctactgttttgttttggaagattatactggaaggaaaacctgctgaaagtgggcttccactgctgctgtccttctgcaggaaatttagggcagaaagaaacatctctgtttttccttatgtctgtttctttgaaggtattaatgaatgatgagaattttcaaagcccatatgataagtagcaagtccttatgtattcagaaggaaactaatgtttcccgagtgccttttaagtgccaggrattctgctgggacttatattattccattttaataaaataattctgtgaggcaaatgattgaaaagaagaggtagatctggaatctgggccacactgagaaaggctggaatatttgagtcccacttcaagaagcctaggaacatggagttacatggtgatagaatcgtagaactaggtgccacctcacatgtctgttgcatcaccccagcagtagacggcggtgcagcagaaggcacacgggctggaatttcgatggccagactctaccactgggttcctctgggcggctgattctattttcttgtttacaaaatgggagtggcagttgtacttactgcgcaggtttgtagcgaggtttcaaaaaactgatccatggaggtgctttgtaaactgtaaagtgatgtactaatatttactgatggagactgtttgctttcatggatggacacccaagaaggcatttattcttagcattttggtcagcaaaagaattatcgagattgcgccactgcagtccagctgggcgacagagcgagactccatctcaaaaaaaaaaaaaaaagcattatatatttgcttttatatacatttggctgtaggtctcttggtttctatcacttcactgttcttttcctccattttcagaattgtttcctttctgtgacagatattcagtgataaccttctgtgtgccaggccctctattagatgttggagacagggaggtaaataacacagataagttcttgtcctttttgaaatgaaacactgaaactgtacaattgattactgtttgtttttcctatgggcataagtgacccaagcctaactgacttcttatgtttctgacatacatatattttaaacaagtgttaggctctttacatactgttaatgccaactgttcagatacgttggctgtaactactgaattgaagatactgtgagaaacatggattgtgtgggtctttccataaggtaaacctggttttgtggccccttcaagggcagcggtgggactgtggaattggcatctgtgtggtgctgtgcagctgattgttacttgagcgttaaactgttcgcctacacatgaagtgtgggcagttgaaggtgtttgaaaatcactgtgtggtatttttgtcattagacccacccagttatttcccattatgttgaagaaaattttggttacatagttgagctttgttcaaaaggtgaatatcagctctgattggccaaggtctcttttcatcttcagtgcctccccccacaacacccccctccggtttcaccagggtgacaagcagatgtggtccagccccaggccctggactgtggactaatcaatccctaacaggcactagcagccccaagcctgactaggttaaaagttccaccaagggccgggcgcagtggctcacatctgtaatcccagcactttgggaggccgaggcaggcggatcacgaggtcaggagatggagaccaccctggctaacatggtgaaatcccgtctctattaaaaataaaaaaaattagccggggtggtggggggcgcctgtagtcccagctactcgggaggctgaggcaggagaatggcgtgaacccaggaggtggatcttgcagtgagccgagatcgtgccactgcactccagcctgggggacagaacgagactctgtctcaggaaaaaaaaaaaagttccaccaagaaaacctgcggaacagtctttgcagtgtggtttattttggatctcaggttttaagataggcccctagtcgttccacttcttttctagtaggtgatcctttgtggcccttggaagtaatttcttggccacttttggtccctgttttggttgtctgagatgtggtcaagaggaatgataatagcactacagtcgttctcttctgattttcaaaatggcttatggcaacctttgatgttactcagactgctccagctagttttgattaattcattcaggctgtcagtgactcagcagcctcctggcttctttcttgtttttaaaaggagctggactttcacaatatatggaacatagttaacatattgcagctaataagtgtggcacataatgataggcatcggtgaaggggtctggaagaatgtcacacataggctgggggggggctcaggaggacatgacatctctgcttttgtgaatatgaggataggggactttttttgggtgaaagaaggaatggcaggaaaggcaaggtgtcagaagcacaggcagcagccaagggtctttggggtaatgtatgtggaggggcgggggtgataaggccacattgggcagcctgtgagtgctaagctgtaggccctgcagagccgtggcagtggtggagtgggagagtgacctaaggcttcccgaagatgtgtctggcagagtgtagggcgaattgcatgtgattggaaatgggtggaaggagactggcacagagctagagaggctgagctaagctggggaaacccaggctggatgagggccctgaagctgtcctttgggcaggggtgccaggcaggggacccaacagagcgccaagtataaagctggttggggtggggcttaaggatgggaggagtggacttaggaggtagagagtgctttgggtgtaggccaggtaagtttctggtctgcctgcattaggcacttggtagctgttagctatgccagtaaaaggatcttttacttttctggcaagactctgcaagaccggttctctcttaggtgattctcaggtggggatggggagggaagatgtgaaatttagggaaaataaaactacctttattacctacactatttccacctgattcatttaaaattatgtctaagattataatttgacacacatttttcaaaagagctctgagatatttttcataccacatcagatgcttctgggcactgaggagttttatcaagtaaaactttaccaggcctatgtgatgtgacatggctgttgcctgtgatgccacaggcttcccaaagccccctactgaggcccactaagttggtgggaaccaggctgcaagctttttgcctttggtggaatagcccctctcgggttcaagtccttcctccacatttctgtccactcagcagcattcctgagggaagagtgggcaggcagggctatggtgaaggcatgaactggaactggagggcttcttttgcagaccctttgtggtactggaaagaaattcctcaaggacctataggctcattagtgccatgctaaactgacccagctgactctgaatttcagtagtattgttccagaaaaaaattccagccaggcatggtgacttacatctgtaatcccagcactttgggaggctgagatgtgagggttcttggagsctaggagtttgataccagcctgggcaacatggcaagacactgtctctacagaaaattaaaaaaaaaaaattagttgggcatggtggcacgcatctgtgtcccagctacttgagaggctgaggcaggagaatcagttgagcccaggaagttgaggctgtagtgagctgtatttgcatcactgtactccagtctgggcagcagagcgagaccctgtttcaaaaaaaaaaaaaaaaaaaaaaattccagagatcttaaggatgaaaagtctaaggaaggccaggtatgatggctcatgcctgtaatcccaccactttgggaggccaaggcaggcagatcacttgatgtcagttcgagaccagcctggtcaacatggttgaaaccccgtctctacaaaaaatacaaaaattagctgggcgtggtggcacgtacctgtaatcccagctactcggggggctgaggcaggagaatcacttgaacccgggaggcagaggtcgcagtgagcccagatcgcaccactgcactccagcctgggtaatagagcgagaccctgtctcaataataataatagtaatgaagaaaaagaaaaagtccaaggaaaagagaagtattacatttaaaaatgtttacttactgatcgaggctttggtaactagttgtttctttagtaggaattttaaaactatcacttaaaatttttctattaagttgagaacttaataagtatgatgagactgtcaaattatttgtaatcagtaactccttatgcaaactcatgagcataatgataaaatttaaactttccatagaaaaaattaagaaacagttgtggtttaatgtattctacaaatacttagcctctgtgccaggctggatacctctgctggggctgaagaccaaatacccgattcttaaaatggataagaatgtttaataaattggttcttctataaattcatgtttatctgtcagaatctgagtggaaaaaaacttacggtgaagaacttaggtaattgataataattgggatgcaaaccattttttgaaatctcagtgtgtagaatctatcagaaagctgaaaaaaactaattttgtggaactatacagtggtaactgtttaataaagttctccttaaaagagtttttattataattttattttaattgattataacagacataaaacaattctgaaatcatataagtgattaaatattaaatgttgtggaatgaattaagtacttgagaattcagatacaggagcagcacaaagaatggttgggaaaatccttgctgtgggcggtgggacgtgaactgacgggcacgattcctggggaggtgggcaaaggagactgtccctaccaagagggtgacgtaagccaagaaagaggggctgtctgctctggccattgcttatgagttgtgtggagggccagtgaagggtggagaggcaagatggtgtagagctgataagagcacagcctcatgaccctgaacttccttccaggtccctcatcaatgtaatgtggatacattagtaccagctttgaggggtgactaggattggattggatgatgattgtaaagttcctggtgcaggcctggcacataggaagtgttgattaggccaggcgcagtggctcacgcctgtaatcccagcactttgggaggccaaggcaggtggatcacctgaggtcaggagtttgagaccagcctggccaacatggtgaaaccctgtctctactaaaaataccaaaaacaaacaaacaaacaaaaacaaaaaacaaaaaattagccaggtgtggtggcaggcgcctttaatcccagctactcaggaggccacggcaagagaaacacttgaacccgggaggcagaggttacagtgagccaagatcacaccattgcactccagcctgggcaacaagagggaaattctgtctcaaaaaaaaaagtgttgactagacagaaggtgatattgctgttggggaggatggggctgaaccctggagggcaggggtgctaggtactttttcctacattgacttgatagaaattaggaggccacaggccaggtgtggtggctcacgcctgtaatcccagcactttgggaggctgaggcgggcagatcacttgaggtcaggagttcgagaccagcatggccaacatggtaaaaccctgtctctactgaaaatacaaaaattagccgggcatgttggtgcatgcctgtaatcccagctgctgaggaggctgaggcacaagaattgcttgaacctggaaagtggaggttacagtgagctgaagtcatgccagtgcactgtagccttggcaacagagcgagactctatctcaaaaaaaaaaaaaaagaaaaaaattaggagacattttgattagagataagatgtggctggaattaatgaataatggtagctacccaaatacttctgtgtgctctgtgctttctgttatctgcagccttcaccattgccttgcaggggaggggtgggcctttgatctcctattagtgagaggaaacttgcactttgcccaaggccacttggctaccaagagggaaggcaggatttgaacttaggcttgcctggtctgggctctttctctcgctaccagactgcccctgcctgggaagccatctgccaggggctgatgaccccatggggaagaggaatagctggcttgggtggttactcctgctcctaaaaaggtatgtgagctcagagtgcatgttggcagacaccccatcccccgccccccagaagaggaggaaataggatggtcacttatcagtggaaattgagttagaactcagtgattaatggaaagaggacaggcgagtgggagacggtygtgcttggacatgaaggcaggcactgggtgacctggcctttctctatctggggtggggctccaaaaagctctggcccaagagtggagtccatagatttttcagaaatacaattttttttatgggcacataacctagcagtcacttctgacttcttggtaattcttacttggtaaaggtgacatgttgcctggctggacttctgctgttcccgtttggtcagtgccactggaaagggattggggagggaggagtgaccttaggtgagagagattctaagtgttccttggggtcagccaggtctacttttgtgtcttctagacagtgccactcacactagtgttgacagatcaactttaaaaaaattttagtctatgtggattgatacttttgtaaaataaaaagaattaataggaaaagaaactgaaaaagacatacagaatataaactctaactttttatcattacattcaacagatataaaatttgtccgttgccataaaagtttctaaactcttattctcaatgtctgtactacaggcagtgcatttgactgcagactaataaactagtcctggactggtacacttcaagagcagtgacctaagaagaaagtttgttaagcaaattagtagaataaacaggatatttttagaatatttacctgaattttttttttttttttgagacagagtctcgctctgtcacccatactggagtgcagtggcacgatctcggctcactgcaagctccgcctcccaggttcaagcgattctcctgtctcagcctcccgagtagctgggactacaggtgcccaccaccacgcccggctaatttttgtgttttagtagagatggggtttcatcatattggtcaggctggtctcaaactcctgacctcaggtgatccacccgcctcagcctcccaaagtgctgggattacaggcgtgagccaccgtgccttctggcccattttacctgatttaagagtaaaaataatctcttctcatttaaaatgcttccatcttttcagtaaagttccatattgggaggcagggatgtaaaaatataccaataactgaagccattatagttgtgaggggtccctaagtctaactctaaactggtggcagtacttggaaaaacaggtgcttttacttcctctgttgtttctgagaaacattacgtattttttaatttatattaggctattttctctgttaatttctggccagcctttaaattgatctgtgtatttcagcgcataattttaggtatattctttcaggggaaagttccctaagtggttgttgctgtcatttgtcttgctatgtcatctagcctgaagtgcagtggtgcaatcctagttaactgtcaccttgaattcctgggctcaagcagtcttcccacctcagcctcctgaataactgggactacaggcatgcaccaccacacctagctgattttttatttttcttaagcaaactaaaaaaaaaaaaagtctcaagagttgaatatgctgatacagtaattatgtataacttaattgttcgtatttcaaattggatttttgttctctagctgccagttatatcttattttatatttgtaggttttttttttgtttttttttttgtggctgtcttcctcgttctgagatgaatggcatgtggtgttctctcaggccaggattctctttccctgccatccgagccgctcagaagctgccttcctcagacagcctgtccgtggccatcgtcccaggccccgctgctcactcgcagcactcggctgagctgccttcagcctgccttgctgyacagcggccgctcccctccactggccgcttttctcctcgctccagtcaggactcccttttgttttgtatcatgctttgtattacacttttcaaggctctttcatgtatatattctcttatttcatcctccagacaatcccatgaggttggtagaacagagattctcatctccgttttaactgaggtgaggctgggagagtgtccgcatggcatgcaccctcattcctttgccctggggctcccagaactacttgttaccgctcaggtccagacttctacatgtgcaaggttttgagtttgctcaaagacgcctgtaattttgaggtcctcttttctactcattayttatatttgttattggaaagtccaacattagaatacttggttcgatgtcacaggcctctttggaagaaagaaatcttcagaacctgagggggcggtcagtagagaactagagccgggagccccagagggccacacagcgtgaactgggtgtcttgagggacaagttctgcttcagggttagttgtctccactggagattttcagacaagagtgggagggggtgggtttcccttatttcaccaataaaagcccagcatattgggatgccacaggacatttctcatgaagaaaagaatccttcttgaaagtggggagggcacattgaaaaatcacttttcacccaagtgagaaatcatttgcttttgactctctctccccatccccttaatggtcaaacagacctgggttccaaatccagccctgccacttacttaggtaggtatggtgacgttggtcaagttatttaacttcsctaaacttgttttctcatctgtaaaatgggtaaaatattgtccactttggagcattattgttaggattaaggacaatgcatgtaaagtcctttgattatggcctcgataagtaatgttccccgaaacctaatccagaagagggattttgacccaggaagggagccacctgtatagagtgggctccagcagtggttcttagacttgagcgggcatcagaatcacctggaagcctctttacgacttgctggccctactcccatagtttctgattcatttagtctggggtgaggtttgagatttttgcatttctaagttcccacatgctgctgctgctgcttctggtttggggattacactttgagaaccactgggctgcaggtaactggccagtgggcatgtaggtgctgtagatacatttgaaagccgagctttttatgtggttactctgttagacactgcttgaaatgcattttgaaaatactgaatttaatatctcaaggatatttcctgctgaagtccaggagtctttgttacatatatttgaaggagaataagttgtgaaagtaacagttgtaaacatattatagatagtctaataatatctaattggstaaggtatgtgaaagtgcttttataaaatgttagatgatgttaagtcacaactgaaaaaacattttaaatcactttgtttttaagatgaaacatcataatggagtataaagtagcataacttagatttctcatctcaatgtgctgtttactgtatgtatttttctctttctcctccaggctgctgacttgagtaaaccaatagataaaaggatatacaaaggaacacagcctacttgtcatgacttcaaccacctaacagccacagcagaaagtgtctctctcctagtgggcttttccgcaggccaagtccagcttatagacccaatcaaaaaagaaactagcaaactttttaatgaggaagtaagtagcaccctgtcttagctgttaagaatccctttaagagttgatacattcttaccgagggtagtcggccttattttgcacttcaagctaagcccattttttattcgcccagccctcctacctagtatgcccaagtttaaatgtggtggattaatttgttgaccttacctgttcttccttggggtgactgttttgtgcatttttatggagcatgctcaggtgtctataacaggtgttttaaaactcttctataatggagatagggacagtactgtaactcggtatttataatttaagtaagaaaatgtggaattccaaagttggttcacatcaccagaacatttcatgcagatcaaagaacttgatgacatttccttaggctgcttaaattgtagccaaagcttttgtatgtatgttkgacagtcatttggctaaggagtacttcacttgctcttgaaaatagttactgtaaactcatctttgacatagttggaaatcctggcgcttaaagtttggtcacatgacatagcttttgccagtgttgtagtatgtactggggtttctagtatcttcaatttcattctggaaagagcctgagatatctgagctgtctgttcaggaacatgtcaggactgttaaatgtggcatatagaaattgccaagtagattatattttttaaagctgttggagcatctttcagcctcaagtattgctatttcatatttaatattcttcctcgtctgtttcagtatgacttttctaccaagtggaaaagataaggtaggcttgctgagttagaagccctgggttccaatctctacttgggaccttgcccctgaggcgcaagggtcaggctatgtgggaccccctcccttttgcattgttgcatggttttaacatcattaacttggaacaaaaacacattatagagtatggtttttaagaaataattttgtttggggaagaaaattcaaattgacaaatggcagttaaaatttggattcttttgcagttatggtacttgctattcatgcaaatcagtatccacccagggtgctcctgtttgacattgccagtggatttgataagatcttatgaaccatgccatctcttctagtttcctctgagttgactggaaacaaaacttgccatctggactgacagattgtagaggaaaagtatttaatcccattttccattaaaaaaaagttaagcagaaaatattttatttacctagatgtttttttagtatcatctgcagaagtgatttctaagtagctggatgattatttttttggtgctgagtttggggagcagcgcacaaaattggcctcctctgcactgttagcagaaattgtgaatttggaatcattgtgggtttttattgtttaggtaggggagagtgtgattggagggggcagggattggagccatgtaagggctgttagtaaacaagacccggaggcagccctggccgaggatggtacagaatgccgcttagagaacaagaaagttttgtgtgtcgtggcagggggagggcagggagttggagaccacacgtccccagaatctcagggctctgggagcactcaggctgcattggccagaactatccctgccctggtgactgggagttgcaggctggaaggcagctcctcattcttcatgatttaagcatgagttatctcatactcactttacattttatttgagaaattgctatttagaatgctaagactgtgtgtggtttaatgccagctttgcatttacagcttgaggctgaaatygattgcccttcatagtaaggagatcctctggccatgtggatacatttttatcagattttggtcagaatgtctaagagcaagggtcaccggaggtttgttccttagagagtgccaggaatggtggtgaagtagtcatcgtgtcgtgctttgctgtggtgtgacatttacaggtttcaaggcacttttacctatggcctctacagggagggtggggagttgttcccattttacagatgaggaaatagtcaaagagcacataagtgaattgtccagatcaggtagcaagttgatgatagagttggaaccagaaattaattccagaaactcattggttacaggacccaccatgcatggttgccagatgagctcttgcccttccgggagctcacagtttagtaagaatggacagagagtactgggcacgtgtcagcacagcgatatgaacaaaataccaagggctagctgccgcaggaattctttagtatgcattttaaagttttttaaaatgttaagttcactgggggagttccaagaaatgcttttagaaagtgatgtttgatgtgggtcttaaagggtacatagtcattagaggagggtaaggaaggccttcaaagctggaggaacaactaggcatgtgaaagaacatccagtaacagcttggccacatcacagtgtgggacttggagtgtcagagttcgaagctggaaagataaattggaaccagcttgtcttataaaagccttttcatgtcacgtgaagcaatttggaactgacactggaagatgtgggggaacctttggccttttaatgaagggagtgacaggatcaaatgtgtttttttagaactcttgtcagcacttgtggaaggtggattggaatgaagaaagacagaatgaaggtagcaagaccagtgaggaggctctagtaactgtccaggtgagagctgagggcttgaactagagttgcggccattgtttcattcattcaggaccttgactacctaccacatgcccagcactgggtctgcagcagtgggcaaaacctgccctcctgtgacccctctcagkagggaagagaggtataatagcaccacccccgaaacactggtgaccacagatggtgacactttgtgatgtaagaggcaagagagcaggcccaagaaagggagagaatcacagaggtctactttatttatttatttatttatttatttatttatttatttatttatgagacagagtcttactctgtcacccaggctggagtgcagtggcgcaatcttggctcactgcaaccttcacctcccaggttcaagctattcttgtgcctcacccacccaagtacctgggattataggccacctgactaatttttgtatttttagtagagacgggatttcaccatgttggccaggctagtctggaactcctggcttcaagtgatccacccacctcagcttcccaaagtgctggaattacaggcgtgagccaccacgcctggccaacacagaggtctactttaaactgggaggcagaggacatctctcggacgaagtgctatgttttaagctgtgcctcatgtgagaagaaggccaaccaggtaaggaactggagatggagctttcctgcaaaaggaatagcacatgagggcccttgagcccaaggaaactgaaagaaggacggtttacctggggaaggtggcatgaagtaagggcatgagattggagggccacatcacctacggcctgatccagatttgtttcttagcctgaagtacgggattccttagaagggagcaggtgcacaaggcaggcagattggtgtttttgaaaggtaccctggctgctttttggagactgaattggaaaggtgtattaataaatcaggtttctgggtgtctcttgctgtgttgggtgagactgggaaaggagcagttgtcagggaatggaggggaagatcagaggttctggtctgtacttgctaagttcgagagacctgtagatagtgggatgtatggatctggagcacaaaactaggggttacaatttggcagttgtcagcatagaaataataatcacatccttgagattagatgaaaggttctttggagagatgatggtgagaacaaagaaggcctgggtctgaggcctgattatactccaagattctggccatctcagctactgctttcaaaggggcacttaacacacagttaattaccacgacatttacaacttcacagcccagaatgctgagggctcggacaccagctctgccactttctgcttgcaggatgatgtgggtcttacctctcctcggttggaaaatgggtgggaacagcacccacctgagaggtttgtgatgaggctcagatgagtgagttcaggcagggtgtttgtgaagggcctgaagagcgagccttggtggatgctcagcaacgtggaggttgagagaaactcaggcttcctttcctgggaggggtggtgttggacggaaagggttccgtgggaggtgagataccaaccgttttgaaatacaaataattaattttttaggacaagcaggtaggagcatggcaacccaggcagagagtcaacatgtgtgaggctgagggttggcccgctggtcacaattacagcaatgtggcctttcagtgttcctcaccagaacacctctcagacccacctgttaccacacgtgcacacaccttcacacaccgaatccccagcatcagttactctggcctttgcctcctttctggtgcctggtacatgaaaatgtaataaatgttgggatggaaagatgagtgaaatggaattataaatttcagaaatccacctgagataaacatagatgaaaaattcccatctgggaacaagtatattttaaaagatgattttccccctgtcaattaaaaattgtgtgcatttaaaatgcttgttgatagaaaaattggaaaatagagaggtacaaagaaggtaggaaagcatcacctctaaaccgtgacgctcactgttgactttcacagtctgtgattgttttcaatgaggggacaccatagggctcacaccttccattgggggtgaaggcaaacttcaccaaacttcatctccaagtctggccctgatcaggtcagcccagtgagcatgggcaggccctgccctcttcccgctccctgggactgtccycagtcacactggaggtccttgctggtgcatctgttcaagacccaaagaaagtcgaatgcccagtcctttctagcccctctcaggaaatcatccccagctccctggagtctctgctttccccaatcttccagagtagattttgggtttctrtttgtagcgttctgtacatatgatgcccttgaaaatgtctaatgggccattattgaaagtatcttggcgcacggttcatctgacaagctcccagatcgtggagcgtgtcctcatcatcagagctgcccacagaggagagtcacccggtcacattcagctcactgtggtgaagcaccccacaggggcgaggagtttactttttaaatttttttttktgtgtgtgtgtgtgtgtgtgtgtgtgtgtgtgtgtgtgtgtttcactctgccctgttctgaagtttgctttttataactaatggttatatatttggggaggaagagttacaaagggacagttcctatatggtaatgaatgcaaccttgttgtctgtgtaaaaatcctgattttggagtatattcacagaatagtaactttgaaggattttcaagtatgtgttaattgttggctgaaatataaaatgttaaagaacttggcatttggcttctttcgttactgacacgataccctctgctgttgcccttctcctctcgcaggctgtgaggctgaggcagacacactgggtaggtcccacgtctccttgtggcatttagatccagtcttactgaagggcatgctgaagaggagatggccctgactcctggggtatggagggacactgctgccagcccagrctgcgtggcacatcctgccagctgcaggtgcctcccaggcatggggtaaagcttagcagtgttctgtctattctgatacaaaggaatggtctgcacattttgttagttttgtttctgttgattttctaatcgaaggaaggaaatgagcccgtaatgatctactccttaaagcttgaacacagataaaacgacatccgatcccatcttaatgtggctttgaaataccctttcctaatacttcctgagccctcttcagatgcctttacatcatcagagcctttagttgccatttttgcttgtggttgcattatggcttttcaagcagctgctgtggtttttgaattgtttcagtatttttgttataaattaatatctgcattttgaaatgcagatccactcacccccaaactaatttttgatttttgcttatcatattgatagtaatgaaaaaaaagaaaaagaaaatgaagtgccttagaaagcgtcagtgtgaattgctttcacaaaatgacactttgatgtggttatagacttatttttattcttgtttcattttaactagtgtattttgaaaatcttgtctgttgatggcatttgggatggtagtgttttcgctgttcgtgggatttttctttgtattcatatcttaagtggcacggtctgtttggcctgcagagctggaactatggggagggccgcgctgagcgttgagtggagacatggagcctgcatccccacagagcactggcccagagcaggtgtcttgacgtacatagaaatgtgtctgtatttcgttttgcttttaaggtttatttgcgttttgggttttttgtgtttttatgaacgtgtttgttaagaatgggccttggagcattttggagttggacactgatggagagccctgtggccaggccagctgctctgccagcacctctgttacttcccctgccttccctccgcctcctcgctgagcacctgccctgcccatctctcagtgtacccctgccctggaggggctgcgactgggactggggctctcctccactgcttcccaccagagccttcctgcctctgcctgtctctgttccccagcacctcccttctggcccagggagcaggtctcttccctgtccctctctcctggagctcaccttcctccaccaggcacctgccctgcaccctcctcccctacggtgtccctttgctctcagcaccttctctgcccccaccctgcttccctgtgctctctcctaaggaccaccccctccctgtgcactccatccctctagggctcagcttcctcaagtctcagaggcctgtcctctgaggctctggcctcctgtggcagctccttcctcttctgcctgctctcctcatggcacttytgggttgtttgcttggatattccttctgctttccttgtttttgtcctgtgccctgtatggaggttttttttttttttttttttttttgagacggagtctcgctctgtcgcccaggctggagtgcagtggtgcgatctcggctcactgcaaacctctgcctcccgagttcacaccattctcctgcctcaccacctgagtagctgggactacaggcacccgccaccatgcccagctaatttttttgtatttttagtagagacagggtttcaccatattggccaggatggtctcgatctcctgacctcgtgatccgcccgccttggcctcccaaagtactgggattacaggtgtgagccacygcgccgggcctgtacggaggtttttttcagagtttcacacactcttcctccgctgcacctgcttccttggagatatttatttatttatttcagagacagggtctcactgtgtcacccaggctggagtacagtggtgtaatcataactcactgcagccttgacctgggctcaagtgatcctccttggagatcttaggatgttactattcgcagccaatttctgtgacattcgtggttatatttattagctgcagacctttctagctgcatactgggcaaaacccaggggtctttacacacccccgctttccatcttgccctccacccagccacattctgccacgctgcccatggtcaagtttaagacctatttgtccatggcatggacagttgtcatagcctcctaactggttcctcatcacccccaccccaccttgcattctgcacctactgctgggggatttcatgttattctgccacttccctttctagaaactgtctgtgcctccactgtctgcagcagcatccccagtagaaatacagtgccagccacgtgtgcaagtttaaattttctaattaccacattaaaatagtaaaaaccaggtgaaattaattttaagaaaatactgtattttatatatatatctccaaaatattatttcagcatataaccagtgtaaaaactataaatgagatcattgacattttttttcataccacatttttagaaccctgtgtgtgtttacactgacagcacattccacttgagaccagtgctgcgggactggggagtgcaagcgtcagggtcccagccgaagccctttagcttgggacttcacagccacagcctgagtcccagctcacaactccagaccaaattcccctcccagctcatgtgctgcgatcaagacagatgccacacatggcctggatccccacccccctggcctgctgtgttggctgggcttttccttggagcatggcccctggtgcttctgccactcctrcctccctgcccacccccgaaaccccatccctcagagggaccgggtatttttcaacatcctcatccagatcaaggccccattgacattggagagaattcaagcccaacagggaattccattacttatcattgagcactgactaagatttttttttttaactagactttttctgaaacaaaaatataccttatagtgcagaaactggactgcataatttttattcttgtatttatttaattaaatgttctaggtatttctttcttaatttgaaagacaggagaaaaatgtgttctgttctcttcctcttttgtcaaacccaatccaaataagccagagtcatgtaagttaaatgactgtgcttcccacactggcctggggtctgagacaggctggtgccctgttccttagaacgcttgggagtggccctgcaggctggtcgtcggagccaggtgatgtgtgtctgtggaacgggagacagcatgctcgctttggggtctgatgggcccgtctgttcccctggcactggttcggctgtgtctctccgcctcggagtccttgaagttgttctctgtgggggtacacttccccaaacatcctcttagcctgatatttgctgtctttctgtccttctgtcttgctcagctgtccagcaccagcagaggaagaggcctttcttggccatcctattcaacattgaaatcactagagtccccttctccccagcacgttctcttctctccctggtttatttttctccacagcacttatcatcatcagatcacataaatttcactgtcttctcatcccacttgaacctaaatttcatgagggaaagatgcctgttttaatttatattgtatcagtgcctggcatatggtacgcactcaatactggatggatggatgggacttcaggcaagtttcttgacctctctaagcttcttttctcactgataatatggcgacaatccctgccttcctgtagggagacaggcatgactgcattttccattttccatgcgaggcaatttggtaacatctgtaaaaatcataaatgtatatatcttttggctcagttactccactgggagtttatcctgtaggtacattactcacacatgtgaaaagtgcgtgtgtgcaagggcattcattgctacatagatgtccatcagtggggcacttccacaataaaccacagtttatccaaacagttgaatactctgcagctttagaaaagaatgaggatgctgtctttgtgcccatacagactgatgtacaaatacacttggaggctgggcatggtggctcacgcctttaatcccagcacttygagaggccaaggcaggaggattgctttgctcctgaagccaggagtttgagaccagcctggacaacatagcgacaccctgtatttacaaaaaatataaatttttaatcagctgggtgtggcgacactcacctgaagcaccagctatactcaggaggctgaggtgggaggattgcttcrgcctgggaggtcaaggctgcagtgagccgtgattgcaccactgcactccaacctgagtgatggagcgagaccctgtctcaaaaaaaaaaaaaagatatggaatgagaaagcagaggtgagacagtgcatagtatgctccctttggtatgaaaaagaagagtggataaatgcgtattcatatttgccttgtacatgcacaaagacactctggagagagaaatgagaaactagtacagtgactcaggacagaggatccggaatggagtagaagaatgtaaggctttctactgtatacttttatgtgaattaataatgtattacccattcacacaaaaagcgtatcttgaaaggtaattttgaggcttagagagcatgggtgtaagcctctaccagtggccagcacccacagtagacactctgattggaagtgagggccagcacgctgctgttgctgcccacagacactgctgcctgyctgccactcaccctgatattgctgagacacagggcgcccccagagaagcacgtgttttccctgctgtcaagcacatgattgacagagaaaaacaatgggtaaggcaagtgagaaacccttaccacaatacaggtggatccaaggtcggttttttttttttttggtctgcggttgcttaaactggtgtgctcagtccaccattgccagtgtgtcacagtaacatttaattaggcccccacagggggattgaagtagattggcacaggatgttatctgtaagttacatccatgtgtctacttagggtcgtctcagtgcactgtttttttttgttgttgtttcttttgagatggagtctgactttgtcgcccaggctggaatgcaatgacgtgatcttggctcactgcacacagccaccgcctcctgggttcaagtgattctcctgcctcagcctccagagcagctgggattacaggttcgcactaccatgcccagctaatttttgtatttttagtagagacagggtttcaccatgttggccaggctggtctcgaactcctgacctaaagtgatccaccctcctcggcctcccaaagtgctgggattacaggcgtgagccgccgcgcctggccacagtgcagcttcttaatacgggagtgaaggtttttaatgtgttttgtcattgcagtaacatttatttttaatggtgctataaatgctgttcatacctcactattgcaaagcaatactgtttttacttgatcatactagtttttgagttctcatgcagttttttgttgtgttttttaaggcccaaaataaaatttactcctaaccgtgctgctagaagtttttatgtcctgaaatttctccacacatggtaaatagagtaacaatgaagtgatcctagaaaaactgggatttgatttggttctggtgaaatgtaaggtgcaggaattgggagccactgtaccaaaatcaggacagcagtctggcttcccaggcctgagttagctggtgtaggcctgcctgacaaggccagtgatggagcgagctgcagacacccttaggccctgggcgatcaggtacagttgtgtttgtgggatcaagagtgctggggtagtctgggcccagtgggcacagcaaggtctggcagagctgtgatgggggagtggaggcctcttaatccaccgttcaccatcccatcatccttgcacctccctccaccatcaaaaaaaagccctgctctggccatgtaaattatctctgtaaccccttgctgagaaaattgcacgaaggtctaatggaaatcctgccagagcagcgctgggttttaggttgttggcattagtgcaggtcaggtgctgtttataggtaggtcaccaggcaggaggataaagaggaggtgggggatgaaaatactggctgtgtccccaaggctggcttgccacgtgcctattaatttaagaggaccagccatgccgttttacggcagtaagcagtgacacctgctgctgagtaactgcccaatgcatggtccccagccctgggcccgcatgctgtgtggcgttcaggcctccgttcttcctgcctggggtcctttgttagcagcctactttctagggtctaatgttcatgcagtgagcttgcatggctcattaatttctttcccagccgttcttttaaaaatcaagtcgtcttatttctgtaattctctgtaaagatgtagcacacatggcgggcacatggcctcaaagccaccctggcagaagtcggcatgtttcttggcagattctgcccctgtgtgcccagtacccctctgagacttgagtcagggactccccacctgttaggtgaagcggtggtgttcaacttacctggggctgctgggctcctaaagggacactgttactggggcgatggtgcagtggagagcacttggcagtaggagcttctaggtagaacttgggagtcttgggacttctggatgtgttctggtgaygcgattttgcgctcagacggtccagaaagggaccgcccctgtggaaggtgttgcgctggcatccccatcacaggattgattggcaagcagggaaagagacttgtgcctttggtggggcaggtatttttgcccttcgttatttgggttttaaaggcaagactactgacatacgcctgttaaagaaacatctcggtcaggggtccaaagttagcatatggagcagagtgatggtaatgagacacacactcccgaatgaatcgtcagtgtatctctctcaacaccagcagagagggtttcgaggagatgcttatggagatgcacgtggggcggtgcatgggagtgaggcggcctcagtgggcccaggctctgttttggagttgtgtgtgctgccagccatggactgtggatttcactccccaccttcgagccgccagagcagaggggcagatggaaccagcccattacctacagtgacagtaaaggcagaggaacccgtgagggtgaggcagagccctcctggctgtgaggactcacaggcttcacctgcaggtcctcgtagaggggataccacatgcagatgcagtgacccccagattcagatgcacctactgtcaaggaagaaagatcccagcagggctgttccctccgcagtgaaccctgtgcctggcatcgtgtctggcacttagtggcccctctgcaaatatctgttggctgcctgactccctccgtgaaagccagcagcctaacaccgattttagaaagtaattctaaattaccccaraagggccaaaacgctccttgctggcttggctgactgcaggataaaatgtggagggcctggatagacttgccccttcccatcgagaagcacacaagttttcttgctggaaaagtagacctttgagacttctccgttgtgctaacttgttctcctttgtcttcacagagactaatagacaagtcacgagttacctgtgtcaaatgggttcccggttcggaaagccttttcctagtagcccactcgagtgggaacatgtacttatataatgtggagcacacttgtggcaccacagccccccactaccagcttctgaagcagggagagagctttgccgtgcacacttgcaagagcaaatccacgaggaaccctctccttaagtggacggtgggcgagggggccctcaacgagtttgctttctccccagatggcaagttcttagcgtgcgtgagccaggacgggtttctgcgggtgttcaactttgactcagtggagctgcacggtacgatgaaaagctactttgggggcttgctgtstgtgtgctggagcccggatggcaagtacatcgtgacaggtggsgaggacgacttggtgacagtctggtcctttgtagactgccgagtaatagccagaggccacgggcacaagtcctgggtcagtgttgtagcgtttgacccttataccactagtgtagaagaaggtgaccctatggagtttagtggcagcgatgaggacttccaagaccttcttcattttggcagagatcgagcaaatagtacacagtccaggctctccaaacggaactctacagacagccgccccgtaagtgtcacgtatcggtttggttccgtgggccaggacacacagctctgtttatgggaccttacagaagatatccttttccctcaccaacccctctcaagagcaaggacacacacaaatgtcatgaatgccacgagtcctcctgctggaagcaatgggaacagtgttacaacacccgggaactctgtgccgcctcctctgccacggtccaacagccttccacattcagcagtctcaaatgctkgcagcaaaagcagtgtcatggacggggccattgcttctggggtcagcaaatttgcaacactttcactacatgaccggaaggagaggcaccacgagaaagatcacaagcgaaatcatagcatgggacacatttctagcaagagcagtgacaaactgaatctagttaccaaaaccaaaacggaccctgctaaaactctgggaacgcccctgtgtcctcgaatggaagatgttcccttgttagagccgctgatatgtaaaaagatagcacatgagagactgactgtactaatatttcttgaagactgtatagtcactgcttgtcaggagggatttatttgcacatggggaaggcctggtaaagtggtaagttttaatccttaatgctgcaccagatctagaacttgaataggtagtgacttttttctttttcgtgggaggggtggggtgtacaatgaatgtgaatgacacttcttattcttaatgtaaatctcaatgcatcagagccataattttggatactgcatgccatgtaattctgaatcatttgataatttaccttagagcatttaaaaaaatataatcaaactaattgccagccaagtcagtcatcctcctgggagtatatagagtcccaaggttagcgctcctgtattagactatttcaattttaggaaaatcatgaccatgtggggaaacaatgactttaaaatgctgaaattaaaatttatgctttaactggaatattttttgcttaactactcaattagaatattgtacacctgatcaatgtgtgttcagcacagatggccatgaattgtcatttatagtccaattttttatcttaatcataaaatgtttaggaatctatgaaatttaactttaggaacaaaacgtttagcagggttgattgatattatttttacattgttctggcaatccacagaaagagaagagccttaatttttaaaacmcattttagtcattttatgacaattaaagttgtttaataaacatcttttttcaaagaagcagtttgtagcactttgattgaggttctgtgtactaagatacccgtacctcactcagagcctgacagttcgtgggaactgcgggccgaggacgccaacagcattgcagaagtgcctcttgccacataagcgaagaccttttcttcagatgcactttgcttgtgtgttttcccaacaagggaaaaggagttttttggttttttgccgggggcggggaggtgcggtgggggagggggattgggtcagaaaggcacgtgactcctccgcgctttgtttcgtaaagcctgagactccccgagtcttccgacttctccctgacatggccctcgtttgggcttcgtcccccgcagaggaagcggaagtgcaggtttcccctctccttgttcttggatggcagctgtggttccgggattactcttgggatgctgacgctggccatgtgcgtaggcttcgtcctcagtggctcccaccctagcgcctcagcccaggacctggtggcctgtggcttcctcggcagtgggaggctctgctgctcccccggagaccgcagtctttcaccctcactctctactgctgcaccaggagctgcttttcaaattctggttttcccagtgggtgagatggccccttgaactatgtattccatgtcaagatggtggttatcttacttgttaactcattttgggcatttaggttgtacacctttgtaattaaatatagagacaacgatcacttagaccagtttgcgtagtgaatatgattcagcaaagtgaagacctggtggcttttctttctctgcagtgtaaagaccctggtagctgaagcagcagctccctgtgctcttaacgcagccctcccaggaaagccgggccaggttcccaggcctgcttcccatctgcaaacatgtcacggtggcgccatccaccctgtgcccatcgtgggccttaacgcagtggtttctgttgagtgtgatggcatggccgcgtgctgccacctgggaaccacagcagccttcaggtgcatctctcctggctgtgcctttcacatccctgagcactgctcctaggagtattcgtgtcctctctacctgtggaatacgggcctttgttcctaaaggtgaactgatctaaggtagccatgacagccatccttgtggacagtttccgctttggaggccaaattgggtcatgtggagagattagtgatgaacgctccatgtgcaacttttgcacctacatagttgtaaacgttcagtttcaaatgcttctgaggcattgagtatgcagtttcaaaattcaggacttagtatttggcctaaatagagagtggccgatcccaagtaagtagcatttatggtgacatttctggcgaccttgcagttctgaaggtgttgccctggacagggaagccgtgggggtgtgtgcccgagtaaccaacgtgaccgactggggactctctgatttctcccccttctttaaaattctcagtcgcagtggctgggatgaaagagggattgcaggggtacactgacaggtgacttaggagtcatttgctgataggaaccaggggtgggagaggcaagaggaggaggttatgtttcctttgaaaacaactccgaagtgtgctgtctagtatggaggcctgtgtgtgtctttctccccccacctccagttttaaacactatgatattgtcagttttggatttgaggcttgataacaatctttttcttccagtttttgccaaggagtgtactgtccttaatgtctgtctggtaccttgtctggggccccttcgttgtgtctacgtgccctccccaaggcccctcttgctgggttcagggcccagtggagagcactgtgccagcctggggaggggctgcctttgactgcatgtcctgacccctggctcagcccaggctggcccaggccctgcagggcgacaccactctgtgtccactctgcccctctgactgctgcccctttctttgacagccggcagagcacttctgcaggcaggaggacaggatgcaaggtgttctccaagaccagaactaaaagtgcccaacagcttgagaagagggcactggagagaggggcagggaagcgcccttctcctcggctgtgcttctgagtaatggctcccgcagacctggggagggcctggggaggggtggccgcggtggttcctgatatcaggtgtgtaaggtgcaatgcgtgctgctaaccctaggagaaatttggggaaaatatttgtagttttctcgccaaactttgagcttcctcattgaaatttttcagtctttcagcctaaacgttattatgagcaagaatatcttttctaacctaatctgtggaataaaacacagcatttggcaagaagaggctgttaaatactcagtcagcatcactgttccagcgtgtaccaaaccacagagatgaaaggctcagacgaaagtcaggtgcacgctgcgtggctggagaatcccgctcccacccggcaagggggcgagctggtccctgggcggtgtcagacaccttctgaaggtgccaggccagggccaggggagcttcaactcgccctccttgggttggcctttttcaccagaattcaagaagccagatttgtgctgtgactgcgatggggcaggcttctaaacactactggtggccctggagcctttctytgaggcttttttcttattcagaaggagaattaaaaattcccccagcggcctggagaagggaacctttggaaaagcttgccttcttttaaaagcaaatgcatgtgcaggagtagacactttacaaataaccagtagccttggggtcgaaatttgcttaaatcatggtaaaggatctcatttctcttttgtgctgattgaaccttctagcagtttggaagtgttttcctgtgaacccttagctggggactgagggtaaatgccttaaaaatggaggcatggaaaatcagaaaggagctatcacaatcattcttttctcaaaggcgttcaggaattctgaggaagaaatgcagtgacaggatgggattttaggggcaaggacaccgtccgggcggggcccagggctctccactggctgacttcacccccagggcccagctggcacgtggccaggcagccatttctccccagttcctccacttcctggggttcattttaaataataaattgtaaagtatgaaatgagtgctgaagttgcctgcatacaaggtcctcatcacctctcgcctgggagggagacgttttctttctttgttgagcgagctcaaagtgtgaggcggagaaaacctaggggttgggggcggctggagaagggatccacggaaacccaagcgccacatcatgcgtgtctgactgcccacggaagaactagaagcagttcaccagtggattttctggggaacgattcatggaacacagcgtctggcgtccagctttgtgggtgagggcatggcgggggatccggtggccctgccctgcctccggtgccggtggatgggggagggactggcctctgactgcggggttgcaccatggcggcggtcggtgtgcccttggctgaggtttcgttccttagcagtgagaacctccacatgcgtgggtaggggtcgggtgacctggagacgcctcctccggtctggtctgggtgacaaaggtgaaggtttatagtctaccaccctggcagcagcctgcagggcccccccttgtctggagcacacccttcgccacgggctgattgggactgtcgggtgttgctttaagttaacaaggtgcacatcacagcgaccccaagtgatgtcccaaagggaggagacattagtctggccgaagtgaagtctgtggctttatatgtaaaagcactcgtatgcaactgttacctttgaaactcagatcctagttacgaactataagaacgtgcccctccagtagagggagactgtctcactgatgttgatttctttattcatttccgcatctgttacacgaacttcgtgtcataaattgctatcctttcatttgaaagtgtaaaaaatttcctgcatttttatcatttctgtatacttgagtttattagagattgttatgttaggcgacactgtataaaattgtatggatattttgagtgaaaatcaaaagtaaaattcacatgtatttccttttttatattttcatccaatttcttgacaacttgaataaatttcataaagagccttcctaacatgaaatattggtaaattaaattctttactgttgcaataattaatgaaactttagtatcagtattgttttataattttaaggaaatcatgtttgtttcactgctttgtttttttttttagctgttgccttgtcactgtcacagctaacaagacttactacatacttgatattctgaagtactgtggggctgtcctctgtatactgacattaaataaacgtgtgtgagtgaactgtaaatgtagataattttcagtagtcattttcacatctaagctttaaaaatcccagtgaaccaaaaccagaaaagtttttaaatgctgtaaaattaaggaccttgttaatgtttatagaacagccagccaccggaattgctccctcttactaaagctgactgtttctcatagttggcagcgtactcgatgaaatgttctgcrtctcagatactgttttatgtggtcctcctctgtgccaactccagtccgggagaaggactgttgattggcgtttcggctgagctgtgtagaggcttctgtttaatgagaatgcagacattctgaagtcgtcctgggccacgagctggcttttgttacatggactcactatcccggatgctggacatccgacattctgtccagccacccagccagcagctgggagagtggagaaggtagcggctggtaggctgcttgcttttttttattttgctgtaagttcygggatatatgtgctgaacgtgcaggtttgttacatagggatgcatgtgccacggtggtttgttgcgcccatcaacccgtcatctatgttttaagccccgcatgcattaggtatttttccttatgctctccctccccttgcccccaggtaggctgctttcagtaggagctcttttcctggctagagttcattgtctgcctactcctcatcttgaatagtgtttgcttaaggctttgtgctggcgtgaggttgtcctgctgtagacaccaggcccgtcgtcggtgcagagcgcttcctacacagggcagtgggggacgttccatttgggatgagaagaactcatgatttacattgtcttactatgaaataccatccctcactcttgacagacgacgtagctgatctgagcagcgccctggcacccgcaggcctacccccctgcctgaggtgtgatgagtgagggcgagctggcctcagacacagcccttcctcaggcccttgtgctcccatttaattgtcacttccctgctgtgtcatgagacatccaggtcccactcagccgcctctgcatgttggcagccggctgagccctgtgctctgcctccagcacgttcatcgggtggggaactcccagaagcttcccacggtgctgtctctggagtgcggggtcagcagagcctccagtgctgaactatctgcactttttgtcttgagtctgggctgtcaaagcggagggaacattcagacctacagctctcaaaagcggcctcctggggcctacgactgccacaagagtgcacagggctctgttcttagcactgaacagggcgttttggtttgtgttttttgagacagggtctcgctctgttgcccgaacatggctcactgaagccttgacctcctgggctcagtgatcctcccatctaggcctcttgagtaactgggaccataggcacacaccaccaaactcagctaatttttgtgtatttttatttctgtaggtacagggtcttgccatgttgcccaggctagcactgagtagattttaagccctaaagactattaagttgacagcaagttttgtttttttaagaaaaccatgacattttggtcttttaaaaatagctagtttgtaccttcaaaaaaataaaaatagctagttctcagctgggcatggtggctcatgcctgtaatcccagcactttgggaggccgaggcgggtggatcacctgagcccaggagtttgagaccagcccagccatcatggcaaacccccatctgtactaaaaatacaaaaattagcygggcgtggtggcgggcgcctgtagtcccagctactcggaaggctgaggcaccatgaaaatcacttgaacccaggaggtggaggttgcaatgagtcgagatggcgccactgcactccagcctgggcgacagagcgagactctgtcttaaagaaaaaaaatagccatttctccatgtgtggctgcctgtcagaattaatggattctgaacccaggggtctctggagacgaatggaccatctagaggctctcagctccctaccaccccttccagggtcagtggcctccaaaaccagcctccccttttaggtggggggcagcataagcaaaatcctctttgaagttactcaagctagaaaggctttatggagactaagtggggtcccttcttcctgccccacacagtagagaggattgcagggccaagtgggtcccaggagcgggagggcctccagtgacagcccgggccggtgctggtctccatcagtgaacgggatcacgatgaaggcccactgacttgcacacgttctctctgatgcttttcttccaccttcagatcgcagcggagcccttagatggtcgtgcccttcatctgcgtggtctttccccggaagtctgaagagtacaatccttttctctgggtggcttttctcattagatgccaggttgagtggcatctgggcaagtgtggcccctcactgtcacctgtcagtggacaggttaaagctggcagaggtacgtggtccactgcccagctataactgaggtcccaagccaaactgcacggcaagtctggggcagagatgggtcccgacgtccctgggctgggcccagggttcccggctctgtgrctcacgtgccgcttgtgtgatgtagagactggcttcgggtgccgtgaataaaccatggctgctttctccaggtttgctttggttcctttctgttgtggtctgtgtagtgagaatggtgggagtcttgcacgtgagcagttaaggagtgtgttcagagctggaagtcttggttctgagagcaggctagcctggtcatagttctcatcgtttccgcaccgtctctaaaaaggtgtcgctttgcaaataacatttaactcgtgttctccccagggtgagattctgccaggagcacctgccacagaggccagcattggagcctcaggggctacgtgcagggccaaggctggccttctccctctgggggaygccagtggaggtgacctccacagcacgccggccagctggcaccaagctccyggatgttgtggctgtgtagaaccagattctgtcttgtggtactttgtccacgatctcaggagagaagcgctagtctgcccgcccgcgtgcctgccatgaaacgggtcccagggcctgtgtgcgtcttacttttgtttgggttggaaagggtgaccttgggggttgaatgaccagagagggtattgaacagtcccaggtggatgagggatgagctggcgcccagcccacactctcatccacatcccacagctgtctccttgaggttctgtcttctctgacactcacaggccaggggtcgtgggggtcagaaggggaagccctcccagaacccagagctaggagaccgtccaggcctgacagagcttcaggacatgtcctttctctgacgtggcctgtggccctcacagtcctatctggctgtcagaatctccagtccgagcagcacctgcaggggcaggaacatggccttgctgctttattgtaaattgttttgaaccaaaatatttttcatatatattctggtgcaacaaggtgtaattctcttaacttagtattataaattagaatcaaacccaaaccaagagctggagtatttttttatcacttaattttgaactgaagtctctagcgggaataaaacagtgactctgcggggagccaagcagctgactaatattagagccaaggcttgccccgttcctctcacggtgtgggggctgatgggacgccgtgcagattctgcctggggagctcctttgcctgatggcaactggtaaagcctggaattgccagctgtcctgcttctggtgcacagcccagcagctcccgcacgctgctgagcacaggtgaagcgtgggcgggctccccttgccaggtcctccgtcggccgggccgggccttgccccttttctcccatgaaaaggaagcagaaggacagggtaaaaccccactccctccctgaagagcaggcggattggggcagcagggtccctgtcaccgggagtttgacacggatgaccatttgggcagtggatcccccacgctgtgctctcgagggaagctgcagccgggatccttccatgggggcctaggtgtctgtttctcgtcttcctcttctaccacctgataatctttagactgaatcacaggcagatagaaacaaggtgacttttttcatttgattctcttttgaatggcgctttttcctcctgttgcctccagtgttcaccacggcaaagtgagtccatctccagcaagtgacaggtgccaagatgaagggtccagtgactcgcacaagtcctcagcggcatgcagggcgccgaggccccttccctgccacccggagtgctgtgtcgcaccccctgcttctgggcatgcctggcactgatgccaacgcagggccacagcaggcccagcacactccagggcttgtgcctgcaggactgtctcctggggcttgctggggtcactgctggagaactggaggccgggccctttgggccttcgcttcgccttccggttaactcctcttagagaccaccgttttcccctttgctctgacgggcgggctccagggagtccctggtcaagcaccctggggtcctcttgggtttttcaccggtggccaacgtgcttcctgagtgctgcagcatggggaccctgagttttgatcatgggcacattctctgcatggcgatgcattctaaaagaactgttaaccagggctgccatcaaaagggcgaagcctgctaacgggaacccccagttccgttatgccagtatggactacagaagrcgagaggaggacaggtttgagggcggttgattcaagatctctctggaagctgggcccagtggagagtgggacagtggagggcatgaaggtggttctagttggctcctagctgccaccacaattggcatcaaggcgttagccagcagaaactggagaatgagtgtgcatttgttttgtgctaatgggagaataggaagcctgcagccctcgcgttgggtcgctttctaggggtgcggctttgtagggaccagctggcggaagcagcgtgtccctcaacatcaggctctggcagcctggtggctgcgccacctctgcgtctcagcagccgccctcccctgggagtgatggaaagcagccgagtcctctggggcctcacactcagtgagaggaagtctaaggaagggtgctgtccctcatggccgtcagaagccacctgcagccactaagtatgtaaattggggccagtccaacctgaaaagtgccataacgtgtcaaccacacagcacacctcaaaggcttcttaccaaaaaagtcattagtaatttttatattgctgaatattatatgaaacatcttcagttaaaatattaaaattggccaggtgcggtggctcacgcctgtaatcccagcactttgggaggccaaggcaggtggatcacgaggtcaggaggtcttcaagaccatcctaacagtgaaaccccatctctactaaaactacaaaaagttagctgggcgtggtggcaggcgcctgtagtccaaggtacttgggaggctgaggcaggagaatcacttgaacccaggaggtggagcttgcagtgagccaagatcgtgccactgcactccagcctggacaacaaagtgagactccgtctcaaaaaaaaaaaaaaaaagaaaatattaaaattaatgtcacttgtttttattatctatcttttcattttttgagacagggtcttgctctatcccccaggctggagtgcagtggatcgcggctcattgcaccctgcatctcctgggctcaagccatcctcctgccacacagcctcctgagtagctgggatgacagccgtgcgccaccacacccggctaattttgtattagtagagatggagtttcaccatgttggccaggctggtctcagactcctgggctcaagtaatctccccacctcagcctcccacagggctggctgtcacttgtttttaagttgttaaacgtgctcccgggaagctaaacttaacacaggactggtagagacaccaccttcctgtgggtggggctgcctcctacctggagcagcactcacctccacctggcactccgtgaaaggggagggagactctgtggctgccagatgagggtggcccctctccgtctgtccccaggctgggtcaccaccactttctccctctgccaggagtagatgacttttctgttgccggggggaagggaggtgcctcctggttctggagatttgtcacttcctggacaccacatagcttgtggaaagcactttcttagggtgcgcgtggtgatgaaggcagagtgtcctgtgtgagaggcttccttcctccagactgtctgcggcagaagtggggtcaggaacctgctgcccagctttcctccacaggcttgatgtgtttgagccagaagtatggggcgtttgcggggycctccacaagtacaaacagggttctgtcccttttcaggggtcccagaggaaaagcactcctatagactctgagcaggggcagctgccacattccgtttgcttcctgagcttgtctaggtgaacagatttcaggtggaaggtaagaaacgggatgaaatgacttgagcgggacagcttgcttccaggcttccggcagcagggcgtgggcgaggctgaagggcagtttccgattgtcaccttcatttgtgtccacacaagtccaatatgtgagaaggtagcaatgtcagcttgagttaaaggcttgtcatttgtaaacagtactcatcagctgaagccttcttccatgacagctaagttgtattcccagagctgaaaatgtgcacctttggggctgcactgtcgccatcttaatgttcttcataaatgaacgccacactttgatgtaatgtaattgctgctcaatagtaaatgcaaagaaatggaagtactctttgctgtgtaggaggttaaaccctcttaggtttacccaaggtcacaccagtattgtaaaatctgggtgagattccccgcccccgcccccgacagtgagcctctcagcaggagccgccctaaagagccagatgccccccaccattcttcctgctggccctggtgggttggcccccacatcccttctccacacccagctgcagcctcacggcaagactactttgttctggggctcccccgacctcggcctgggccctgctgtctctacctgtggggcctacacatgtggacagctacagccagggggtgccacggtcacaccacccaacaaagcaagaaccccccagcagagaatgccctttcaaaggtgccactgaactctatccttggagacaacccctggctccgagggactgggtgtgcggtccagaactgcggtgccctgggctcaaccctggctgaaggcgctgaacacctcccacgaggcacctgcacctttgggtcagcaaagctccaaagaacctgttctcaggtgctgagaaaccactgtctcccccaagggcaaggccagccctgcccgcccttctcttggacggtattgaggccacagtattgcacccagcagggttccaattctctaggaatggaacgcagtgatctggataggaattaaatagatgaagtggagggtttgctcccacactggcttccacatcaacagcaccagttttgaccacgtggagctgctggcggagggcgcgcatggtggctgttgcccgtccggtgttttgctggattaatgtagactgctttgtttgcagggctcattgtcatccccaagccaggccagttctccaggtggaactgtagtgtagcgacctcactgctgcgcgcacagtctcccgggacttggactcgagggagtgacgaggaggagctccgagctgcgcctgagccgtgccagccggcggacctcaggcggtggacgtcggcgatagccgtgtggacggtgaccggctcactctgcggcgccgtgctccygctgctcacccaaagaagttgtttccattttaaaccggtcttttggggctgcagtaaaaaataagaaatggagttttcttgctttttactctaaaattcaatgtaattaaatttcatatatatataatatatacatatatacatagtgtaaaataaaatgtttcttggacaagaaatcccctgaaattcagctgttatagtgcttcactgtttttgcactgatttttctataccttaggtggtcagaagacaaccttgaatgcactcatagagaaaactgttactttctgacgtaatgtaattcaggaagacagacgctgcaatcacagattttaaaaaattgtttgcacttaaaaatagttgaatgctggtggaaagttactttgcagatgggtgtaaggactcatggccctctgaggtgcggcgtgaagatgcccyttttacccgttgacgtttattttacgtaaaataaactgttgtttccaatgcaatcaactctgtattatatgtataaatattgtaattctgcaattggggaaaatagttacttcactagtaattttcatcatttaagagtgatatttctaattcacaaaagttaatattaaaactatcttgaatataccgcttgtttatcttctgttaaattggcttagtttgtcctgtacatttgggttgaactggttggtatggaattgttttgtctttttcaccccatgttacttgaagccccctcaccagtcacacttgagatgggctgttcaagaatatggctcaggagggcgtgggctctgtggtcgcctcacagcctcagctgtctgtggccactgtgggcagctgcacgtctgcacagggcttcaggatcacgtttccatacaactccgagtcctcctttcgtcattgaaagcctgtgaccacacataacacagtttctacagtgagtatgaacatgggacatgaactagctaatcacactgtttacctgagattttttttttttttttttttttgagatggagtctccctctgttgtccaggctggagtgcagtggcgcaatctcggctcactgcaagctccgcctcccgggttcacgccattctcccgcctcagcctcccgagtagctgggactacaggcgcccgccaccacgcccggctaatttttgtatttttagtagagatggggtttcaccatgttagccaggatggtctcgatctcctgacctcgtgatccgcctgccttggcctcccaaagtgctgggattacaggcgtgagccactgcgcccggccttacctgagatttttcttacttggttgaaaccagctcgtgagcatctgagtttagggcatcccacacctgctcagcgagttactggaatcccaacagaatgtgcagctaccaagcagaagaatgtttatttatttttttaaaaaatcatatacaactggatccttcgaaagctttattttgtgagactttaaaccatgaagtgtctgaaacctatttctctaattcatcacattaaattgggggcatgtctttactttcaggcttttgaggggaggtatgctacattttcaccatttgtatgaatgcagccacggaaaacttcacatcagctcagccctcggtttagttttcttcggaggagacattagttacagcttgagttctcagcctgccccactcgaaggcgccagcagggactctggatcacggggccatgaactatggagtgagtcttctagaaagagaaataataaaagacactaagacttgctgttctaaatgaaagaatcagaatggatgaattagacacatgcagagtgacctctgtattaaaataagatattagcatgttttaggtactttggtatttctgtcatcttaaagtgttgattgctaggtgctgtcagttatacaggaagccaaacccaggagggcccaaaacagctacagtgaactgcgggtgtatttggaaggcagaaggaactacttttgaaaataaatctagaattattttctgtttaagacagagtcttacctgtcatccaggctggaatgaagtggtgcgatcatagctcattgtagccccaacctcctgggttcaagtgatcctcccatctcagcctcccgagtagctggaatcacacgtgtgtgccaccatacctgggtaattttttgatattttgtagagatggggtctccttatgttgcctaggctggtctcaaactcctgggctcaagcgatcctcctgcctcagcctcccaagatgctaggattacaggtgtgagccaccgcacccggccaagtctagaattcttaatccagccatcttcctggtcatctccttattctgtctcctgtttgttggaagtggcaggtgaaagtttaataccaggacaataattgtgtaaagatttgagcagtttggtcagatgatccagccgtgtccaaaacttttgttggccccgagatggcatcactcgagatggttagtcctagctctgcctcagcccagtctgtcacccttcgctggttctggaatgcagtttgcatttggccatcactgtactaacgctgtcagatacgccccagtttactctagatgcatgtgtgtcaggaataagtctttatttttatggtgctgttcctaagactgctctgtagccaagtgggccaacatgacttccaaaatctaactgcctcgtaactgttcccaccactgtcaccatggactcaagcattcagcaggccctgggcagatggtagcgaggcagcgtcaaggctggtcatgccctcactcaggtgccctggaaagactagcttccctggtacgatttgggtttgctcttctcacttgttgccttgcactttcttacacttctggcgttggagaatgcacggggattaggcccagaagaagccaggaagaggtcggccgtgccaggggtgggtctagctggactctagctgccttgtggcaggctggctgcaccgcaggtgtggggacagcagagcagatgggaggtcacggtcgcactgctgccgcctgtcacacgaagacgtgcacgtctgagtgccagatggaaatggctgatggagatggctgcttactgcttctccctgcaaggcctgcccccgccagtgtggggtgtgactgggctcccctgtgcttctgcccggtgtcttctttaaggtcaggagggtgaggtgggtggatgagggtaggctcacacaagaagggtgacactgcggccgggcagcatgcaggtgctcagcagagggttgagggatgaacgtgtttgaatggggaggaggacggctgaggcctcatcctcgcttccgttctgggttctgtggggataattcaagcgcttcaattgcattgcacagaagaatggaaataatccggccagccagggttcacgagctttccagtttggggtggcagaggccccgccggggccccggcagcagggcaaggtggcctcctatgggctgagccagcctggcccctctgccctcagccctggcccccatcacagggcccagacggacacagggaaccacacgcagctgaagcggcctggggaccctgacgcctcctgccaagagcaggcaggtgcaagggccaagtgcagggcgggaagtccaagggtggctggcaggatttcccttttctccaaatctgtaggaaatcatcaccctcggaatctccacccttggacttgggaagctgatgtgggaaccctgctgtgcgccacaaaccccgccgctcctccatggagggggcctgtggagctgggctctggtcccctgctcacctccagcctggaggcccagctgccctgggccctggcgtgccgggctcgacactgcttcagagcgtttacgcccgagtctaactaaaccaggagggcctcaagtggtggaccttgggatggtcctcctcttgctttagggactgtttcttgcctccagagggcccccagccccgctgcccccaccacgaggagtgtgacagtcaggacagggcagctggtgtcctgggcaccggcatctgcagaccacatttgctttctcaaaaaagcctgcagaagaactgtaaagactttcccttcatattttatagacataaagagagtaacacgtttcccaagtacacactcaatccgttaacatgcctgaccctgaagccaggccgggggacagggcatggccctcctagccaccactcccctacccacaggtccctctcttgtgacctgcgcgccgccccccctacagccatctccccagccttctgtcccccagccctccctgctgctgggctctgcccacggccttgacgtccgactcccctgggactcccaggccctctgtagaggcagaacggcaccacccccctgctcagacacctcccctacagcaagggcagccctcaaggctgcaccagggtctcaaatgggtttaaaaggagcccggggaaaggcctgcactgcaccctgctctggaacattatggcaagcctcccttccggtctgaaaattacggcaagcctcacttccggtctgaacattacggcaagcctcacttccggactggaatctgcccttcttcttgggttcctttgcccccatgtggtgcagagtgggcacctgtgcccacggactcgctgccccacgctccccgcccttgcctcctcctccagcctgccctccctccgcgtggcccgcggtccatctcctgcggccccgctgtcgtgtcaggtggcctggggctggggccaggaccactggagagcacgtgaaggaagggtgtcacagatttgtctcaacaggggagcaaggaggcttaaacactactagcctgggaaatttagcctttttcaaaaatatctctttaagtttgggaagatgacaaaaaagaaagaagacccaattactaagttactttcccagataaacaagaggacttactaggacttttcttgtgcccagcagcccggccagtgccacggtttctttgcaatgttcccattcccatccccatggggaaacaggtttctctttctaggacacaaggtgcccaacttattgttggcactcagcaaacagctcaaagcacccactgacaggccaggggcagggctccatactccccagagacagctgagcaccaggagctaaaatgacaacgtggtcaccttgaagcctatgctcagaagagacccttcaggcctgccctgtgccccgcaccacctcgccaggctggtcactgaggagcacacagggctccgaggacacgcctgtgtgtgttcctttctgaatggttcttcaaatgaaaattaagccacaccaggccaggcgcggtggctcatgcctgtaatcccagcactttgggaggccgaggcgggaggatcacctgaagtcgggagttttgagaccagcctgaccaacatggagaaaccccgtctctactaaaaatacaaaaaaatcagccgggcgtggtggtgcatgcacgtaatcccagctacttagaggctgaggcgggagaatcccttgaacccgggaggtggaggttgcagtgagccaagattgcgccattgcactccaacctgggcaatgaacgaaactccgtctcaaaaaaaaaaaaaaaaaaaaattaagccacaccaaagtcttcccaacaaaatcaattcccctcgtgtgcccacaaaagctaaaataaaggaatggctggtaaggacacatgttggactcggaaaacattaaaatgcaatactgtaacgacagcttattctttaataaaagtcaggggtgtcagcagcgtcactggtaagacatgatggcgctccacgactgaccagcagcgctgggaagggacacgcagaacccaccttccaaccacgcccaacacatcacagaaatgcctgctcgtttgttttgattcatatacaaagttacaaagtatttcctgccccaaattcttaacgaaaatgaaagaaaaccctagaatgcggtggttttacaagtatattagcccagaacatcctaggcagctgcgcgggccgcgggtgcggcagggcgcagggcagcacccagagccccggccagcgcgaaacggacgcaggcgcatccccagccctccgtggcgtctcagcagcagatcacccaggcctggcccggtcgggcttggtgttgcctccgaagtcgagacgacggtgctgctcagttatcttccgcctttccgcactatggtgggcaggcgacactgctgcggggcaggcttaaggtccttctgcggatctgtctgtcaaagaaaaattacagacacaaaattcagtggcggcctgggctgggtcgaagagcagcgccgtcagagaagctggttccgcgctaccttcttgctcgcagggatgcacttcaagggtctcagcaccggcactcttccatttgttccagatccaagcacggactgcagcgtggggctggagtaagacgacagtctgaccactcccgaaagctttagtttgggcagttccatgacataggccggtcctcgtctcttgggacggtcctcctcttgctttagggactgtttcttgaaacagaacaga

SEQ ID NO: 8903 - DNA, 29959 bp, Homo sapiens
cagaacccagggagggagcgcagggctgcccttgctaggctccagcaggtattagaaactgtcacaattgtccggcaggtaacagcataatcacattttgaatcaaaagtgttgttcaagctgaaatcctagtattcaccctcaattcctctgtttccctcacccgtacaacaatctctcaactcagtccatcagccctatctccaagcctccctcaagcctggcgcctcctcaccaactctgtggccatgccacagtacaagctatcatatccctcgcctacactgctgccatggtcttccacacctgcccccagaagccaggctcattcagccatcaaaattagctctttgacttcactgaaatgaaaaacgcttgtgctccaaagggcaccatcaagaaagtaaaaatacatctaatccacaccaccgacaaaaataaaaaaaaaaaacccacaaaatggaagaaaatatctcctggttatatatctgataaagagattttacccagaatatataaagagctcttataactcaataataaaaagacaattttaaaagctgggtgcagtggcacgtggctatagtctcagctacttgggaggctggggtgggaagatcgcttgaacccaggaatttgagaccagcctgatcaacacagcaagacttcatctcaaaacaacaacaaaagacaattttacaatgggcaaagtctaagaaacatttctccaaagaagacacacaaatgcccagtaaggccaggcacggtggctcacatctgtaatcccagcactttgggaggccaacgcaggtggctcacctgaggttgggagttcaagaccagcctggccaacatggtgaaaccctgtctctaccaaaaacacaaaaattaggtgggcatagtggcgcacatctgtaatcccagctactcaggaggccgaaggaacaagaatcacctgaacccgagaggtggaggttgtagtgagccaagatcgcaccactgcactccagcctgggcaacagagcgagactttatttccaaaaaaaaaaaaaaaaaaaaaaaaaaaaaaggccaataagcacataaaaagatgttcagcaccattactcatcagggaaatgcaaatcgaaaccacaaggagataccacttcatacccactagggtatgaacaagtgttagcaaggatgtggaaaaaactgtatacattgctggtgaaaaataaaatggtgcagccaccagtgggcagttcttcaaaaggttacagagttaccatgtgacccagaagttctattcctaggtttatgcccaatagaaatgataacatatctacaaagaatttgtagataaatgttcataatatcaccactcataatagccaaaatgtcaaaacaacctaactgtccatcaactgatgaatggacaaacaaaatgtgatctatccacacaatggaagcctgttcagcaataaaaaggaatgaagtactgattcatgctacaacacggaggaatcctgagaatattatgctaagtgaaagcaaccaggcacaaaacaccatatattatatgattccatgtatacaaaatgtctagaataggcaagctgtaggcagagtaggtcagtggttgcccagggctgggagaagaaggggttagggtgtattgctgaagggtacggagtttccttttagggtgatgagaaagttctaaaattgacgtagtgacggttgcatagctgtgaatacagtaaaaaccattgaattgtatataaatgggtgaactgtgtggcatgtaaattatatctcaataaagctgttaccccccaaaaaacaaaggaaaatatcagctccttcaaagagaaatcagaccatactacccattctactcaaaactcctcactggttgcccagtgctctaagaataaaaaccaaatgccccgtgtggtctaagccctttgcagctcccctgtcacctctctacccgtctccacttgtcctccaagttctagctccactgacccactctgtcccactcaggtgtcataattatttcctctatgcagaataaatgatctcactccatttatctggcttcttctcaactgtggggtctcagcttaaatatcaccaccacagaaaggccttctctgaccagatcactcaagagtacccaactgtcccttctttcctctatcatatgtgcttcataatcctcattacaacctctaattgctttatttgctaaaccatttaaaaatcatctctcctacaagaatgtaagcaacatgaattctctcttgcttaccaaggtaaatcctagtatctaataatagctttggcacagagtagatgctcagtaaagatttgttaacttcaggtcttactgcaaaacaatagtctcaatccaatttttaaaattgggctgggcatgatggctcacgcctgtaatcccagcactttgggaggccgaggtgggaggattgcttgaggccaggagttcgagaccagtctggccaacatggcgaaacccatctctactaaaaaatacaaaaattagccaggtgtggtggcgcacacctgtaatcccagctacttgggaggctgaggcaggagaatcacttgaacctgggaggtggaggctgcagtgaaccaagatcgtgccactgcactccagcctgggtgacagagtgatatttcatctcaaaaataaataaataaataaaaatataatgaataatgcttccttagtcatgactatttcagttaaaaaaatacaaaacaccaccctatggcatccttcaagttacgatgcttcctttccccactagccctgtcaatctcataaccctggaaggtggcagctagccttcactgctgactactaacacccaactgccacccagatggatgatttctcaaactggagctaggactaatatagagtctaagtcatccacttcgctgtacaataaccatgttatcagagtgctctgggtacactaatggtttcaggattctctccaaaatccctaggaagcaacaatttgtatccctattgtagaatctatgtttgaaatctggctacgacatctattaattatttgagtattaaattattaaggaggaacgtaatgagactgaggcagtcatttatcttccagacaaaattttgtcacttccttgctcccatccccattggctacccaatggtcacaagctaaagcctaacacaagcatggaaattagacactatgacaaaacagtctatatctaacttcatctcaggccactcttccatccacacactgtgcactccctaccctttagcaatcacccctctacacgcttcttctctcagccctgggcaaccactgatctcctctctgtctacagttcgcctattctggagatttcattaaaattgaatcatataatatgtggtattttgtgtctggttgctttcacttagcctaatgttctcaaggttcctccatgttgtagcacaaatcagtacttcgttcctttttattgctgaacagccttccattgtgtagacaggccacgttttgtttgtgcatccatcagctttccatcacagtccctgcacacaccataacctgtatgtctctgcagaacaaagtccctttccactcttccctattcccccacatgtgccctgtaagaactagtcctccgccaccaggaagccttcataaattccctcagatacttggttggtctttctctgctttcacagaactccatgatggcagttatcgcacagcaccatcattatctgttttctctccccttcaatggactctttctcatcttcacctatgttcttctagtctgtatactttgtggtgctttaaaagaccaataaagagtatggtacaatcaatgctcaatacacgtttgttgaatgaatctctctctcaaagcactgtgctagattcacccaagtatgacagccctaaatataaaatagtggcaaaaagtcaatagaactcttatgtccaggtccaaagaatacattcattttaaattgaacatgcatcttgagtaacagctcccttctaccttagcaattcgcaaagccatcaactactcccttctaattttactgatctctctgtgcattactgaatctagaaatctcttcgtgcttgacaccaaagcttttcattataaccctttcctgatctattcctcatcttcccaagttcaatcaactgcctctgcctgatgcctgtttccttccttttcttcccactaagttccagtagccatttttttcaactcctacagcggctaatatgaaatgaaattctccccaaacttaagtgtaacttctttaagaaaaaattggaaaaaaaaatccagtagatgccagtcttctattgaaaaagacacgtgggtataatatagctgatgcctaacaaaagctacttcctagtcactccttcagaagagggttatcctcattccatcttccccaccactggttttccaaggcagtcctgaaaattcaatttgtgtgtcccctacacctgcacttagttctcccttttaaagttcatgggccagaccatgatctttctgaggcagtgacctcaggaagggtctgtctggttcaccacagcatccctagagccagcctggcacagtgctggcacacgatggccaaataaccaccaatatgggacgtaagtcaggttaacaacaacaacaacaaaaataaggtcagaggtttatcaaggtacattatagctgggtgtgagaaaacacaaagtcctgcagcctaaaagaccaggaatcgctggtgatcacaaggagctacagtggcttcattcccagattctacctatgcctgggatttgcgttttgagatttcccagaactctgtctacaagaccttggctgcaaggaggcagtccacaagtgcaactggtcactccaatagatgagaaaaggatgcacccaggctggtatcccacattctgccaacacatggaacataagtcacagaacagaataaaattcctgaatcccaataagagaggaagaaaaaagtgcagggaagagaaatggaggtagagaaggagaaactaaagtcatgagaagtcagagacatatcagaagggactagagggcgagaacgcaggctagcacagatgacagcaggggctcccctttactgaaatgtacagcggcaggcaccgtgcttaactttacatgcactgacccatttaatcctcttaccaagccagaggtagaaactattctcatctccattccactggtgatgaaactggagcggagtgaggtagggcacttgccccagcacagagctaggaaggggccgctgggacctgcccggctctgactccaggacaccccatcctttaacacttactacctattctgcctcccatgccttcaaataggattgggaaaggagtcattcacttatccactcatcgaacactgaacaccaactggatgagtgtcaaggcctggggccaggcgccggtgggcggatgtaagggacgcgggctgcgagtgggggacagaacacgacgtcaatcttaaggcgaaggagcagagcccgcggccagaccggcagccgggatgcagggtggggccgggggccgagggcgcgggacgcgcagcggaggcctgaggaggggcgggcggcccctgttccccgctgcggaccgccggattctgcgggcggcgagccaggcgctccgtgtgttgtggcatttagtgtccgccactccgcgcgggcgagaccgcgggcgagggagacggggcggacgggcatggagaccctgcggggctgaggcaagggaagagtggcccgggggaggccgaggaggggctcggggccaggcgtcgggggcgtcgggggcgtcggggccgcttgcggcgtcgccggactcacctcccgcggcagcccctccggactcgtcggccccgccgggccggaggaggcgggatggactccgggccgcgggggctgccgggagcctgttccctgggcaacggggccggcaccggggccagcaccgaagagcagcagctggctccgccgggggctagagcggcagagccacaagtggcagcgggcggggcggacgtgacgcaaatgcgtttccggtggggtgggcggggcttcgcgtctccttctacggatatctgtggaccttatggaaggtgcgtgagatcggttcctttcccggggtggggtggctgtgaatgttactgcttaggccgcaggttggaccagaagctcaggagctccccggattacatgaggttaaatggaggtcctctgtcttaccccagcctagcccgcaggcccctcgcagcctctgcgagctgctcgggagacagttttgccgagcctccgttttttcacatgtgcagtgacagatgaacgggacgatatacgcaaatgagtgtcagcagatccgacatccaaattgtaattattgtcactataaattagtactaacagagttcactgggtaccaagccttgcatgctcatctcgtccagaaactcctctctgaactgccctcagtcagaacattctgcttgtaatgaaagctggctttcgcctagtgctcagtttgctgagtactgctccaagcactttaagtggatcatctcatttgaacctcacagtggtcccatgaagtaatgtcaaccccattttgcagatggggaatcgaggctcagaggggataagtaacttagccactgtgccctcaccctaccctgtcctgtgacgctgatgactggtctgtctttaccagcccttgagtttcttgaagtcagttatgtttttggttcctaaatatgtgccccgtatgagtcaggctgaccrtgaatcagatgtgatcctgccctcagaatctcctgttggggggaaaacccttagacaattatagaacaggtggtaagagctattcctccatttacctcattttatgcaaagcctcctatgtgtggaaggtttgaaagagaacgagacatagttcctaccctagtcgaatttccagtttagcagggaatatagacattaaacaagcaaatacactccactggtgaatatcatgatagcagaattatagggtgtaccacatatctagtggtgagtcgtaacccaacctgggggatccaggaatacttctctgtggaaatgactttctaaaaacctaaatcagataatttcactgccctatccagagctcattgctcactccccattgtattaggttggtgcaaaagtaatggcaattttggctgttaaaagtaatggcaaaatctgttacttttgcaccaagctaatacttagaagtccaaacttcatttttttattttgttttgttttgttttgttttgttttgtttttgagacggagtctcgctctgtcacccaggctggagtgcagtggcgcgatctgggctcactgcaagttccgcctcccgggttcacgccattctcctgcctcagcctcctgagtagctgggactacaggcgcccgccaccacgcccggctgattttttgtatttttttagtagagatgaggtttcactgtgttagccaggatggtctcgatctcctgacctcgtgatccgcccgccttggcctcctgaagtgctgggattacaggcgtgagccactgccctcggtccaacttcttatcttggcctattaggttctagttgtctgatcacctactcacrcactagtccttttctgtctatttcattccagcacactggtttttttgtttgcttgtttgttttgttttgttttctgttttttgaactcaccaacctcattatcataattagggcacatactactgacctaccctatttctggcttttcatcattcaaatctcagcctaaacgacaccttctcaggggatcacactaacacaagaccctgttttattttccacacacacttaatcatgatctgaactgatcgtggtcatttgtttattatctgcctcccctttggaaagtaagttccatgaaaacggtcctggtccgtctcattcaatcacttcattcccccatgcctggcgtattgtaggcagtaagcaaatatttgttgtttaagtaaagaatgaatgataaatcaagatgatattttaaagtgaggatactaagtatgaggcaggggagtggggacacacacagataggaaaaatattccaggtcaaagtcagaacttgtacagagccagctctgatgcacagagggcaagtgggaaagggtagaagctgaagtggtgggcagagcttggatagtagaggcccttgagctaacaggtgagatactgggtttttgccttgtgcgaggcctcacagcttcacatatattatctaatctcagcaatcctatgaaatagatactatttttattcccattttacagatgaaaatgttgaggctctgaaaggtacattaagttgcccaagatctcacagctggcgagctggggttcagacgcaggcagtgtggtcttctgacttgaggcatcaaaccatccagctgttgtgtgtcctggattcctcaagaggactttatcctgtgggcagtgagaagcctttgtggggttcaaagtagagaaggcaagagggcacaggagggttcggggagaacaaacaacctgagttggctcttggtggtctgggggttgcttcctacaggcagtgggatccgggtgcatcttggaggatgggcatygtgagcctgaggaaggaaggagctttcctgcagagagaacacgtgtaaaggcctgcaggcacctcagcttttcaagagctgccagtagttcattttcgctggatattgacggggggccaaggtgtgggttgatgtacgtgatgatgtggaggggtagctaggtctggaaggattttggacttcctcctgattaccaagaagggcagtggcagcatcgtgatcaactctgcatctctgttgtctcagtgtcttgaaatgattagcactcatgggccacgctactctgagcaaatttaaagtatcagagtgcctgagactagatagtggaagtactcgggagtcagggctagattatcctgtagggaagggaacgtgagccattgaagagttttagcagacagtcacaactttaccttatttccaatctttggaaaacaaagggcttaaggtaaaaactttgtggagccattaagctggaagaggattcagctmtatctggtgaattttaaaatgttaaaaatattctatattgtcttcttccaggaactttcacattcattcagactttgtagtttccacatttatttgtccagttgatacagcatttcagatagttttactgttgaaaattataaggacatttgccctccaactatgattgtatattccatgataataattttgtttcttttataccctatcagcaaagactcttggaactgtaacgcccagaaaacctgtcttatctgtcagtgcaagaaaaattaaggacaatgcggctgattggcacaatttaatcctgaagtgggaaaccctcaatgatgcaggttttaccactgcaaataatattgccaacttgaaaatcagtttattgtaagtacatattggtttttcatgctctaagtttttcacccttaataactggggaaataatgtgaataaattttaaaataaaatattaagcaaaaaaagcaagtggtaagatgatacgtgtaagtataaattgtattgtacattttaaatacaaaattatattccatatatatatatatatatatatatatttagttatttatttatttatttttttggagatgaagtctcactctgttgcctaggctggagtgtgatggcgcgatctcagctcactgcaacctctaccgcctgggttcaagcaattctcctacctcagcctccggagtagctgggattacaggcgcccgtcaccacacccagataatttttgtatttttagtagagacgggctttcaccatgttaggctggtctcgaactcctgaccttacgtgatccacctgcctcagcctcccaaagtgctgtgtgagccaccgtgcctggctattctgatttttaaaaccacagattctttgattcttttgtagttcataggcataatgattgggttttcatgctcatgtatgacctgtgccttcctcaaactttgctatgatgttggcacattacctagctgatatggaaaaaactaccatgaattcttttcatccatttttggattttacgtaaacaaaaaacatatgttattgtttcctttatatctcactttctttttctattttttattttttatttttggagacgagtctcactctatcccccaggctggagtgcaatggcgtgatcttggctcactctaacttctgcctgtcaggttcaagtggttctcctgtctcagcctcctgagtagctagaattacagatacctgccaccatgcccggctaatttttgtatgtttagtagagacagagtttcaccatgttggccaggctagtctcaaactcctgacctcaagtgatctgcccaccttggcctccctaaatgccggtattacaggcatgagccactgcgcccagccatgtctcactgtctttcaacatggaagccatgcgtgtaatgtagagccactattctggttctgttctttctcattgctgtttaatagtgtttacccacattagacctctcacactggtttatcaactaagttatataatattctcaatcttttgttgtcatttcaacagtgtgcacagtgtctttcccaggaatagattccatctcaagaaaccaccttctttgctcatccataagaaacaattccttatctgttcaagttttctcatgagattgcagcaattcagttccatcttcagaccccacttccagttctggttctcttgctttttccactggcagagtagatttaacatcattcttaagggccctaggaatttgagaatggtaaatgagcattggattcaacttaaagtcactaactgcaatatcccctaataagagggtgagcctgtctcttgaagctttgaagcctgtcattgacttctctgtagttgtgaatgtcttggatggcatgttcttctaatagaaggctgtttcatctacactgaaaatctgttgtatcatgtagccaccttcatcactgatcttaagtagatcttctggataacttgctccagcttctacattagcgcttgcagcttcaccttgcacttttatgttatggagatggcttttgtccttaaacctcatgaaccaaatcctgctatctcaaacttttcttctgtaacttcctcatatctctcagccttcacagaattgaagagagttagggtcctgctgtggattaggctttgacttaagggaatgctgtgtctggtttgatcttctatccagaccactcaaactttctccatatccacactaaggctgtttcactcatcattcacatgttcactggagtagcacctttaattttcttcagtaacttttcctttgccttcacaacttggccaactgtttggcacaagaggcctggttttcagcttatcttagctttttttttttttttttttgtagagatggagtctcgctctgtcgctcaggctggagtgcaatggtgcaatcttggctcactgcaacctctgcctcccgggttcaagcaattctcctgcctttgcctcccaagtagctgggactacaggtgcacaccgccacgcccagctaatttcttttgtattttagtagagacggagtttcacatgttgcccaggctggtcttgaattcctgagctcaggcaatctgcccgccttggcctcccaaagtgctaggattacaggcgtgagccaccgcacctggccccttatctgagcttttgacatgccttcctcactaagcttaatcatttctagcttttaatttttttgtttcttaaattggccaaagtatagcttttgatttaaaatgagagatatgcaactcttcctttcacttgtacacttagaggccaatgtagggctattaattgggttgatttcagtatcctcctatttcagggaacagggaggcccaaggagatggggagaaaggggagcagccggtcagtggagcagtcagaacacacaacatccattcattaagcttgccgttatatatgcacatggttcatggcacctcaaaacaattaaactagcaatatcaaagattaccaatcacagatcatagacataataatgaaaaagtttgaaatattgtaagaattaccaaaatatgatagagagacatgaagtaagcacatgctgttggcaaaatggtgctgattgacttgctctacatacagagggttgccacaaaccttcaatttgtaaaaaatgcattatctatgaaactgaataaggtgaagcacaataaaatgaggcgtgcctatattcctggattgtgaactctttgaggaaatgatccatgtcttattcatctttgtacatccagcaccatgccctatgccaaggatgccacaccgctgaatggtgttttttttttttttgagacagtcttgctcttttgtgcaggctgagtgcagtggtgctataatggctcactgcagccttgacttcctgggcttaagtgatcctcccacctgagcctcctaagtagctgggaccacatacgtgtcccaccatgcccagctaatttttacttttaatttttgtggagatgaggtctcacygtgttgcccaggctggactcagactcctggactcaagcagtcctcccgcgtccatccctcaaagtgttgggattacaggcatgagccaccaaaaccggctgtcacatggctgaatttaactgacttattttggtgcaaaattgagtgaccaatggacatattcattgcacatataaataataactgcatttgtatcataatgatatgaaagaacaatgcttatgcaaaatgtcccacgtaactatgtggatatagaggtttgtagaatttattataaggaaataaggcaagcttaaagagtatattttgtacacattattttctattttgtttaggaataaagacaagatagaactagacagcagcagcccagcctcgaaggaaaatgaagaaaaggtgtgtctggaatataacgaggaactggagaagctgtgtgaggaactgcaggccaccttggatgggttggtaagacataaagacgcaggccacttgtggtcactgtcactgaatccgatggacgtatttggggtttgcttgaccattggccatcacttactccttctcagtctcctctgatgttctcttcctctgcctgctgcgtaaaccttaatgttccccaagatgctgtcttagacactcactcctcctgtgcgtcatccggggaaatgtcacccactttcagggctcatcacatagtaaattttttttttttttccatgatatggagtcttgctttgtcgcccaggctggagtgcaatggcgtgatcttggctcaccgcaaactccgcctcctgggctcaagcgattctcctgtctcagcctccagagtagctgggactacaggcgtccgccaccatgcctggctaatttttgcatttttagttgagacagggtttcaccatattggtcaggctgatctcaaactcctgacctcaggtgatccacctgctggcctcccaaagggctgggattacaggcatgagctaccacgcccagccacagagtaaatattttaggcttccagggccagccagtctctatctcagctactcatctctgccacataggactaaacagccatagataatatatgcgtaaatggatgtggctgcattccatgaaaactttatctttgttttttggattttctttttttttttttttgagatggagtctcattctgatacccagggtggagtacagtagcatgatcttggctcactgcaaactccgcctcccaggtacaagtgattctgctgccttagcctcccaggtagctgggattacaggctcgtgccaccacatgagctaatttttgtatttttagtagagacagcatttcaccatgttgaccaggctggtctcgaactcctgacctcaagtgatcagcctgccttggcctcccaaactgctgggattacaggcgtgagtcaccgcacctggccttttttgtttttgtttttgttttttttgagacagggcctcactctgccactgaggctggatggagtgcagtggcgagatcttggctcactgcaacctccgcctcctgggttcaagcaattcttgtgcctcaaccttccacatagctgggatcgcaggtgtgcgccaccatgcccagctaattgttgtatttttagtagagatggggtttcaccatgttggccaggctggtctcgaagtcctggcctcaagtgatccacccacctcagcctcccaaagtgttgggattacaggcgtgagccaccatgttcgtccaggaaatctttatctttggacaccraaattagaattttgtataatttttatgagtcacaatcactattgtccttttggttattttcaaccatttaaaaatgtaaaaaccatcttagcttatgggccatacagaaataggctatgggccagaattgacctgtgttccagggatagtttgcccatccctgatacagcacgtaagagactaaagtgtttgtttaatgaactaataactaaatttcaatacctaccatactggccaccagatgtgaagataacaccaccttatttctttgctaggcacaggaaatcaggttttacacatatttgaacttggataactgaagcttacccataaacatttaagatctttatattttcacctttttgtttgtttggagacaaggtctcgctgtggaatgcagtagtatgatcacagctcactgcagcctttacttcctgggcttaagtgatcttcttgcctcagcctcccgagtagctgggactacaagcatgaaccatcatgcccggctaatttttaaaattcgtttgtacagacggggttctcatgttggccaggctggtctcgaactcctgacatgaagtgatcttcccaccttggcctcccaaagtgctgggatcacaggtktgagccctggcgccctgccttagcttttccgtcatgtcttgttttggcttcaggatcctgtatgacatcgagtccccttgtttcctcaggctccttttggccgtgacagtttctcagacttccctgtttttgatgactttgacaatgttgagggatactggtcaggtattttgtagaacatcatgagatttatctgatgtttttctcctaattagactgaggttacgggttttgttcagaggaggaccacagaagtaaagtgccatttctatcatgtcatatcaagggcacgtactggatatactgtcatcaggacttttctttgggtcccacctattgcccgggctggtctcaaactcctgggctcaagcagtgctcccacctcagcctcccaaagtgctgggattccaggcgtgagccactgtgcacagccaggactttccactgctgaagttgaccttgatcacctggctgggcagtgtttccaggttcctctgctgtgacgttgctctttctcctcctcccacgctgtgctctttggcaggaagtcactatgcatagcccacacctgggggtagggacgtattcaccacctgcttgagggtgcagtatctacataaattatttggaattattctgcgtgggagatttgttccctccctcccatttgttaattttttttttttttgagatggagtttcactcttgttgcccaggctggagtgcagtggggtgatctctgcccactgcaacctctgcctcctgggttcaagtgattctcctgtctcagcttcccaagtagctgggattacaggtgcctgccaccacacccagctaattgttgtatttttatttgtttttttttaatttttgttttggccaggcgcagtggctcatgcctgtaatcccagcactctaggaggccgaggcaggtggatcacctgaggtcaagagtttgagaccagcatggccaacatagtgaaaccccatctctactaaaaatacaaaaaattagctgggggtggtggcaggtgcctgcaatcccagctacttgggaggctgaggcgggagaatcactttcggaggttgcagttagccgagatcaagccactgcactccagtctgggccacagagtgagactccgtgtcaaaaaaaagaaaaaaagaaaaagaaaagtggtttgggaataagttctcattctatgttcaaaaccaaaagttgattttatagggtattattatttttcctattttcctctatccgttatagagaatggtttccagacctggtctgtgtctttcataactttgaccttctgggggtttcatgcaccgttcttcctaagctgggctaacatttcactgtggtctgtgtttgctgtgggaagaagccaccgatgttgaaatgtaagggcctgctgtttatgcactgttcattcagggctgcacgtgcctatgtgacttgaattctttattgatggctgagctgcaggattgagcatgacttcttgcctggggtcaaggctccagaattttccttagtctcctgttatcagcttttcttagaatcaggtggcaccagggagctgctgcaggactcacaggaaagagcagaggattgggtgttaaaacttggtgtcggctgggcgcggtggctcacgcctggaatcccaacactttgggaggctgaggtgggcggatcacaaggtcaggagatcgagaccatcctggctaacacagtgaaaccccagctctgctaaaagtaccaaaaaaattagccaggcacagtggcgggcgcctgtagtcccagctacttgggaggctgaggcaggagaatggcatgaacccgggaggcggaggttgcagtgagcggagatcgcgccactgcactccagcctgggtgacaaagcgagactctgtctcaaaaaaaacaaaaacaaaaacaaaaacaaaaaaacttggtgtcagaaggcatggtatcgagttctggcctcatccttcctcagctcaaccttaagcaatttcccagctgtgaaacggaaatgacaagtcctgcctcttggggttgggccaaataaaatatcaaaccttaaaagatttgggaaactacttaagtaaagtcctttaaaaattaacgttagctgaatttagtgcttgccacttccaatgtaattggagggtggttggaaggaccaagtaaaggaattaagatatttgacaatttatatatcttttcttatttcccctttttcatatttatgtatgtaaagtcaactatacttaggagttcaaaatttggtctttatagacctatgctacttaaatctgaaatcctagttacttcacccattaattttctttatccaacccttatatatctccaagtaggtgcttcacaaatactaactcacttaatcctcttcaccaagctgtgaaagtaagcccgccattgcccctattctgtgctgcctggtgtgtgcagtggggttggtttagtgtctcccacaagtagccatacacatcatgcagttacagggcttaggacagagcctggtccacrctgagggaccgtcaatggcagcttgccacgtttccttcctttctgcgtgaagtgtgtagggctccctttctgtgttgccattttataaacaaggaagtcaaggaggtttccgtaaataaaggcagttaataagagagagtcaggcctggtgcggtgtctcatgcctagaatcccagcactttgggcggccgaggtgggcggatcacgagttcaggagatcaagaccagcctggccaacatggtgaaaccccgtctctactaaaaatacacaaattagctgggcgtggtggcacatgcctgcaatcccagctacttgggaggctgaggcaggagaatcgcttgaaccagggaatcagaggttgtagtgaaccgagatctcgccactgcactccagcctggcactgcactccagcttggcaacagagcaagactccgtctcaaaaaaaaaaaaaaaaaagagagagagagagaacatcagaaacgagctcatttgatagagagacagagagcctcagaaacgagctcatttgataaaagagagagagagagagcatcagaaacgagctcatttgatgcctttctctctcacttcttaaaagcagcaagagccagccaggcgcggtggcgcatgcctgtataatcccagcactttgggaggctgaggcgggaggattgctggagcccaggagttagagaccagcctgggcaacataacgagaccctgtctccacaaattaaaaaaaattagctgggtgtggtggtgcacacctgtgatcccagctacttgggaggctgaggtgccagcggttgaggctgcataaggcatgatcatgccacacagaatgagaccctgtcgcaaaaaaaaaaagaaaaaaaaaaaaaggcagcaagagcctgccttgggattcctccaggtctttgggtctaagacattaatgctgtttggaaatcctagtgaaatggcactcggaaacctttcttgctctaggactggaaatctggggtttattaccaaagtcattcaaattaatgaaatcatagcaactgtccaccttcatctccctgggaatttgctgtaygtagagttaacagtgtttagttattggaatttttatcataatagacttacacttcttagctttgaaatcttagagttattaaatctgagactggagatttcaaataatattatcatattccaaatggatatctttcagaccaaaatacaggtgaaaatggaaaagctgtcttcaactaccaagggaatttgtgaactagaaaactaccattatggggaggagagtaaacgaccccctctgttccacacgtggcctacaacccatttctgtaagtagttccttctcagttgattttcaggagggtaaaggttattaagggcatttagtatcgtttacatctggtactttaagaagctgacaaggctttcaaattcaatgcaaaagtatcgggaggaaaggagacagaggcatcttaaacatttcttcttggctttaattacctggttatcagcagagtatatgaaacatagagacccgtgaagcaagctgctgttattaggcctctaaaaccaatgggcagagtgaattccacctcctctgtggaagcagatatctctcattttgagggggggaaaggaagaaaggagtttttttggtttgttgaggtttttcttttgttttttgttttaattaaaaaacaaattgagggtcactgcagccaacctcatggaagatgactgggaaaaatgaaacccatggcttcagtaaactctatgaggcgcttcttaaagggttacttttagcttttattagttcaagacaagggtaagctatttgatgttgacctgagactttttaaataaggcaggaaagggtaaaatcacctagtggaatgtgtttagtgaaatattgtcagtttgaggggaatctcctactgataatcactgtaggtcacctaagagtcaagtagaaaaggttatatatactttttttgagacagagtctcgctctgtcacgcctgctggagtgtagtggtgcaatcttggctcactacagcctccgcctcccaggcacaagcgattctcgtgcctcagcctcccaagtagctgagattacaggtgcgtgccaccacacctggctagtttttgtattttttagtagagacaggttttcgccacgatggctaggctgttctcaaactcctgaactcaggtgatccacccacttgggcctcccaaagtgctgggattacaggtgtgggccaccacgcccggcttgtatacactttttatttcactctgctgaccatgttatcaaattgtactaatctgcaccagctagagtagtaaactccatcgggcccttcttcccctcagtgctgttgctgattctggtttttaatcaagagctgttaaaatgtagttcttcccaagtcgacactatgttcttgaatcactgccattaagggagattcacgtttctttcagatgaggtttcgcataagctcttggagatgtacaggaaggagctgctcctgaagcrcacggtggccaaggagcttgcccacaccggggatcccgacctcaccctgagctacctgtccatgtggctgcaccagccctatgtggagagcgacagyaggctgcatctggagagcatgctgctggagacaggccaccgagctctctgacgtcctgagacggctgcggacactggctccttccacgtctcaccaggcagacagtctgcctaggacccagtgccgcaggcctggatcagaccccaggatcagacctyggggtcttytggccagagcttgtcaccagccccayggcctctccaggsgtgctcatgcccacaacccgcggccagccccacgtggtgcygctcagccttytytgcccctcctgggaatctgtcattcgtgggtgcttcagagtaaaatcaatgagtttytgagmagaatgagtgagtgatctagtttctataaattaggcatgctttatacattatgtttgtgtagaaaatccctggtttaatatttttactttatgcctatctgattgttgaagtttttatgagactatattagtttttgggccaggtgcggtggctcatgcctgtaatcccagcactttgggaggccgaggtgggcggatcactttaggttcggaattcaagtccagcctgaccaacatgatgaaaccctgtctctactaaaaatacaaaaatcagctggcgtggtggcgcgtgcctgcaatctcagctacttgagaggctgaggcaggagaatggcttgaaccgggaggcagaggctgctgtgagccattgcactccagcctgggcgacagagtgagacttcgtcttaaataataagatcccatggagttaaaatgaagtttgacatcatgaaaatgaaaataacctacaaaaaaattgccgctgtttgcatactggggacatggcaagcgatgtaaactgccttccctggcattcttctgacacaaatcctcgagtttcacaatgtttgcagccatttccagagttaacatactaggttagaatgagggaaaggtgacagttttgaaacagaccgaagagactggccaaaagctagggcatggggagaatgtgaaggtatgcaaaagcctacttttttttttttttttaatggagtctcgctctgtcaccaggctggtgtgcagtggcacgatgtaagctcactgcaacctccgcctcctgggttcaggcgattctcatgcctcagcctccagagtagttgggactacaggcacgcgccgccacacccagctaatgtttgtatttttagtagagacggggtttcaccacattggccaagatggtctccatctcctgacctcgtgatccacccaccgcgccctcccaaaatgctaggattacaggcgtgagccaccgcgccgagcctgcaaaagcctaaactcttttttgtggcattacttgttacatggtttctacatctgcgtttgcctttttgtaagttctctgatcccaaactgtttatattctgtgggactgtgtatagagtgatacttaataaacagcagttttagttttttggtttttatgagataggctcttaccatgtggcccaagtagtgtcaaactcctgaggtcaagtgatcctccctacttagtctcctcagagactacagtcatgcactgcccagcccagcaataatgttgttggtgtttttagatacagggtcttgctctgttgtccaggctagaatgcagtggcatgattgtagctcactgtaatctcaacctcaaactcctgtgctcaggtgatcctcctgcctcagcctccagagtagctgggactgtaggtgtgcataaccacgtccggctaatttttttatttttactttttagagatgggggtcttactatgttgccctggcttgccttgaactcctggcctcaagtgatcctcctgcctcggcttcccaaagtgctgggattataggtgcgagccactgcacctggccaagtatagtttttaattgtgtcattttagtatttaactataaatactatttatctaagtttattaagactattgtaactttatttattttttgagacagagtctcgctcttgttgcccaggctggagtgcagtggtgcaatctcggctcatcacaacctccgcctcccgggttcaagcgattctccccgctcagcctcccaagtagctgggattacaggcacctgccaccatgcctggctgatttttacaggcatgcgccaccacactcagctaataccgtattttcagtgagatggggtttcaccatgttggtcaggctggtcttgaactactgacctcaggtgacccacccgccttggcctccccaagtgctgggattacaggtgtgagccaccgtgcctggccaaaagcatttaaaggcaacatttcttaggatttctctttcctctgcctttgctatatttattaagatctgactatcggctggatgcagtggctcatgcctgtaatcccagcactttgggaggctgaggtgggtggatcacctgaggtcaggagtttgagaccagcctggccaacatggtgaaatctcatctctactaaaaatacaaaaattaggctgggcgcactagctcaatgcctgtaatcccagcactttgggaagccaaggtgggtggatgacctgaggtcaggagttcaagaccatcctggccaacatggtgaaactccatctctactaaaaatacaaaaattagccgggcatggtgctgcatgcctgtaatcctaactactcaggagcctgaggcaggagaatcccttgaacccggaaggcagaggctgcagtgagccgggatcgtgccactgcacttcagcctggtgacagcgagactctacctcaaaaaataataataatgataataatatgacctggctaggcatgagtcattacgggctcacacctgtaattccagcactttggtggctgaggcaagcagattgcttgagcctaccaggaggttgagaccagcctgggcaacatctacaaaaaatacaaaaaactaaccaggtgtcatggtgcatgcctgtggtcccaactactcaggaggctgaggtagratcacctgagcctgggacattgaggctgcagtgagccacgactgcaccactgcactgcagcctgggtgacagagcaaagccctgtggaaaaaaaaaaaaagtgcctcagagggcattaaagatccactctgccctggctcctttctttcctgctggttcagctctccccactcctgtgaccatttgggaggtgccagggctgcagtgccgtgggtgcctgaccaggggtacccaaccagggttgcagccacaggaatcctcatggtttccagggaacacaagggaattttctttctttgcctttagtaataataactgaacatggaccaggtgccagggatcatgacaaatgctgaaaccacgtgtcctcattgaagccccagccagccacccctgggagtcatttgggtgtccttgtcccccggtctgtactctaatgtctcttcacacttgctcttaatctgagtatttgaaattaaaagtactatgtatacaaaacaaagttcttcatgagaaaaggaaatttccatttatcattctttcataaataaggttatgtctgtctttttttctttctttttctctacaggtgtgcactaccatgctgggctaattttttttttttaatttttagtagagatggggtctcacggagttgtccaggctggtcttgaacacctgggctcaagcgatcctcccgcctcagcctcctaggttacgtctattagaagggggttgtaatgtggaagctgtgcatacatctgtctctatgctgtattggggaactctgcaaaggccaagctggaagagaggataaggcacagggctcccaaagagtagggcccatgagtccccctcactgccgtcagtcctgtgcctggcacacagcagcactcgacaggcacgtggccgattcatgaggacactgctctcagagcctcctgtgtcttcaattctgtctggtggaacaaaggtttatttgttgtaggttttttttacatcagttacattgaccatccattcatagtagcacatacacagtggtgaaactaagatgtgttgggatattcactagtgtcctatagatagaaaataaatgtatatttaccagggcctcatccagaccatggtcatactcgagtcagcatgttgtgtcagttacctgacagtggttatgaatgatcctcagggctcttgtctccatctccaggatcccaggagggcactcatggtggtttatgggactctggactcctgagaagcggccttgagtctacaggatacatctacagcctgacctgaccacccaacactcccaggcagccgcggcttgctcccctgctggccatttccagcctgctagaaaacccacctttttgttcctaccgaccgtggctttgagatcaagtgagggtaggaaatgcccctggtcactaaaagggctgtaggaaaggctggctctctgagaatacagctgccctccagggcaggacctggaaggagcacagcgccagggcgacacatggtcacaagcccagctctgtccctgagcagcgtgctctctgcttggggtctctcctgaccgtctctgcaaggcgtggggagagacctgctgctccctttgaatgctttcttccacatgtggacaaatggcccttcccttccttccccgtaacacagcccacggaaatattgaagacatgccactaagtgactttccaagtgggacatcaaagaactgggcttctaccctgagcagcatcttgctgtggacctcaagtaagtcaccccatcatttatgcctcaccttcctcatctgtaaaatgtgaggagagccaggcaccgtggcgcacgcctgtagtcccagctactcaggaggccgaggcaggaggatcgcttaagcctgggagttaaaggctgcaatgagctatgattgcaccactgcactccagcctgggcaacagagtgaaaactcatctctaaaaaaaaaaatcaggccggggccgggcacagtggctcacgcctgtaatcccagcactttgggaggccgaggcaggcagatcacgaggtcaagagatcgagaccatcctggccaacatggtgaaacctcatctctactaaaaatacaaaaattagccgggtgtggtggcggacacctgtagtcccagctactcggcaggctgaggcaggagaatcacttgaacccaggaagcggagggtgcagtgagccgagattgcaccattgcacttcagcctggcgacagcaagactccatctcaaaaaaaaacaatcaggcccagtgcagtggctcacacctataatcccagcactttgggatgctgaggcgcgtagatcacctgaggtcaggagttcaagaccagcctgaccaccatggagataccccgtctctactaaaaatacaaaatgatccaggtgtgatggcacatgcctgtaatcccagctacttgggaggctgaggcaggagaattgcttgaaccctgtggtggaggttgcggtgagccaagatcgagccattgcactccagcttgggcaacaagaccaaaactccatctcaaaaaaaaaaaaaaaaatcattggccaggtgcagtggctcatgcctgtactgtaatcccagcactttgggaagctgaggtgggcggattgcctgagctcaagagtttgagaccaccctgggcaacatggtgaaaccccgtatctactaaaatacaaaaaaaaaaaattagctgggcatggtggcatgctcctgtagtcacagctactcaggaggctgaggcacgagaatcgcttgagcccaggcggcagaggttgcagtgagccaagatcgcgccactgcactccagcttgggctacagagtaagacttggtctcaaaaataattaaattaatttaatttaatttaatttaaaaaatcatgcaagtagaaatgactttttcccccttctatcaataaaatgctgcccagaatgactagcttattttctttttaattgaacccaaaagaagcttctagtatggagcaagtctggtggaaaagcagcatatctcccaggagagaagggaaacggagcagggccaatcatcaggtgacagtgcagtgctactcatcaccatcatgaaaaactcatgagcgtcagacgcgccacagggattcctgatcaggtaatatctgctattattatgacaagctccatagaaaaatgtagacagcagggcagaaagacattattctttataaataaaaggttcatctgtgcaatattcacattagaaaaatatacattgcttgccatagaccttctctggataaaatcagacgaatctaggatctgactccacttcactgtgagggctctggctccacggtgacgaccgactccacagcttctagaggaactccttctagcgggcccatccgcaggcacgcccctctgcatcagtcactgtgacaatgtcctcctcctgagacactattgtacctggaggggacaagataagcccatcggaagtctgaataaaaatctgcttctgtccctgagacagtaactcatggctcccattggaaatttcaaaagccatggcttcgccgacagcaaccacgctctccagttctctctggccagagtgcacctccatcccacaggggaaccggttcaagtcccccgaaaggcttctgagacacccttcagtcaatagtgatccatgtgggccaggctgaggccctggcttgggcacagtcctgtaggcacagtccactgccacgctatccacagacaaaattttctcaagcggaggggctgccacctctgtaggcaggacgctggtggggctgggctgctggtggttcaggtggaagtcacaaaccttgccgaggtgtcctgcctctgcatgtccaggccccccaggcggcagggactctgctccaccaccagatgacaaagggctgcagaaacccgggctcctcaggctgtcccaggtgtcctggtctgaagagtgttccaaagcattctctccaggaaacgctgccacctgtgcctgggtcagcctcctaggctctcctgactgagcataaacaggcagcccactgacatcccgggatgagagagcagcacctatagaccccctcctggcttctaagttagccagtgcctgaagctgcgggcccgcctggaacacgctcccattgccaccagaaaccgtcgttgtatggctttcttcagaacggggagagacagtcacatttactggaggggaaaaacctaaacattttgggaaacaggtgaacatggcgtgtactgtgtcatggcccactcactgcactcaccacccaaaaccagctaggccaagtcacctgccctgcagaaaagtcaaagcatcgatgctccttgctccttgggattggtagcaattttaaaaaatacgtccctattctctattcacaaagacagattttgtattaaaaatatgctctaagagccaatcgacagtgtgcttttttttttttttttttttgagatggagtctcgctctgtcacccaggctggagtgcagtggcacgatttcagctcactgcagcctccacctcctgggttcaagcaattctcctgccttagcctcctgatagctgggattacaggcatgcgccaccatgcccagctaatttttgtatttttagtagagacaaggtttcaccatgtaggtcaggctggtctcaaactcctcaccttgtgagccacccgactcagcctcccaaagtgctgggattacaggcatgagccaccacacccagcaacagtgattttatgccaatactgaatgaatgattggtgattcttcatcagagtgagctggagaatcacccaaagaggcctttccaaatactcacatccacaccctcccaacaaccctacctgcagacctggaattcccagaggtccaggcccctgtatttcacaataacctccccaggtggttccaacacatgccccaattaagaatcaccatcaggctgggcacggtggctgctcacgcctgtaatcctagcactatgggaggctgaggcgggcagatcatttgaggtcaggagttcaagaccagcctggccaacatggggaaaccctatctctactaaaaatacaaaaattagccagatgtggtggtgggcgcctgtaatcccagctactcaggaggctgaggcaggagaattgcttgagcctgggaggcagaggttgcagtgagcagagatcatgccattgcactccagcctgggtgacagagcaagactccatctcaaaaaaaaaaaaaaaggctggcgtagtggctcatgcctgtaatcccagcactttgggaggccgaggtgggcagatcacctgcagtcaggagtttcagaccagcctgaccaaaatggtaaaaccccatctctacaaaaatacaaaaaaaaattagccgggcatgatggcgggtgcctgtaatcccagctactggggaggctgagtcagtagaattgcttgaacccaggaggcagaggttgcagtgagccgagattgtgccactgcactccagcctgggtgacaaagtgcgactcccgtctcaaaaaaaaaatttatatatataattttttaagtgcctagttgataggttctggctagagccagaataaaagccaggacctgtcttgttttcaaatgttaaatctcagctggcatgtacagcgaagtctcatgaaagccaagccatagatggatgtgtcctgggacccgtctcagcctaacctcttgggaccctcctggtatagcctgtttactaccatttggtggctctccttttttttttgagatggagtctcactctgttacccaggctggagtgcagtggtgcaatctcggctcactgcaacctcctgcctcccaggttcaagcaattctcctgcctcagcctccgaagtagctgggattacaggcacacgccaccacacccagctagttttttttgtatttttagtagagacggggttttgccatgttggccaggctggtctcgaattcccgacgtcaggtgatccgcccacctcggcctcccaaagtgctgggattataggcgtgagccactgcacctggcctgtggctctccattttaacaaggcactctagaaaaccctgaagacctcaagactcgcagggaatgaatctggaatgacagaacactgggaggctggaatgaaacttgagaaaccagagggtccccttaaatccagcacaggtcacccaacctgaaaaatggcaatcctgggtacatctgtgcatgtcagcagggctgccaggccatggatacaccccacaaacagcattttaccctcaccagcggccaaagcatgcaagggcctgggcttctcccggcctctgctgttggcagcaagagattcagtggtatcgttggacagggcttctcttctgggccttttcactgaggccagtccc

SEQ ID NO: 8904 - DNA, 20244 bp, Homo sapiens
gttgtgctgcatgggagtggaaaggcaatactcgttcccaccctacattctgagcactaatacatcccactccttgcaggaggcccaggcatatgcagatgacaacagcttattgttcatggagacttcagccaagacagctatgaacgtgaatgatctcttcctggcaataggtaaggtcagaacatcctgaggtcctcctttttccctcgtttataggcaaaattatagctaacccaaatcaaggataggtgcgagtatctccttttgcaaaaactttaggtatggaaataccttaactttctgttatgacctccatccttggctgcagctttagctcccttgtcttcaatgtgtaagtttgccggccaggtgtggtggctaacacctgtaatcccagcattttgggaggccgaggcgggcggatcacgaggtcaagagatcaagaccatcctggccaatgtggtgaaaccccgtctctactaaaaatacaaaaattagctgggcgtggtggcgcacacctgtagtcccagctacttgggaggctgagccaggataatcacttgaacccgggaggtggaggttgcagtgagccgagattgtgccactgcactccatcctggcaacagagcgagactccatctcaaaaaaaaaaaaaaagtttgcaaatagtgaaccctcccatcttcagaacattcttttaatctctcaaattctcccttttccccaattcagtagccgtttttggcgggtggaggcagaggggtagggaagtaaagtctaccatactttgttctcttctctttttatctctagctaagaagttgccaaagagtgaaccccagaatctgggaggtgcagcaggccgaagccggggtgtggatctccatgaacagtcccagcagaacaagagccagtgttgtagcaactgagggggtggctagcagcaaacaagtatggagctagcacaagagctaagaaataacctccatccctacccctcagcacacaacccctacggtaacagcacactgagccctggctcccaagggctgcctcctgacagctccgtcatggcactttttaacgcttcagcaacaaacaccaggcagctgttgccactggcctcctaccccctactctggggcttgggggtcaactccccccaggacttaccttccaaaacaaactttcttcactttgtattataggtacaagacagcgacttacgtatcttttctcctcctccctagtgttcctccccattttttcagaaaacacttctgactcctgtcccttccccttctgcttttggtcagtccctgttcttgagcctcttttctcctctccccaggatgcagaaagtggtgaacccaggaactgaggaaggaggtttccagttcatttacattaagggccctgggggagaataaagctcagagcaggagggagtaaggaaacatttcctttttgtttttatttggttggagtttctcatatttgaaaacattgcggtatccatgatttggccttgtggagggtgttcctaggtagaggtgagaatggggaggcaagatctcaggcaccaggcaggaggtgccttgtaagctaactgggcggaggtggaggtgcagtgtcaactgtggctctgtaactcttcaaaggcccagtttcccctcacgcagcctcttaggtagcgtttcccctaatcgtgggggttggaccccagagtcttccaaagaattttcactggttgcctgcatctttggctctgctgtgatctgattggaggagggacagtttctggtacccatcctctgatttatacatatgcattttttcccctctggcctttagatggcctcagccccagccaccatatacccctgcagtttgcactttaattgatggtagttcagttggggtacttgttttatggaagttttgattgatttacttgccctcccaccttctttttaattcaatgaaatctgaggttaatgcgaggttcgaggagaggttatagataaaactaccagtggcagctactcaagtcctatctccactgttagcttcctccaactctaattattaacctatattcttgccaagctaactattgactataggtttgcctttcctggagaattaattgagcaattgaggagtgtctcaggatagcacaggccaaggtaggggagtaaaaaggaggtcaggcaaaagggaggagttttctgtcctttcccaggtttcacactcaatttgatatccattaccatgtcttttctacttccttgtaaataggtatgatctttattcccactgtacagtctgttctatcctctgcctcccatcaggccctgtttctttgttcctttgttaatatcttgaatttagtccctccatccttaatccccccatccctccccatcatgcaaccagtggtttaatccatgtaccaataggggctagtaccacagaggcctcctgtggtgccctcgtatcataccacctgttcctgtggagagggaatgaccggcactgaaggtaccttacaactggctcatattatcagaggaccttggtcctttctaaatctctagtctctcttcatatccttcatcaggtgttttaagatgtctctgagaagccatcaaggcaaaagagaactttaagttccttgttccagcccggagttttgggaaagaaagaaaggaaaggtcacagtgacctaggattggaaccttcctgcccttttggcttgcagactgccttctatcccagaacagctgagaaatctatgaagctgagattctgaaggacccagcttaggttcttccacttaggcctcaattcccttccttttccaggggcagccttagttcccatggccctgaaacacacacatttcccccttcctttcccagaagccactggccccccatagcacccagtgcatcctttttacaagtggaagaactaggatggctttccaaagtcttctagaaatgaagttctttctctgtgcagctttcccccttggagcaggagtgaagatgtttcattatcttgggcctgggaaaccacttccccaggcttctccctccccccacccccataggaacaggatttggccttagcttctgggcctatcggctgccttccctctacttcctaccacctcttctgccttcctttgagctctgttgggcttggggatcttagttttcttttgtttatttcccagctcatttttttcttctggtcagtttttttaagggggggtgttgtggttttttgtttttgttttgcttctgagaaagcatttgcctttcttcctctcccaacataacaatcgtggtaacagaatgcgactgctgatttaccgatgtatttaatgtaagtaaaaaaaggaaaaaaagaaaagggcattggagtgttgcttttttttattttattgttattattattattatttttgctatttgtcaggtactaggaatttggaagaaaggatacccagtaatgttctactgaatcagaaacacacctttccctgcatcttgatacatctttattccctttaatcttttcttaaacatctagtttagaaaatagcccttctattgctatttaatcacccctcttctaaggccactagattgttcatcaaatcaaaccctattatatctttttaggccctcttaacagaatgtatatgtgtagggtatggtctgtggatctttgggcccactgatcagattagagagaggggtgctatttgaagtagtatacaaaaatgtatgtgcatatttctttttttttttttaattgagacggagtctctgtcgctagcctggagtacagtggcacgatcttggctcacagcaatctccgcctcctgagttcaagtgattctcctgcctcagcctcctgagtagctaggattacaggcacgcaccaacacacccagctaatttttgtatttttagtagagacggggtttcaccatgttggtcaggctggtcttgaactcctgacctcgtgatccacccaccttggcctcccaaagtgctgggattacgggcgtgagccactgcgcccggccgtatgtgcatatttctaggatccatttctatatgtttctcaaaggggtccatgacccaaaggttgaaaaacatcactgagttagttttcttgtagcttccacctcaacgggaaaatttcccctggatctgctcttgactcctagtgtacttcaaacccttcagtccaccacagtctaaaggtcgagggaagggaaatgaaataggattatgtgtggttgcagtaggctttaaattccaaagaatctgaaggtggataggaaagaggactggtgccagacaaatctgacattctaggcctgtctctgtcaacttaaccagctgtggccttgatcaagttagttagtgccttccgcctcgtttcttcatctgtaaagtaaaagctgaagattaaggtcaattatgtaaagtatgtgtgtcacacaaaagtagatgacactattaggaaggaggcttttagatagtccctaactgacttctctgtatcttcctttggctgagacttttttttttttaggttgaagctcgctttctctctctctccctctttctccctctctctctctctctcactctctctctctccatatatatatacatatatatatatatatatattttttttttaacaactggtaggataggttgggcattagccttcttcagtgatttgattgtatacagattgaaatcctttccatttccaaacacttaagagccaaagccaacttgccaacttttcactgtcggttcccttaccttatatctcttggtaataccccccacccccgttccctgattcctggtaaaagctctagttggagagccgaaaggaaaggaaatgatctttcaaaattaaaggtgaacaccttcacttaaactgattaaaattgcagctccaccgtccggcctctagagggcagtgtatggatacatttgtccagattgggggactaggtttgataaattttgtcctgcatcaaatgacaaaagggtaataggaaatgtattatatttatgccccttactttgagataagagactacaaccttcatacttcggggtgttaagctgccattgctcttgttaaggggcagtttgttttttaagagatggggtcttgctctgttgtccaggctggagtgcagtgccgcgatcttggctcagtgcaacctcgaactcctgggcttaagcgatcctcccgcctcagcctcccgagtactgggactacaggcgtgtgccaccaaggggcgattattattttttttttctacgcaaaataaaagacggctattcagtgttgttgtttcatttttgtttggggagaaattcgactagcccaaggaatctcaaattcttggaaccactattttaggcatttctgttatcattcctggaatacgagaactaagcgattgactttgctttccctaaaagataaacagggtagttgtagttgcaacagagtagatagaggtaggtctaccctgggtttaaagtggagatcacagccggggaaaaccggactggatcccgaggcctcctccagggaggggcggcaggggtgtctcaaaatctcccacctgtcagcccaacttttggattccttgtcaccttccacactgcccgagctccggacatacagccctggtgcacaagggtcccattctttgcacaccaggggtataatggactccggactgttggcgagagtgacagcaaaaagagccagcctcttctcccaggcttcttagcaacctgcctgtctcggctccaggaggcgggttccagccaatggttgagccacccgcttccagccaatggctgagggataagctgaggggagtgagaggtcacttactgcagccggacataacggcgctggccccgccccttctcgagaactcgcagagctgggctggtaaaattgcagtgctgaagacactggacccggtaaggagactgggggtggtaaagaagctggggaggaagggctgctgagctgggcagcggagggggccttggtgtccagctgtgctccgaacctcaagggcaacaaaactatcagtacctgcctccactccttctgtctgggtgctcttgagatcgcggggtgttgccgcaagacccttttgtgcctggatgccggacgtatgttcctacctaacgtgcccatggggagtgaggggtcatcacctgcaccaacgggtggcatttctgtattacagcaaaaggctgtccctcccaaacctgggattctgggctcactgagttcacctgcgagtcagccctacctgcactgctctggtctagtayaaacaggctgctggcattgaggtaggtggcagagagagtaatggtcccatggcccaggggcaaggtgaagactgctcctattcccatctctaggtttcctttcctccctacccacgacccacccaccccagcacattggtctccagcatctcatcagcagtttagacatttgtcacccctcctcactttggccctgctgggtcagtgctctctgttcagcaatttgaggaagaaacttgcagggcagagagcagaaaaattaccttccttctccagcctgcccctgacactctggccattaactcctcaatttgctgagctcactacagtggcacagagaagattgaggtggtccgggaccctaggttggggtccagttcccagctgggttcaattttttttagggtgaatggagggagagttggggactgaaaagccttcaaagacaatgttattacagcagtctccccttatccaaagtttccttttcctgagtttcagttagctatggtcaaccgcttggaaaatagttgaacacagtacaataagatattttgaggctgggagtggtggctcatgcctgtaataatcccaggactttgtgagaccaagtttgaaggatcacttgaacccaggagtttgagaccagcctgggcaacatagtaagacctcatctctacaaaaaaaaaaaaaaaaagaccatgcatggtggcacacgcctgtggtccccgctactcaggaggttgaggcaggaggatggcttgagcccagaagtttgatgctatagtgagctgagatcacgccactgcactccagcctgggcagagcaagaccctgtcaggggcagggggaggggaggggaagccggacagtggctcatgcctgtaatcccagcactttgggggctaaggcagcaagaggccaggagttcaagaccagccctgacaacatagactcccatgtctacagaaaaattagccaggcttggtgacacacacttgtagtcccagctgctggggaggctaaggcaggaggatggcttgagcccaagaggttgaagcttcagtgagccatgatcgacacttgctccatcgcccaggctttttttttttttgagacaaggtcttgccctgttgcccaggctggagtacggtggcgccatcataattcattgcagtctcgacctcctggactcaagccatcctctcatctcagcactcctctccccaccaccccggtagctgagactacagacaggcaccaccatgcccagttaatttgtttttttttttctagagacacagtctcactatgttgcccaagctggtcttgaactcctggagtcaagtgatcctccttccttggcctcccaaaattttgggattataggcatgagccaccatgactggccaaaaaaaagtatattttgagagagagaccacattcatataacttttttttgtttttgttttgagacagggtctcgctctctgttgcccaagctgaagtgcagtggcacagtcagctcactctgtaacctcaaactcctgggcttagatcttctcagcctccagagtagatgggaccacaggtgcgctccaccatgcccaactaactttttattttgtagggacggagtctccaactcctggcctctagcagtcctcctgtgtaggtctcccaaagtgctagtgtgtccggaattggtgggttcttggtctcactgacttcaagaatgaagccgcggaccctcgcagtgagtgttacagttcttaaaggcagcgtgtccggagtttgttccttctgatgttcagatgtgtttggagtttcttccttctggtgggttcgtgstcttgctggctcaggagtgaagctgcagaccttcacagtgartgttacagctcataaaggcagtgtggacccgaagagtgagcagcagcaagattcattgtaaagagggaaagaacaaagcttccaccgtgtggaaagggacccaagcgggttgccactgctggcttgggcagcctgcttttgttctcttatctggtgccacccacatcctgctgattggtagagccgagtggtctgttttgacagggtgctgattggtgcgtttacaatccctgagctagacacaaaggttctccacatccccaccagattagctagatacagagtgttgattggtgtattcacaatccctgagctagacataaaggttctccaaggccccaccagagtagctagatacagagtgttgattggtgcattcacaaaccctgagctagacacagggtgctgataggtgtatttacaatccctgagctagacatgaaggttctccacctccccaccagactcaggagcccagctggcttcacccagtggatcccgcactggtgctgcaggtggagctgcctgccagtctcggtgccatgcgcccgcactcctcagcccttgggtggttgatgggactgggtgccgtggagcaggggtcggtgctcctcggggaggcttaggccccacaggagcccacggcgaaggggggctcaggcatggcgggctgcaggtcccgagccctgccccgcggggaggcagctaaggcccggcgagaaatcgagcgcagcgctggtgggccggcactgctgggggacccagtacaccctccgcagctgctggcccaggtggtaagcccctcattgcccggggccggcagggccagccggctgctccgtgtgcggggcctgccaagcccacgcccacccggaactccagctggcccgcaagctccgcgctcagccccggttcccgctcgcacctctccctccacacctccctgcaagctgagggagccgactctggccttggccagcccagaaaggggctcccacagtgcagcggcgagctgaagggctcctcaagtgccgccaaagtgggagcccaggcagaggaggcaccgagagtgagcaagggctgtgaggactgccagcacaatgtcacttctcactaggattataagggtgagccaccacacccagctcttttattacagtataatgttataatttttttctttttctttgttttttttttgagacgtttgagacggagtctcactctgtcgcccaggctggagtgcagtggcgcgatctcggctcactgcaacctccgcctcctgggttcacgccattctcctgtctccggagtagcagggactacaggcgcccgccgccaagcccggctaatttttttttttctatttttagtagagatgaggtttcgccgcgttagccaggatggtttcgatctcctgacatcgtgatctgcccgtctcagcctcccaaagtgctgggattacaggcgtaagccactgcgccgggctaatttttctattttgttattgttgttaatctctcytttttttttttttttttttttttgagatggagtctctctctgttgcccagrctggagagcagtggcgtgatctcagctcactgcaacctccacctcccaggttcaggtgattctcctgcctcagcctcccgagtagctggggttacaggcacgtgtcaccatgcctggcttatttttgaatttttgtagagacaggttttccccattttggccaggctggtctcaaactcctgacctcaggtgatttgcccgcctcagcctcccaaagtgctgggattacagacgtgagccactgcgccgggcattgttgttaatctcttactgtgggtaatttagtaattaaactataagaggtatgtatgtatgggggaaaaaacagtaatatagggtttggtgcaatctgtggtttcaaacatctactgggggtcgtagaacatatccccagtggataagggggtactactgtacttgttgrctcttcatgttagctctgctaggcagatgtcatttcagagawgaggaagcaagttcagaacggcttggaatcttgctcaggaaatcgggctggttaatgaataacaagagatccagtttcacaaacccaaggcattttgcccccagaatctgggcttcttcacccatttaggctgtcactacttttttttcacttttttatccctgtttaagtcagtctgacccacagttgtcctctgctgacttcagaaataataatctggccagtagacatttggtttcggtcctttaggcccttcgccccaggcatcrttctctatggtggacaaagttcagaatggaagatgggagaaaggtgattctgattctagaagcacccatccctcctaccccattccccacccgcattacctgccatcctgtcagcacagtctgtctctgaagtgctccaagttttctctaagggcccatttggactcccactctcaagactcctcacttgcccagaaagctccttgctgaccttctctgtgtcttcctctcacccattcccttaggcctccctaatatcccctcccagggtctccctatcttgatcccagaatcttccttctacaggtctgctacaatgctgctgctgcacagagctgtggtcctcaggctccaacaggcctgcaggtaggccagcccatcccaggacttgcctcctagcccctatctgccacccttagtgtcttttacaatgtcataccttgcaaataagacagttgagagagtgtgtccagggaggacagagaaagccagatcccacttttcccacctatccctggagaaactaagttccaacttaaggaaccaatggccaaccagggagaaagaagtagaccccaagccttcactagccctttcacatgaccatacgtgctactaagaccgacctctcttccagactcaagtcaatcccctcaaggatctgcattcaggcctgctccacaaatgattcatttcagccccagcgccccagcctcaccttctctggtgataactccagcacccagggatggagagtcatggggaccctattaggtctcggtgcagtgttggcctatcaggaccatcggtgtagkgtaagtagggaaagtgcttcattgtcagaacagactgggtgcagtggctcacgcctgttatcccagcactataggaggccaaggtgggtgggtcacttgaggttaggagtttgagaccagcctgggcaacatggcaaaaccccatctctagtaaaaattagccaggtgtggtggtacatacctgtaatctcagctacttgagaggctgagacacaagaatcacttaaacccaggaggctaagtctgcagtgagccaagatcaasatcrggccactgctctccagcctgggtgacagagtgagactccatctcaaaaaaaaaaaaaaaattgtcagaataaaggaatcagtcctagtaaactccacaggcaacccaggctgtgacccatgttcttgtagttaccacagagttcacagtgacgcagtcttcatgcacagtggagatgaaatctgctaatctgctaccttcgcttcccagtggccaacaccgtgggttgggtcagggtgagctcaagtgatttcttcttattcttcttcattttttcttttttttttttttgagatggagtttcactcttgttgcccaggctggagtgcaatggcatgatctcagctcaccacaacctccacctcccgggttcaagtgattctcctgcctcagcctcccaagtagctgggattacaggcatgcaccaccatgcccagctaattttgtatttttagtagagacagggcttctccatgttggtcaagctggtcttgaactcccgaccttatgtgatccgcccacctcggcctcccaaagtgctgggattacagttgtgagtcaccacgcccgaccaagtgatttcttcttaatagtctcttcccttttatcttactccttccctgccaataggctgctcaggagtcaacacacatatacactaaggaggaagtgagttcccacaccagccctgagactgggatctgggtgactctgggctctgaggtctttgatgtcacagaatttgtggacctacatccaggggggccttcaaagctgatgctagcagctgggggtcccctagagcccttctgggccctctatgctgttcacaaccagtcccatgtgcgtgagttactggctcagtacaagattggggagctgaatcctgaagacaaggtagcccccaccgtggagacctctgacccttatgctgatgatcctgtacgtcacccagccctgaaggtcaacagccagcggccctttaatgcagagcctccccctgagctgctgacagaaaactacatcacacccaaccctatcttcttcacccrgaaccatctgcctgtacctaacctggatccagacacctatcgcttacacgtagtaggagcacctgggggtcagtcactgtctctttccctggatgacttgcacaactttcccaggtacgagmtcacagtcactctgcagtgtgmcggcaaccracgctctgagatgactcaggtcaaagaagtaaaaggtctggagtggagaacaggagccatcagcactgcacgctgggctggggcacggctctgtgatgtgttagcccaggctggccaccaactctgtgaaactgaggcccacgtctgctttgagggactggactcagaccctactgggactgcctatggagcatccatccctctggctcgggccatggaccctgaagctgaggtcctgctggcatatgagatgaatgggcagcctytgccacgtgaccacrgcttccctgtgcrtgtggtggttcctggagtggtgggtgccygccatgtcaratggctgggcagagtgagtgtgcagccagaggaaagttacagccactggcracggcgggattasaaaggcttctctccatctgtggactgggagactgtagattttgactctgctccatccattyaggaacttcctgtccagtmvgccatcacagagcccygggatggagagactgtagaatcaggggaggtgaccatcaagggctatgcayggagtggtggtggcagggctgtgatccgggtggatgtgtctctggatgggggcctaacctggcaggtggctaagctggatggagaggaacagcgccccaggaaggcctgggcatggcgtctgtggcagttgaaagcccctgtgccagctggacaaaaggaactgaacattgtttgtaaggctgtggatgatggttacaatgtgcagccagacaccgtggccccaatctggaacctgcgagrtgttctcagcaatgcctggcatcgtgtccatgtctatgtctccccatgagcatggaaaggagccacctccacccctttccccacccattagcctcactgcttcagaaaaatctttcccacctttcaacttcttggatcacaactctggccttcctaagccatacccaagtacacatatagcacatttcacccaaggaccttccctctttggacactatgttacatacccctcttggcctttgaacctgtgccaggaagtgtgagctgttacagcaaggggctagaagtgaaaaaagtaattctggagacaagcactattttctcttcctaccccacctccatttctaatgcctactgccatcaaggccttgttttgcttttctttttggattgttcagagaaatgtgtgtggcatgtgtaagaaaagtgtatatactatcttatactacctctccaggttgccagagagttgcgaggagagcaaggggcacaaccgtctccctttatagttctacttttctaataaatagtctgtttaagatcataactcttgggcctggggagtgagcctattgcaggaggaaggatgcatttgtactgggatgtataatgagattagaccaaaacaaacaaaactggggaggaagacagagaggaagtaggcttgtaggttaagaagtagggcttccggctgagcacagtggctcacgcctgtaatcccagcacttgggaggccaaggcaggtggatcacttgaggtcaggagttcgagaccagcctggccaacatggcaaaacccagtctctaccaaaaatacaaaaattagctgggtgtggtggtgggtgcctgtaatcccagctacttgggaggctgaggcaggagaatcgcttgaaccaaggaggcagaggttgcagtgagccgagatcacacccactacaccccagcctgtgcgacaaagcgagattctgtctcaaaaaaaggggggcttccttctctgaggtttggcagtatctgcagggacacctaggtgattgacctcaggataccatgaagagaggagaggtgacaaaaacatgtaccctccaactcctttccccaacagttccaatgcacttggcaggaaaggcaaagggtgctaggagtttaaaatcaatattgtcttaggaggtcgtgaaagcaaaataaatcttgaggccccagaatcactaagctaaagggaaaagtcaagctgggaactgattagggtaaacctgcctcccattcaaagtcatccctctgctcactgagataaatgcatacctgattgccttctttgagtggaatacaaccatttgcctcttttttttttttttttttgtagagacagagtcttgctctgtcacccagactggagtgcaggagtgcggtggcacgatctccgctcactgcaacctccgtctccggagttcaagcaattctgtctcagcctcccaggtagctgggacgacaggcgcacaccgccacgcccggctaatttcttttgtattttagtagagatgggtttcaccatgttgcccaggctggtctcgaactcctgagctcaggcagtacgtctgcctcggcctcccaaagtgctaggattacaggcgtgagccaccaagcccggcttttttttttttttttttttttttttgagatgaagtctcactctattgctcaggctggagtgcagtggtgcgatctcggctcactgcaacctccgcctcccgggttcaagcgattctcctgcctcagcctcccaagtagctgggactacaggcgcgggccaccacacccggctaattttttatttttagtagagatggggtttcaccatgttggccaggctggtcttgaactcctgacctcaggtgatccgcccgcctcggcctcccaaagtgctgggattacaggcgtgagccactgcgccccgctccatttacctcttatctacctatgacctggaagcctcctcccagcttgagttgtcccgcctttacatatattgattgatgtctcttgtctccctaaaatgtataacaccaagctgtgctccagtcacctagggcacatgtcgtcaggacctcctgaggctgcgttacgggcgtgcgtccctaactttggcaaaattaagttttgccaaaaacttcctaaactgagacctgtctcagatttttgggattcacaaggtacagagggaaaacttggctctagggcctgacgtgccaggccacatcgggcgtccagcgtgtgcttagattgcaaactgggtgcagattaaaggctagtttttgggttaccttcggcagacgatggtgcctttcggatttgaatctttcggcgctcggctactctcccctagctcctctcccattttcccccagcagtctcccgggcttggggacgctcggtgttcggccacgccgcctgtcgcctggtagtgggaccggaagttgttagggggagggggacggctgtgatggggggggatatttgggggggcaagtcccttctcaggtgaagctgctgatggagatggagccgccgccaccgccgcctctgagcgcccgggtcctggctccggcccggcgactgccgccgcctcagtgaccccactccccccgcactgggccgcccgggccagagtgggggacccccgccccctcgcctccctctcccccaacactgtcccctctccccaacccctcacagcctgcgcgcgcgcggagacacctcaggtgagtgaggggcggggcttggtgggggtaaagcgggggcggggcctcggtagccgggggcggggcctgaggggctctggcgtgaaggaggggggagacgtgggcgggggaaggggccaggctgagagagggtcgcgggttgggctggggccggagggttggaagatggccgggggagtttggcccgaggccccagtattaagagcgaggtagcagggactcgggggtcctaaaaaggcgggagacagatcaaggcaaggggccgaggacaggcaggagctgccaggcgcggggctcctccgtggggatgtggcttgggtatacagcagaaggacagcgaggagaaaggagcagcaaagagggtatctgaacaaaaaaagcgagggacccgggtgttgggtcgaggaatgctgaagacaggaatctggggataaagacgtaggcctaggtgagatctgggaggcaatgagcatattgggagaaacatgtagagaagaaacttaggatggagtgagaagtgcacagtgtagggtgagaggtgtagggaacttgggaagcaaggctgggaaagaagagattcactgcttgagagccctaagaaagaaatgcaacagaggaatccccagggcagacatccagacgggagctgcaaacttgggaagcaggctgcctgctcctgtgtaccgaaacagccctccctgtacctcctcacacaaaccccatcccgttattttcttacctcatggctgctagagttgtaggttctcactttttaaattttctatattatttctgtgcctttaaaaaaaattatgactagtcctttctgggaacagtggagtgtttaatggaacgtggacctttcgatatgcttatgaaatattgtaccccaatccccatccaaggtcaagaagttacgaactctgcttccaggaaatttttttttttttttttttttgagacggagtttcactcttgttgcccaggctggggtgcaatggcgcgacctcagctcactgcaacctccatctcccaggttcaagagattctcctgcctcagcctcccaagtagctgggattacaggcacccgccaccacccctggctaattttttgtatttttagtagagatgggggtctcaccatgttggccaggctggtcttgaactcctgacctcaggtgatccacccgcctcagcctcccaaagtgctgggattacaggcatgagccaccgtgcctggccagaaaattttttgcataccttatttcgccccattcccttctctcatgaacaaaactgtctattgttgttactcttgtcaaccctcgcttatatgtctaatagttcctactgtgcctgtctccccagcctgtgccctcgaagcatcaatggtgggcatggtatgttcctgacatgctcacatgtcagctttagatgttccaacgtcatggtcaaccagatgaccattgaagcctgtctccccttactgatacttgctcactttgcctgggtgaagatacatgttcatatccttaaggaagcatgaaaatgttatctgactacctagaatatttccacttaacgataactcagattctgaggacaaggccagataaaaggccaaatcagacaatctttgaaagcatagtgtttcgtttggttggggtgtatggtaatccctcacctccccatggacctgccagtaggtccgtgaatcttgctttatggtttgcaggaggacttcagctttccctactaacagcctaaagccagagaatccagacagacccttgggtcatgagaacagtcagatgagtagctcctgagataaaaataaaatcttaaaagaagaaaatagctttaccattgggaagcaagagaagtttcactggagcttctggggtgggcttcagaatggtgagagctgccctcattttggcagcttcagaattataccttgccctagtcaatagaagttgatgtctcaaacacaaaatataatgtctttgttgcccactgagtgcagttagttagttgaattgtagcttctgggcaatccccttcctctgagtaggttaagggtaaggcatatttcaggacttggctcagaaataagtcctgacttttttccagtgaaaatgcaactgaaagtctctttatgtcctcttagtttgaaatctgcagcttgaacttcccagcatgggagaaacttatcccacctttcaccgtaccccctgcccccccacacacagtagtatccacaaaggaattattttttttccccaactggccatctctctctctgtctctctctctctctcgccacacacacacacaccaaagaaaaagaaagataggtatttctagcctcgttttactctgtaggaacaaataagagtgtgggaccctgtgagtgtggacaatgccacaggcaaagggactccctttctttattggtctgttgactctgctgaagaaagctttgaattccaggctttgatttgcttcctcttcttagaagagttatggactctgttctggaaacagagagataggttcaaagtttatcagacaaaggcatctaagaaagggtagtgctgatatgaatgacctggtccagctgcggggaggatccacattgtaggctctgatgcaatacctatgctggggtagtcctcaagctaagaggccgtttctactttagagacttaatgaccatctagtttggtgttttcctcaggtccattatctctgaaaagagacataggaggaagaggattatttatcctcccatccataagcctgtgtttccagttcaaggatttaggtcagcaagacgcagacccaaaaaccattcatttaataacccaagaaagaaggcaagcagggtggcccaaatcttccaactggggcaagatttaatatagtgttccagtggaaagaatcttctaatggtaacttggactctacatgtcctaattctgttgttaatgagattgatgactctgggcttagtttcttctgttaaaaactaggaaattgtagatcatctctcaactccatttcagctccaggatttctcagttcctggagtacccctgccctagaccctccacatgaagaagagagtcttaccaaattggattatcagagcaagactattagcagagaagcctgaaaacatctttctggcccaaacaacagtgaacttttttgatcagcatgtattagggacttttgggcacaattgcaatcaaaggcaattgttcctgtctcttctacattttttttgctactgtaccctagtcagaatagttcactgagacttccctgtaatttcaaacttcacttgagagtgctaaccctgttttgggcatctttggctttaaaactgattattataaaactcaaattgaatttccctgctctactttctccacccctgcccaaacataccactgaacagcagtgattttgtgaggcctttctataaacagagagctatacttgggggtacacccaaaaaccccaaaaagtatcatctcctatgtatcatatctagtgatttaaagtgtttagtttggcccttttccttagttccttatgtcctgaaatgagacatgggagggataggattgtttcttctcccactcataaaccttagccttctctctcttctgcagtctacatggggaggacagagaagcgcaaagaacaagagaaaagatgcatccatctgagatctaaaaggagacaatgaggtgatattttccccctgcccaggtgttgt

SEQ ID NO: 8905 - DNA, 18017 bp, Homo sapiens
  misc_feature (1)...(18017): n = A,T,C or G, or insertion/deletion polymorphism (see Tables 1-2)
nnnnnnnnnnnnnnnnnnnnnnnnnnntaatcccagaactttgggaggccgaggcgggcggatcacaaggtcaggagatggagactatactggctaacacggtgaaaccctgtctctactaaaaatacaaaaaaaattagccggtcatggtggcaggcgcctgtagtcccagctactcgggaggctgaggcaggagaatggcgtgaacccgggaggcagagcttgcagtgagccgagattgcgccactgcactccagcctgggcgacagagcgagactccgtctcaaaaaagaaaaaaaaaaaaaagtagagaaggaaggggcattccctgagctcactgggcataccagggaacctgagccctaggaataaggacctagaatagagaagtactcaccattgatgatggtattgttgacccagataacctgcccatctggcaataccttttggcttccagggaagttcaaggcaatagagaaggaggcatttgcaccaatcagtgtaggcccatcattactgaccttgagggacacttgaccacctgggaaggaaagctacattagctgggactcctgggcttcccctccctgtatacgtttcccctccttttcttcccaagctacactcgatgcagttcagcttgcttttttcctcatcccactcccaccatgccctcccctggaacttccaagttcctacctctccagcagtcaagtctctgggcttctgtccactctggatacagctgcctgttccaggctttggttctgagttgccttgagacaccaagccagtcctggtttctgggtactaaaaggaatgtgccatgaagggccctaggatcctttcagttccttctcagggataacactctattcatgtcactccattcattctcacattcgaagtgcatttttttttttttttttttgagatggagtttcgctcttgttgcccaggctggagtgcaatggcatgatctcggctcattgcaacctctgtctcctgggttcaagcgattnnnnnnnnnnnnnnnnnnnnnnnnnnnnnnnnnnnnnnnnnnnnnnnnnnnnnnnnnnnnnnnnnnnnnnnnnnnnnnnnnnnnnnnnnnnnnnnnnnnnnnnnnnnnnnnnnnnnnnnnnnnnnnnnnnnnnnnnnnnnnnnnnnnnnnnnnnnnnnnnnnnnnnnnnnnnnnnnnnnnnnnnnnnnnnnnnnnnnnnnnnnnnnnnnnnnnnnnnnnnnnnnnnnnnnnnnnnnnnnnnnnnnnnnnnnnnnnnnnnnnnnnnnnnnnnnnnnnnnnnnnnnnnnnnnnnnnnnnnnnnnnnnnnnnnnnnnnnnnnnnnnnnnnnnnnnnnnnnnnnnnnnnnnnnnnnnnnnnnnnnnnnnnnnnnnnnnnnnnnnnnnnnnnnnnnnnnnnnnnnnnnnnnnnnnnnnnnnnnnnnnnnnnnnnnnnnnnnnnnnnnnnnnnnnnnnnnnnnnnnnnnnnnnnnnnnnnnnnnnnnnnnnnnnnnnnnnnnnnnnnnnnnnnnnnnnnnnnnnnnnnnnnnnnnnnnnnnnnnnnnnnnnnnnnnnnnnnnnnnnnnnnnnnnnnnnnnnnnnnnnnnnnnnnnnnnnnnnnnnnnnnnnnnnnnnnnnnnnnnnnnnnnnnnnnnnnnnnnnnnnnnnnnnnnnnnnnnnnnnnnnnnnnnnnnnnnnnnnnnnnnnnnnnnnnnnnnnnnnnnnnnnnnnnnnnnnnnnnnnnnnnnnnnnnnnnnnnnnnnnnnnnnnnnnnnnnnnnnnnnnnnnnnnnnnnnnnnnnnnnnnnnnnnnnnnnnnnnnnnnnnnnnnnnnnnnnnnnnnnnnnnnnnnnnnnnnnnnnnnnnnnnnnnnnnnnnnnnnnnnnnnnnnnnnnnnnnnnnnnnnnnnnnnnnnnnnnnnnnnnnnnnnnnnnnnnnnnnnnnnnnnnnnnnnnnnnnnnnnnnnnnnnnnnnnnnnnnnnnnnnnnnnnnnnnnnnnnnnnnnnnnnnnnnnnnnnnnnnnnnnnnnnnnnnnnnnnnnnnnnnnnnnnnnnnnnnnnnnnnnnnnnnnnnnnnnnnnnnnnnnnnnnnnnnnnnnnnnnnnnnnnnnnnnnnnnnnnnnnnnnnnnnnnnnnnnnnnnnnnnnnnnnnnnnnnnnnnnnnnnnnnnnnnnnnnnnnnnnnnnnnnnnnnnnnnnnnnnnnnnnnnnnnnnnnnnnnnnnnnnnnnnnnnnnnnnnnnnnnnnnnnnnnnnnnnnnnnnnnnnnnnnnnnnnnnnnnnnnnnnnnnnnnnnnnnnnnnnnnnnnnnnnnnnnnnnnnnnnnnnnnnnnnnnnnnnnnnnnnnnnnnnnnnnnnnnnnnnnnnnnnnnnnnnnnnnnnnnnnnnnnnnnnnnnnnnnnnnnnnnnnnnnnnnnnnnnnnnnnnnnnnnnnnnnnnnnnnnnnnnnnnnnnnnnnnnnnnnnnnnnnnnnnnnnnnnnnnnnnnnnnnnnnnnnnnnnnnnnnnnnnnnnnnnnnnnnnnnnnnnnnnnnnnnnnnnnnnnnnnnnnnnnnnnnnnnacctccatctgccccacccaggtccaacaactatcaacaccttgccacatttgctttgtttatccttactagttgttgtttttgtttttgttttggctaaagtatgtaaaagcaaatcccagacatcgtgttattttaaccctacaaatttaaaatgtatgagtattttcttgcataagcacaatgtcatttcatgctagacaaaattatcaaactcagtccatataaaatttcatgaatatctggaaaaatgtcttatgatttttaaaatcaggatccaaaatataagtacagtctttttgttaagagccttaggtgggtgggtgtgaacagactctttccaggatacattaaggaatatagtaaaagaaaaagacttgaaactgcagcacagcgaggaaagtcacatcaaggagaacttcctagaaatctgtgacactaaacatctagggagaaagcagggctgggatataatgtatgtatttcagcacagcagaaactaccctcaccccatttttccctttcctgcagaaacctctctcccctccccttccctcccctctcctctcctttctgtatatagttcagcacagcaaaaactaccctcaccccatttttccctttcctgcagaaacttccttccctttcctttccctttcccctttcctttccttttgatacagggttttgctctctcaccctgcgtgcagtggcacgttcatcactcactgcagcctcaaactcctaggctgaagccatcttcctcattagcctcccaagtggctaggaccacaggtgctcaccaccaagcctggctaattttttttttttttttttttgagacagagtttcgctcttgttgcccaggctggaaggctggagtacaatggcacgatctcagcttactacaacctccgcctcccgggttcaagcgattctcctgcctcagcctcctgagtggctgggattacaggcatgcaccaccacgcccagctaattttgtatttttagtagagactgggtttctctatgttggtcaggctggtctcaaactcccaacttcagctgatccacctgccttggtctcgcaaagtgctgggattacaggcgtgagccaccaagcctggcctaggcctggctaatttttttacgtttcgtagagacaaggtctcactatgttgctcaggctggtcttgaactcctgggctcaagcaatcctatgaccacggcctcccaaagtgctgggattacaggtgtgagccactacacccggcctccttatctcttttcttttcttttctttttttatttttttgagacagagtcttgctgttgcccaggctggaatgcaatggtgtgatctcggctcactgcaacctctgcctcccaggttcaagcgattctcatgcctcggcctcccaagtagttgggattacaggtgcgtaccaccatgcccagctaatttttgtatttttagtagagatggagtttcaccatattggccaggctggtctgacctcaagtgatccacccgtctcagcctctcaaagtgctaggattacaggcatgagttactgtgccgggcctcatccctttctttttttttttttttttgagacggagactcgctctgtcacccaggctggagtgcattggtgtgatcttggctcactgcaacctctgccttctgggttcaagtgattctccagcctcagccttctgagtagctgggactacaggcatgtgccaccatgcccagctaatttttgtacttttagtagagacgggggtttcaccatattggccaggctggtctcgaactcctgacctcgtgatccacctgcttcagcctcccaaagtgctgggattacaggcgtgagccacggcgcccggcctcattccctttctaatgtgtgctgtaaccctagttgattctgctgggggaggatctggaatcatctattgagcatcccaccactagaacaagagaagtcataagataccccattctttctccacttccaactctcctcagagcagcacgggacattccagaccctctcaccaccccacccccgccccttgctcctgtcacgaggcccaatcccccagagccctttcatgtgatgctcagctgagacccctctgcctatctctccagccccagaacaaaaggtctgggctgtgttcacccgtacccatcccaagaggagaggattgtatctccttagtgttcttacccaataccacattctctgactccccactttaaatctcctaccccaagagacgtttcctaaaagagtctcctgcacatttcacccctttggagcccgtgctccagctcactgccaaggaagcctcagaatcagtgccacagagaccttctatccttctgcccctccaagcatatgagattattttcaggcaaaatcccaaatctccatgtagggagggagcccaggtgcccacatcctcactaaatcaaatgagtgggagacgcctgaaatattgccgctatctcccattaggaggacagaaaccagagcagggggaattcatccccaagttcacacctgctcatgtccacatatccacacataccttttgtagcccccacagccagcaaagcacctatcacagccaaatgaagaaggcatctttttagcaccagatccattgtgttcttccctccagcaaccaaaggcactggggggactgggataggcccctatataagaaaagggtgctcatttgcatagcccttcctcttctccctcagagaaggcctgggaggggccggaggagaggaaaaaggaaaaactgacaaagggatcctggtccctagacattgctttcccatcctgctactcaatgacagtttctggtttcactgggtcactctcatcttgatgcactcccgggcaagagctaactgaaaggcagctgcgtaacacataccagacacaacagtttatcatgggagagtgaattaaaccaggaacttctcaaaaagacagaaacagaaccctgcatcccaaaacagagacagtgtcggggtatgctatgaggcagaggcaacgactcctctgaggcccaggattcctttgcaacgagattcccggcttcctggtttccaaaggaggctcctgggccaggtggaatttaaccttaggtcgatacatattttccccaggattggtgaaaatagtgagttagaaatcaagaaatccctacagactagagacataggtaggaaacttggacccaaagcaggtacttgggaagagtgttcagccgccccaccggggaagaaacttgtctagcccccaagaaccaaacttgcctggggcgggatcatttgcggggaggagcgctgggctcgccccccggctctgacgttgaccaatagaaaggcctgggggcggagccagggaaacgcgggaagcaggggcggggcctctggtggcggtcgggaactcggtgggaggcggcaacattgtttcaagttggccaaattgacaagagcgagaggtatactgcgttccatcccgacccggggccacggtactgggccctgtttccccctcctcggcccccgagagccagggtccgccttctgcagggttcccaggccccmgctccagggccgggctgacccgactcgctggcgcttcatggagaacttccaaaaggtggaaaagatcggagagggcacgtmcggagttgtgtacaaagccagaaacaagttgacgggagargtggtggcgcttaagaaaatccgcctggacacgtgagtggcctctgtacccgggactcctaactggggacctccttgattgtcccccccaaccccccacgggcgggtagccgtccagggaccggaagagagcagggagggacttctttagaagtggagaggtgggttgggggccagtagaaggtgaagagtatacttatactccctggggagagtatagggtggtgtggaatccatggaaaactttcttcccaaactgagccggatcgtgcccccaaatgtgcgactacagactcggggagagaaaggaggtctctgagatgaggtccaagactctccatggagtggagttatgtgggaaccggcgagaatcgcctttctgaatgaagagccctcttcactgccccaccctcaccttagaattctctcctctttccaaagaatggcagttgaacctcactggcccctctggggaggctgggggctactcctgcaytttttcccctccattacagtctccctgcttcaccttcaccaggmggctttacttacctacccctgggaaaagaggagataatggccttaatatatccaaaaaycacaccctgactacccaagaattagctcttaccatcaccctttctcttctctcactttcctagggggtgctgggtggtgtctccttgggggaaagaaatgactaggtgggggggaaaggaatatttgtaaccatattcccatctctgctttcccaacctctccaagtgagactgagggtgtgcccagtactgccatccgagagatctctctgcttaaggagcttaaccatcctaatattgtcaagtaagtatgcgtctgagaggtgatccagctggaaaggaggataagttctgtctgtacagtgtgggcatttctctctctcacacacctccatttcctcaaactttccttctctaggctgctggatgtcattcacacagaaaataaactctacctggtttttgaatttctgcaccaagatctcaagaaattcatggatgcctctgctctcactggcattcctcttcccctcatcaaggtaatgcttctcatcagctcctctcatcatgggcatgtcttgggggactggtggcaggcaattcagggtgatattttatgattttggcctccttctgagccctcatctcctatacacacacactccccttctttttgtgtctccttccctgctcattatattcattaaccctagggttggactgaacaatcaaagttgaaactctagtgagtcaacctagcaactcaggtgggaggtcagatgaaactcagataaacgggatttgagagcacttggtaaattcctccaaaaagcccttccatttggtggaagacctagctagtgagtccctattgtctattttagggctggattcttcactcccagagctactttcaatctattaacaaacattttttyaatgcacaggatgtagaaaagggatggaaaattgagtaagacttggtccttatcctctctgggctgacagtccattgggagaaatagcttgtaaatatgtaactataatccaacataataaaggctttagtagagttttaggggcacagagcaaacccagtctgctcactgtaatggagaaacacagtcctctctttctcctttgtcagagctatctgttccagctgctccagggcctagctttctgccattctcatcgggtcctccaccgagaccttaaacctcagaatctgcttattaacacagagggggccatcaagctagcagactttggactagccagagcttttggagtccctgttcgtacttacacccatgaggtgagtccctttatgtcttttttctctgagcttcccaagaggtgttaactagggtattcacaaagttactaaaaatatctggctaacagtttcttactaggtagaaataatctcttgacatcctaaagagtcttagggtatgcatggaattcatactgtgttgctaactgggcccacacctgtaataccaatactttgggaggctgaggtrggaggatcacttgagcccaggagttcgagaccatcatgggcaacatarcgagacmccatctctacaaatctacaaaaagaaaaaatttagaaataaaattatgaccaatttgtctcaagtttttccaggaagatctcaaattaggggttcagtccagaactatggactggaaatcagtgggaggggaaagatgatggagggaaggaaactgcttgttaagaggccaagagtaagcagagtagtgttgaggaactgagatgcgggaatttccataccctataaaccaccccgcccctccctattcccgtccctcaggtggtgaccctgtggtaccgagctcctgaaatcctcctgggctgcaaatattattccacagctgtggacatctggagcctgggctgcatctttgctgaratggtatggaggcttgcccaagttccacccagccccctccctctcctccccacatccaagaacaacagaactgcttcttggcccagacctatggcccttctatcacagggttctctctctaaagtagcaccaaggggaatggtgggaaaggatgcaactgttgccctgatatcaaccacagtgttaggatatcctcaaacagccttagtacctggtatacatctcttatccctgaaataagttaaagcatttctgcagctgttttagctgtagtctgcatatatttgggagaatgattccatttagtgmctcttttatttcaggccttcatttcaaggcttgtagaccttgttgtatggtgccagcaatgtagtgaagacaactgtggtcactttacccacacctttcatttaaactgcagatttaggcagggtgcagtggctcacacctataataccagcactttgggaggctgaggtaggtggatcacctgaggtcaggagtttgagaccagcctggccaacatgttaaaaccctgtctctactaaaaatacaaaaattagccaggtgtggctacttgggattacacacctgtaatcccagctacttgggaggccaaggcaggagaatcggttgaacccgggagatggaggttgcagtgaccaagattgcaccactgcactccagcctgggcgacagaatgagattccatctcaaaaaaaaaaaaaaaaaaaaaaaaaaaaagatttagatcatgttccccttcaacctctggcttttcagactgaaggatccttgaagcctggctttatgtagaagctcccatctcctttaatataacagtacagtggtgcagtaggctgtcttcaaatcagcaatatgttttattgtcttttatcttggttgtaaccaagagcttaaagaccattagcctatacatatgtaatgtgcatttatccccccrgtgcattaccttacaattgtccrtattcctctctcaattcatcaaaaaatatttgttaagcacctagtgggtacccagcaccatgctaggtgctgtggggaacacagaagaaatggaagacagagtctctgcccgctgtgctcgtatctagaagtggctgcatcacaaggttgggggatgaccgcagtgtctaccccctaccccgtgagtggcttgggatacctttgctacatgtcagtggcaccccagacattcaccccctcccagacccacccagccttggggatctgcaaagccatggttgggggaaggaaggagggggcraggagacagatgaaggaacttcattgtctcaggttctgtgtgactgaccccatgaaaggccctggggagggagtcatggggccctgctgacyttttactgtctgtgggaactcctttgtatagaggagagttttgactgacgtcaacgtgggtcttggtatttcctctttccccattttcaggtgactcgccgggccctattccctggagattctgagattgaccagctcttccggatctttcggactctggggaccccagatgaggtggtgtggccaggagttacttctatgcctgattacaagccaagtttccccaagtgggcccggcaagattttagtaaagttgtacctcccctggatgaagatggacggagcttgttatcggtgagagtgggcacctgttttccctcattcatttctcccagggaagggcttttccaggatgaaggaaggatgagaccctgaaatctgggcctcagtgtttcatttccctggttcctgctctccctgttggcacactgattcagctatgggaggatggaagtgagaattctgccttgggtagaaggagttctggtttcctgatttctgggaacacctgctgcccatttagtccactatcacatcattgaagtcarcatgcatctctccctctagcaaatgctgcactacgaccctaacaagcggatttcggccaaggcagccctggctcaccctttcttccaggatgtgascaagccagtaccccatcttcgactctgatagccttcttgaagcccccagccctaatctcaccctctcctccagtgtgggcttgaccaggcttggccttgggctatttggactcaggtgggccctctgaacttgccttaaacactcaccttctagtcttggccagccaactctgggaatacaggggtgaaaggggggaaccagtgaaaatgaaaggaagtttcagtattagatgcacttaagttagcctccaccaccctttcccccttctcttagttattgctgaagagggttggtataaaaataattttaaaaaagcmttcctacacgttagatttgccgtaccaatctctgaatgccccataattattatttccagtgtttgggatgaccaggatcccaagcctcctgctgccacaatgtttataaaggccaaatgatagcgggggctaagttggtgcttttgagaaccaagtaaaacaaaaccactgggaggagtctattttaaagaattcggttgaaaaaatagatccaatcagtttataccctagttagtgttttgcctcacctaataggctgggagactgaagactcagcccrggtggggctgcagaaaaatgattggccccagtccccttgtttgtcccttctacaggcatgaggaatctgggaggccctgagacagggattgtgcttcattccaatctattgcttcaccatggccttatgaggcaggtgagagatgtttgaatttttctcttccttttagtattyttagttsttcagttgccaaggatccctgatcccattttcctctgacgtccacctcctaccccataggagttagaagttagggtttaggcatcattttgagaatgctgacactttttcagggctgtgattgagtgagggcatgggtaaaaatatttctttaaaagaaggatgaacaattatatttatatttcaggttatatccaatagtagagttggctttttttttttttttttggtcatagtgggtggatttgttgccatgtgcaccttggggttttgtaatgacagtgctaaaaaaaaaaagcattttttttttatgatttgtctctgtcacccttgtccttgagtgctcttgctattaacgttatttgtaatttagtttgtagctcattaaaaaaatgtgcctagttttatagttcatctctttcctcctcttatttactgaaagaatggtgggagacagaatatgaatgtgtgtatgtgatcattgatttcagaccccttttcctaatctctctgtgcatggctgcccaccccaccccattttggctagtgctgacggtgaacaaagtggttattatcatccctatttatggctggggaaactgaagcctatatacttcctacttcactttctccacacaccagcaaacctcctttcccccagccaacataccacacacacaccacaccacacacacatcatatacacacatataccacacacaccacgtatacatataccaaatacacacacaccacatacacaccatatatgcacacacaccccatacatacacacacccatgcacatacatagcggcaggaagagggctcccggggaatttgcctttcgacactgcatttcccagtaagcccgccgtttttcctttctgtttcatatcacagacagaaaagttttccaaagattcttttatttacatttacatacgattctgaaaaagcgtctccaagctaccacttcttgtagttgccattgtctcattccaccaaaaaacatctcagaccgcccgcggccaccccaaatacgcctgtccactgaagcctcactaaaaggaggaagcgctgatgtcagggttacttaaattcccaggctccggatccctagaagaggtatttccctttacgcccgcgaatttgtcatagaaggcagggcactagagccagccccagccaagtccagggggaggggcgaaggtcagtagcggccttcctaaggcttccttcaacccctccttgcctgccagtcaagtaccgtattttcgcagtactggttaaagtttcactttgacccgcctccatcactcacctgattagatgtttatgagtcaaaaggcggggtcatggggtgtcgagattttattggtggatacatacgcctgtcggcagtgtaccgccccctgtcttcaggagcttgctctttaatggctccttacctcgtccatcttcgaggtttctccctcgctattggcttgtggccccgcctgtcgcgtcccttgctcgtacttgttggtgacagcgcccaaagagactcgcctttctccagaggattggtggatgagtgcacatatagcccaccctcgaaggtaggcgggtaatcgagctattggctggagccccgccccagggcgaggaggagaaggaggggcaggagggtttggttgagctgcagctgtttgtctgttcgacacaggcttggggccgacgggggagacggagccccaggtaccgagctgatggagcccaaagggcaggggcggaagcgcccgggagatgagagcagcctggcctgagagcggaggcgggtctggtcctaagcgaggggttagagtggcccaccggagaggggagaagggggccgggccccggcaggcctaatgggggtcgctgaggaggggactgggcggcctgggaccccgaagttggtgagtcgggaaggcggctgggctgtggcggcggccaggccgagggccgggggctggaggcctggagcttgagtgagggcaggggcaggcctcattaagcagcgctgaagagggaggagctggggaaaggaacagggcagcgggtgaggtaagcccatttgccgggaggtgaggagggtcagacctgtcgcccgagccccgggggtgactggggctgggtccctgcagagaggttcattggaagggcctgagaagggttcttagttgggtaagaagcgttcttttcagggaaagtgcctattgtaaaaagaactgagggtgctatggtgttgagctgagagagatttgggttcagtgagggagaactggggaaaatgaagaaggctgtattaatctagaagactaaggtagttgaagtaatggaagcagggcctggtatcagttatgggaacttctgggaatgctgaagggtgggctgggggctctgggtcttgggagtacacactcttttgttccctttagtgtttagatgtggtaatttgaagctttttaaaactcccagggtagggatgaagatcaaagtaatttttttttttccatgactgttggctgctccaaactcagcccctacactttctgttggcctcatagctggtctatactgcagtctgtttcttaacttactgtttcatgtcctatgaaagagctaagaagttggattgggggcatgttttgtccacttctttcccacttaataatgtggtctatagcaaataccatgtctcctagaactgagaatctatttcatatctatttcattatctacatgggaaaggggcttagagatcctcagccatcaggagatcttctgatcatagttggtgaaacttttgtgggacttagacttgacttgggtatttcccaggcaggtaatggagttaacaggtccgaaactatgcggtgatatcactgaggaagagatttggggaagagtgagaaattccatttcaaaagcttggcatcaccccttgttctttgtctacttcaaaagcccagatttctgtgctgttagaaagttgggtcaaactatgaagtatctggggaagatggtgagtagagaaaaagatacagaggtgcagtagcccacgcctgtaatcccagcactttgggaggctgagacaggaggatcacttgagcccgggagttcgagggtgcagtgagccatgatcttcccactgcactccagcctgggcaacagaatgagaccctgtctccaaaaaaaaaaaagacaaagattgccaaagcagaggagtggagtaccctcctccccacatatttttaatggtctgctagccttcttagtccctcatagattggagcctattggattttcccttactgtacttcctccttttctgcgtctctaccaatatattttatcactacatttcttttttttttttttttttttttgagacggagtctcactgcaacctccacctcccaggttcaagagattctcctgcctcagcctcccaagtagctgggactacaggcgtgcgccaccacgcccagctaatttttgtatttttagtagagacagggttttaccatgttggccaggatggtctcaatctcttgacctcatgatccgcccacctcggcctcccaaagtgctgggattacaggcgtgagccaccacacccggccatcactacatttcttaattacaaaagttaatatgtacatattttaaaatatggaaggtgtacagcagtttaagaagtgtaaatcctcccacacataccttattcatatttcatttaggaaggtcaaggatcagagacagcaaatcagactaatcttgctttgctttgggggatgtgtcacaaaaggcaattgtgttttcatgttctcatcaaactctagtcttattctttctacagttttcccttctgggatgatactctgttatttattgtgttcctttcacagttcattttgtcttctaccaagtccgacaagcagagggctgtactgtgtgttattcaccttgagtacacacaaacacacacaccccaagttgtgtgctgggtgtcctaggaagtgcccaaagagatggaacaaaactttatggggagaaaggatcattttggttgggataattgttggcatctctgctaaagaaaggaatttcagacccttatctcaaattcatggtctctggatgttcatggtctctgcatgttcacattacttgactatccctttcttatccatgatgatgatggttctcctaagaggcccctgtatttgtctttcttttcttttcttctatttttagagacagggtcttgctttgtcacttaggctggagtacagtgtgtgtctttctgtagggatctgagaagctccaagcttatctggatttgaaatcggttttcctctaaatctcagagtcagagtacagctggggcatttcatactaccaccttattaattgaatttgtccttactagctttaaaagccctctgttgtacccagcctttgtacagcgcccattggaaacctcggttttttcccccaaggaacttttctcacctgcaagccagtcctagagacagttgtgtaggagtatgtgtgtgtgtttttagacggagtttcacttttgtcacccaggctggagtgcagtggcatgatctcggctcactgcaacgtctgcctcctaggttcacgcgattctcctgcctcagcctccagagtagctgggattacaggcgtgcaccaccacgaccagctaatttttgtattattagtagagacgggatttgaccatgttggccaggctggactctaactcctgacctcaggtgatccacgtgcctcagcctcccaaagcactgggattacaggagtgagccaccgcgcctggccgtgtgtgcgtgtgtgtgtgtgtgttttaatcctatctaatttttccaacagttttttgcatcctaagagagtttaggagtagaattatcaataaggaatttcatacatagacctggagttgcaaaaatatatttggagaagagagctttcccattgcccttcaagtcatacctcatatcttttaaaatttttttcctggacaatccctactgcataacatacctcatatcttctaactcttactttacctgggagcaaatattgcttattggtatgaattttacttctgagaaggaggcatagggtagaagaagcaagcgtatagtttgctccctaatcctaaagcatttcagattggaaggtaaccaaagtgtgagacaatgaacttataataaggaaatgcagcagccctcttggaggaaggataccataaaaccctacatggtatactcccacttccgttttgggaaagatttagccattgactcaacagtaactgaactgaataaggagctacccaggtgaacaaagtatgtgtacatttctgggcaaggttgtagcttctgttcagggacagtgggtaccttttcagagtgtctcctggttctgtggtgttatggctcctttttttaaacttgtgtttctcaagtcaggaattaatagatagtggcccaaagcttttgaccgttcaacatcaactgaaaattcagcgaactttgtttttagctatagttgcctcagtgtttgggtgggagggccacatattgggtgtgattaggccatctgaggcatagtaacgggtgacaggaaaagcagttagcccatgcgagttgcaatagtaccttgtgggcaagatcccaagggggccctccatccaagggagatcacagaggagccagggagagaattgattctgaggcctattaaaaatattcccaaatggggccgtgtgcggtggcatgcgcctgtaatcccagcactttgggaggctgaggcgggtggatcacgaggtcaggagattgagaccatcctggctaacacggtgaaaccccgtctctactaaacaaaatacaaaaaattagctgggcgtggtggtgggcgcctgtagtcccccagcttctcgggaggctgaagcaggagaatggcgtgaacctgggaggcagagcttgcagtgagccgagatcgcgtcactgcactccagcctgggcgactgagcaagactccgtctcaggaaaaaaaaaaaagaacccaaatggaattgagtaagatctgtccagatggtacagaaagggaggagttgattgggggagagaagtagaattacttagccttaatttagggagcatttaatgagcacctactagggatcaggcagcatgctgtgctctgaagattttaagataaactcccacttttaaagaagttcatagtttagcagagcagacagacacaatttatatactgtgataatgtgatacatactattatagaaatacagtctttttttttttttttgagacggattcttgctttgctgtccag

SEQ ID NO: 8906 - DNA, 42182 bp, Homo sapiens
  misc_feature (1)...(42182): n = A,T,C or G, or insertion/deletion polymorphism (see Tables 1-2)
ttggaatcttgctcaggaaatcgggctggttaatgaataacaagagatccagtttcacaaacccaaggcattttgcccccagaatctgggcttcttcacccatttaggctgtcactacttttttttcacttttttatccctgtttaagtcagtctgacccacagttgtcctctgctgacttcagaaataataatctggccagtagacatttggtttcggtcctttaggcccttcgccccaggcatcgttctctatggtggacaaagttcagaatggaagatgggagaaaggtgattctgattctagaagcacccatccctcctaccccattccccacccgcattacctgccatcctgtcagcacagtctgtctctgaagtgctccaagttttctctaagggcccatttggactcccactctcaagactcctcacttgcccagaaagctccttgctgaccttctctgtgtcttcctctcacccattcccttaggcctccctaatatcccctcccagggtctccctatcttgatcccagaatcttccttctacaggtctgctacaatgctgctgctgcacagagctgtggtcctcaggctccaacaggcctgcaggtaggccagcccatcccaggacttgcctcctagcccctatctgccacccttagtgtcttttacaatgtcataccttgcaaataagacagttgagagagtgtgtccagggaggacagagaaagccagatcccacttttcccacctatccctggagaaactaagttccaacttaaggaaccaatggccaaccagggagaaagaagtagaccccaagccttcactagccctttcacatgaccatacgtgctactaagaccgacctctcttccagactcaagtcaatcccctcaaggatctgcattcaggcctgctccacaaatgattcatttcagccccagcgccccagcctcaccttctctggtgataactccagcacccagggatggagagtcatggggaccctattaggtctcggtgcagtgttggcctatcaggaccatcggtgtagggtaagtagggaaagtgcttcattgtcagaacagactgggtgcagtggctcacgcctgttatcccagcactataggaggccaaggtgggtgggtcacttgaggttaggagtttgagaccagcctgggcaacatggcaaaaccccatctctagtaaaaattagccaggtgtggtggtacatacctgtaatctcagctacttgagaggctgagacacaagaatcacttaaacccaggaggctaagtctgcagtgagccaagatcaagatcgggccactgctctccagcctgggtgacagagtgagactccatctcaaaaaaaaaaaaaaaattgtcagaataaaggaatcagtcctagtaaactccacaggcaacccaggctgtgacccatgttcttgtagttaccacagagttcacagtgacgcagtcttcatgcacagtggagatgaaatctgctaatctgctaccttcgcttcccagtggccaacaccgtgggttgggtcagggtgagctcaagtgatttcttcttattcttcttcattttttcttttttttttttttgagatggagtttcactcttgttgcccaggctggagtgcaatggcatgatctcagctcaccacaacctccacctcccgggttcaagtgattctcctgcctcagcctcccaagtagctgggattacaggcatgcaccaccatgcccagctaattttgtatttttagtagagacagggcttctccatgttggtcaagctggtcttgaactcccgaccttatgtgatccgcccacctcggcctcccaaagtgctgggattacagttgtgagtcaccacgcccgaccaagtgatttcttcttaatagtctcttcccttttatcttactccttccctgccaataggctgctcaggagtcaacacacatatacactaaggaggaagtgagttcccacaccagccctgagactgggatctgggtgactctgggctctgaggtctttgatgtcacagaatttgtggacctacatccaggggggccttcaaagctgatgctagcagctgggggtcccctagagcccttctgggccctctatgctgttcacaaccagtcccatgtgcgtgagttactggctcagtacaagattggggagctgaatcctgaagacaaggtagcccccaccgtggagacctctgacccttatgctgatgatcctgtacgtcacccagccctgaaggtcaacagccagcggccctttaatgcagagcctccccctgagctgctgacagaaaactacatcacacccaaccctatcttcttcacccggaaccatctgcctgtacctaacctggatccagacacctatcgcttacacgtagtaggagcacctgggggtcagtcactgtctctttccctggatgacttgcacaactttcccaggtacgagatcacagtcactctgcagtgtgccggcaaccgacgctctgagatgactcaggtcaaagaagtaaaaggtctggagtggagaacaggagccatcagcactgcacgctgggctggggcacggctctgtgatgtgttagcccaggctggccaccaactctgtgaaactgaggcccacgtctgctttgagggactggactcagaccctactgggactgcctatggagcatccatccctctggctcgggccatggaccctgaagctgaggtcctgctggcatatgagatgaatgggcagcctctgccacgtgaccacggcttccctgtgcgtgtggtggttcctggagtggtgggtgcccgccatgtcaaatggctgggcagagtgagtgtgcagccagaggaaagttacagccactggcaacggcgggattacaaaggcttctctccatctgtggactgggagactgtagattttgactctgctccatccattcaggaacttcctgtccagtccgccatcacagagccccgggatggagagactgtagaatcaggggaggtgaccatcaagggctatgcatggagtggtggtggcagggctgtgatccgggtggatgtgtctctggatgggggcctaacctggcaggtggctaagctggatggagaggaacagcgccccaggaaggcctgggcatggcgtctgtggcagttgaaagcccctgtgccagctggacaaaaggaactgaacattgtttgtaaggctgtggatgatggttacaatgtgcagccagacaccgtggccccaatctggaacctgcgaggtgttctcagcaatgcctggcatcgtgtccatgtctatgtctccccatgagcatggaaaggagccacctccacccctttccccacccattagcctcactgcttcagaaaaatctttcccacctttcaacttcttggatcacaactctggccttcctaagccatacccaagtacacatatagcacatttcacccaaggaccttccctctttggacactatgttacatacccctcttggcctttgaacctgtgccaggaagtgtgagctgttacagcaaggggctagaagtgaaaaaagtaattctggagacaagcactattttctcttcctaccccacctccatttctaatgcctactgccatcaaggccttgttttgcttttctttttggattgttcagagaaatgtgtgtggcatgtgtaagaaaagtgtatatactatcttatactacctctccaggttgccagagagttgcgaggagagcaaggggcacaaccgtctccctttatagttctacttttctaataaatagtctgtttaagatcataactcttgggcctggggagtgagcctattgcaggaggaaggatgcatttgtactgggatgtataatgagattagaccaaaacaaacaaaactggggaggaagacagagaggaagtaggcttgtaggttaagaagtagggcttccggctgagcacagtggctcacgcctgtaatcccagcacttgggaggccaaggcaggtggatcacttgaggtcaggagttcgagaccagcctggccaacatggcaaaacccagtctctaccaaaaatacaaaaattagctgggtgtggtggtgggtgcctgtaatcccagctacttgggaggctgaggcaggagaatcgcttgaaccaaggaggcagaggttgcagtgagccgagatcacacccactacaccccagcctgtgcgacaaagcgagattctgtctcaaaaaaaggggggcttccttctctgaggtttggcagtatctgcagggacacctaggtgattgacctcaggataccatgaagagaggagaggtgacaaaaacatgtaccctccaactcctttccccaacagttccaatgcacttggcaggaaaggcaaagggtgctaggagtttaaaatcaatattgtcttaggaggtcgtgaaagcaaaataaatcttgaggccccagaatcactaagctaaagggaaaagtcaagctgggaactgattagggtaaacctgcctcccattcaaagtcatccctctgctcactgagataaatgcatacctgattgccttctttgagtggaatacaaccatttgcctcttttttttttttttttttgtagagacagagtcttgctctgtcacccagactggagtgcaggagtgcggtggcacgatctccgctcactgcaacctccgtctccggagttcaagcaattctgtctcagcctcccaggtagctgggacgacaggcgcacaccgccacgcccggctaatttcttttgtattttagtagagatgggtttcaccatgttgcccaggctggtctcgaactcctgagctcaggcagtacgtctgcctcggcctcccaaagtgctaggattacaggcgtgagccaccaagcccggcttttttttttttttttttttttttttgagatgaagtctcactctattgctcaggctggagtgcagtggtgcgatctcggctcactgcaacctccgcctcccgggttcaagcgattctcctgcctcagcctcccaagtagctgggactacaggcgcgggccaccacacccggctaattttttatttttagtagagatggggtttcaccatgttggccaggctggtcttgaactcctgacctcaggtgatccgcccgcctcggcctcccaaagtgctgggattacaggcgtgagccactgcgccccgctccatttacctcttatctacctatgacctggaagcctcctcccagcttgagttgtcccgcctttacatatattgattgatgtctcttgtctccctaaaatgtataacaccaagctgtgctccagtcacctagggcacatgtcgtcaggacctcctgaggctgcgttacgggcgtgcgtccctaactttggcaaaattaagttttgccaaaaacttcctaaactgagacctgtctcagatttttgggattcacaaggtacagagggaaaacttggctctagggcctgacgtgccaggccacatcgggcgtccagcgtgtgcttagattgcaaactgggtgcagattaaaggctagtttttgggttaccttcggcagacgatggtgcctttcggatttgaatctttcggcgctcggctactctcccctagctcctctcccattttcccccagcagtctcccgggcttggggacgctcggtgttcggccacgccgcctgtcgcctggtagtgggaccggaagttgttagggggagggggacggctgtgatggggggggatatttgggggggcaagtcccttctcaggtgaagctgctgatggagatggagccgccgccaccgccgcctctgagcgcccgggtcctggctccggcccggcgactgccgccgcctcagtgaccccactccccccgcactgggccgcccgggccagagtgggggacccccgccccctcgcctccctctcccccaacactgtcccctctccccaacccctcacagcctgcgcgcgcgcggagacacctcaggtgagtgaggggcggggcttggtgggggtaaagcgggggcggggcctcggtagccgggggcggggcctgaggggctctggcgtgaaggaggggggagacgtgggcgggggaaggggccaggctgagagagggtcgcgggttgggctggggccggagggttggaagatggccgggggagtttggcccgaggccccagtattaagagcgaggtagcagggactcgggggtcctaaaaaggcgggagacagatcaaggcaaggggccgaggacaggcaggagctgccaggcgcggggctcctccgtggggatgtggcttgggtatacagcagaaggacagcgaggagaaaggagcagcaaagagggtatctgaacaaaaaaagcgagggacccgggtgttgggtcgaggaatgctgaagacaggaatctggggataaagacgtaggcctaggtgagatctgggaggcaatgagcatattgggagaaacatgtagagaagaaacttaggatggagtgagaagtgcacagtgtagggtgagaggtgtagggaacttgggaagcaaggctgggaaagaagagattcactgcttgagagccctaagaaagaaatgcaacagaggaatccccagggcagacatccagacgggagctgcaaacttgggaagcaggctgcctgctcctgtgtaccraaacagccctccctgtacctcctcacacaaaccccatcccgttattttcttacctcatggctgctagagttgtaggttctcactttttaaattttctatattatttctgtgcctttaaaaaaaattatgactagtcctttctgggaacagtggagtgtttaatggaacgtggacctttcgatatgcttatgaaatattgtaccccaatccccatccaaggtcaagaagttacgaactctgcttccaggaaatttttttttttttttttttttgagacggagtttcactcttgttgcccaggctggggtgcaatggcgcgacctcagctcactgcaacctccatctcccaggttcaagagattctcctgcctcagcctcccaagtagctgggattacaggcacccgccaccacccctggctaattttttgtatttttagtagagatgggggtctcaccatgttggccaggctggtcttgaactcctgacctcaggtgatccacccgcctcagcctcccaaagtgctgggattacaggcatgagccaccgtgcctggccagaaaattttttgcataccttatttcrccccattcccttctctcatgaacaaaactgtctattgttgttactcttgtcaaccctcgcttatatgtctaatagttcctactgtgcctgtctccccagcctgtgccctcgaagcatcaatggtgggcatggtatgttcctgacatgctcacatgtcagctttagatgttccaacgtcatggtcaaccagatgaccattgaagcctgtctccccttactgatacttgctcactttgcctgggtgaagatacatgttcatatccttaaggaagcatgaaaatgttatctgactacctagaatatttccacttaacgataactcagattctgaggacaaggccagataaaaggccaaatcagacaatctttgaaagcatagtgtttcgtttggttggggtgtatggtaatccctcacctccccatggacctgccagtaggtccgtgaatcttgctttatggtttgcaggaggacttcagctttccctactaacagcctaaagccagagaatcyagacagacccttgggtcatgagaacagtcagatgagtagctcctgagataaaaataaaatcttaaaagaagaaaatagctttaccattgggaagcaagagaagtttcactggagcttctggggtgggcttcagaatggtgagagctgccctcattttggcagcttcagaattataccttgccctagtcaatagaagttgatgtctcaaacacaaaatataatgtctttgttgcccactgagtgcagttagttagttgaattgtagcttctgggcaatcyccttcctctgagtaggttaagggtaaggcatatttcaggacttggctcagaaataagtcctgacttttttccagtgaaaatgcaactgaaagtctctttatgtcctcttagtttgaaatctgcagcttgaacttcccagcatgggagaaacttatcccacctttcaccgtaccccctgcccccccacacacagtagtatccacaaaggaattattttttttccccaactggccatctctctctctgtctctctctctctctcgccacacacacacacaccaaagaaaaagaaagataggtatttctagcctcgttttactctgtaggaacaaataagagtgtgggaccctgtgagtgtggacaatgccacaggcaragggactccctttctttattggtctgttgactctgctgaagaaagctttgaattccaggctttgatttgcttcctcttcttagaagagttatggactctgttctggaaacagagagataggttcaaagtttatcagacaaaggcatctaagaaagggtagtgctgatatgaatgacctggtccagctgcggggaggatccacattgtaggctctgatgcaatacctatgmtggggtagtcctcaagctaagaggccgtttctactttagagacttaatgaccatctagtttggtgttttcctcaggtccattatctctgaaaagagacataggaggaagaggattatttatcctcccatccataagcctgtgtttccagttcaaggatttaggtcagcaagacgcagacccaaaaaccattcatttaataacccaagaaagaaggcaagcagggtggcccaaatcttccaactggggcaagatttaatatagtgttccagtggaaagaatcttctaatggtaacttggactctacatgtcctaattctgttgttaatgagattgatgactctgggcttagtttcttctgttaaaaactaggaaattgtagatmatctctcaactccatttcagctccaggatttctcagttcctggagtacccctgccctagaccctccacatgaagaagagagtcttaccaaattggattatcagagcaagactattagcagagaagcctgaaaacatctttctggcccaaacaacagtgaacttttttgatcagcatgtattagggacttttgggcacaattgcaatcaaaggcaattgttcctgtctcttctacattttttttgctactgtaccctagtcagaatagttcactgagacttccctgtaatttcaaacttcacttgagagtgctaaccctgttttgggcatctttggctttaaaactgattattataaaactcaaattgaatttccctgctctactttctccacccctgcccaaacataccactgaacagcagtgattttgtgaggcctttctataaacagagagctatacttgggggtacacccaaaaaccccaaaaagtatcatctcctatgtatcatatctagtgatttaaagtgtttagtttggcccttttccttagttccttatgtcctgaaatgagacatgggagggataggatygtttcttctcccactcataaaccttagccttctctctcttctgcagtctacatggggaggacagagaagcgcaaagaacaagagaaaagatgcatccatctgagatctaaaaggagacaatgaggtgatattttccccctgcccaggtgttgtgttttcagctcttacccctttttattttagagactggccattcctaggatgacctgggaatttatcccctctgcactgctccccaagcacttggataatgaagctgagctgtcttcaactgtattatatgtagacagaaggtcaccatctacagcctggtgaaaaatgagtcagacctttccactgtaaagacaaacacatgagctgagctaaggttggtgggtttccttcagagagcactaggttgaccctaaagataatttcagagctgcaaattgcttgatgtctaggtctttttcctggaaaggggcttgcagacagtggctaattccatacctttccctggcccctttgcgtcttctccctcctcaattatgcaaagctttgatagagagcagagccagctatgtgatttcaacatatttttgctcasatttcactcagttcaggaaggcatagacagtagaggatgatgctgtgggtttgctctacttgtagcacctgaatggctcatacccaaggcacatgggaagttctgtcttgttaataactactgctctccaccgcagaacccaggtactaagggaaagtggagaaaatttttctacttctgcctgttatagtttgggaataataacaaaaacatggtatggatccttgccattctctctaccttcaccatctttcccaacaatattcttctcatgaccttttaccccctaggccacattaagcatgtgttaaatgactttttttttttttttttttgagacggagttttgttcttgttgcccagtctggagtgcaatggcccgatctcggctcactgcaacctccgcctcctgggttcaagcgattctcctgcctcagcctcctgagtagctgggattacaggcatgaaccaccacccctggctaattttgtattcttmgtagagatggggtttctccatttggtcaggctggtctcgaactcctgacctcaggtgatccacccaccttggcctcccaaagtgctgggattacaggcgtgagccaccacacctggcctaaattacttttttttttttttagkgtctcagtgtgttgcccaggctggcctagaactcctggcctcaagcagtcctcttgccttggcctcccaaactgctgggattggccctcactgctgcctgtcagggagcctggtgggaaatcttctgtctagaaaggatgcccattcctgttcaaatgtgttgtaatgttgataggagaaagccagggccatggaggactcttgtttatgccaagtggattcaaacaaatggggaagagctaggcacagtggcacatgcacctgtagtcccaactactcattaggctgaggaaggaggattgcttgaggccaagagtttgaggctgtagtgtgctgtgattgtgcccatgaacagccactgcwctccagcccagacaacatagtgagatctcatctctagtaaatataataaataaataagaacagggaagaaaatttgtgtctccagagattacaatgaccagcgtttcctccctcctcacagagatattccttttgaattggaacactgattgtttctagttgctttgtattcagctcacagctgaatttacagtacatatgtgcctacccgccatcactgagtgacggttatgttgctttatttatttatttagtgacagagtctcactctgtcacccaggctggagtgcaatggcgtgatctcggctcactccaacctctgcctccdgggttcaaacgattcttatgcctcagcctcccaagcagctaggactacaggcatgtaccaccaagcccagctaatttttgtatttttagtagagatggggtttcgccacgttggccaagctgatcttgaactcctgacttcaagtgatctgcttgcctcagcctcccagagtgctgggattacaggtgtgagccrccgcccccagccgacagttatgttgctttaaagctaatctccttccaagatctttgatacaaaactgtctcatgtaactaacttccctctccttatacctcctcctcctgcaatgtgtctccaattggcagtgcctaatttgacccagttcctctaaggagacgctaagatctgcctggctggttaggcaggggaggaggtgctttaaggggtagagagtgggaaggctgggcgggatgtgctgcagggagacttgagcaaagagtaaagtacatctgctgatttgctcctggtttgcacagaaaaccaggactgagaacagcagtttcaatccaatgccctctcacttccagggttaccaacttggtattaaaaccagctggagagccgggagcagtggctcacgcctgtaatcccaacactttgggaggccgaggcgggcagattacctgaggtcaggagttcgagaacagcctggccaacatggcaaaaccctgtctctactaaaaatacaaaaattagctgggtgtggtggcgcacgcctgtaatcctagctattcaggaggcttaggcaggagaatcacttgaacccgggatgcagaggttgcagtgagctgagatgagatcgtgccactgcactccagcctgagtgacagatcgagactccgtctcaaaaaaaaaaaaaaaagaaaagaaaagaaacaaacaaacaaaaacccccagctggaggcagctaagtacagctaagtactgattttgcccaagatgtgtcacagagcacgttaagagcaattaagcaggaaagctcagtttactgttagaaagaaagtccagctcagaaaacaactccttcagacctttctggaaattgttttggggccatctgggcaaaagtccaagaatgagatacacttcctgagccagtgctagctgaatggtatgcttcacctgttctacccacctagtgcttgtctagcccttcattcacacaggcattaggcatgctgcatgcacacaaacacacacacacacacaaaataatatgagcatatttcttcctgtagagccagctcgacttgttcttcctttttaagtaacagaccccactcccacagggatcacaccaaaggaaaagatgacttacctgatgttagaaccagggaaaaagccgagtgtggtggtccatgccagtagtcctggctactcagaaggctgagccaggagaactgcttgaacccgggagccaaactcatgccactgcactccagcctgggcaacacagcgagactccgtctcaaaaamaaaaacaaaaacaaaaacaaaaaaaacagggaaaagcaagaaaacccatgaaggccttgagtagcctggcttttgaaaggtttaatagaaagaggacacctcagagaggcaggcaacttgtgttcttgttcttgttctattctcaccatgaaccttgggacaagtaacttcactgctctcagcctcagtttctctcagtttctccaagcagaaaacaggaaaatcctgctcactcttgcctctcctgcatggggaggtgtgtgagggaagtttcaagtggcactttgtgggcttgttttgttttgtttgagacagagtcttgctcttgtcgcccaggctggagtgcaatggcacgatctcggctcactgcaacctctgtctcccgggttcaagcaattatcctgcctcagcctcctgagtagctgggattacgggcgcaccccaccacgcccggctaatttttgtatttttagtagagatggggttttgccatgttggccaggctggtctcaaactcctgacctcgtgatccgcccgcctccgcctcccaaagtgctggaattacaggcgtgagctaccacgcccggcttcaagtggcactttgaactttgcattctttttttttctttgaaatggagtttccctttgttgacctggctggagtgcagtggcgtgatctccgctcactgcaacctacacctccccggttcaagcaattctgcctcagcctcccgagtagatgggattataggtgtgtaccaccacacccagctaatttttttgtatttttagtagagatsgggtttcaccacgttggctaggctggtctcgaactcctgacctcaggtgatccacccacctcgccctctcaaagagctgagattacaggcctgagccaccaaacccagcctgagctttccattcattttgaaaaacaccaaagggcaattrtgaatctaatgatttggaaatgaaagggcccctcaataccagactgccctcctttatcttttgatctctatctcaagttttgtggctagttccagagagtctgagttctctaacaactgtggacttgggctcttctaatgattgttcctaagggacccttcaaggaaccacttattgtgtggcttgttctagtggtccagtcccaaagttcagtccatcccaggaaggatgtcaagaaaagagggttaataaacttagagaatttttttctccatgccctggcttcctagggaaatagggttgatactaggaatctctctgacaaaatgtaagagagaattgctttgtgaagtgaaggtaagcscatgtttcaggttttctcatgagccttcaaaaggagtctcaactccagacaagaattgggtgggggtgggggggcaggaaaacagatactttactctgtgtgccttcctgcaccccctcacccccacccctacctctctcaatataccattacaagcaaaccaaatctttatccatctgcctcagtgagatccttcaaaaagaccaagaatccccacagcagctcagactgttcccttgccccattcttgcttctgcctctgcctcagggcgtttagttttcatcagatgagtggggaatgcaattttctttttttttcttttctttttttttttttttgtgaccgggtctcactctgtcgcccaggctggagtgcagtggcaggatctcggtgcaccgcaacctccacctcccaggctcaagcgattctcctgcctcagcctcccaagtacctgggattacaggctcatgccactaccgcccagctaattttgttttgttttgtttttttaagagacggagtttcgctcttgttgcccaggctggagtgcaacggcgtgatcttgggtcaccgcaacctccgcctcctgggttcaggtgattctcctgcctcagcctccctagtagctgggattacaggcatgcgccaccatgcctggctaattttttttgtatttttagtagagatggggtttctccatgttggtcaggctgaactcctgacctgaggtgatccgcccgcctcggcctcccagagtactgggattacaggtgtgaaccagtgtgcccagtcataattttgtatttttagtggagacggggtttcaccatgttggccaggctggtcttgaactcctgatttcaaatgatccacccacctcagcctcccaaagtgctggaattacaggtgtgagccaccatgccagccgcaattttggaggtatgtaaatttccaccagatagattttttttttctctcctcccacaggctcctaaagagataaytcattgcaacaaattatcacttttaagtgttctcagttcccgattgtttaatactctactgccaattactgcttgccttccctcaaatagacattaaccttcattttaaattcagactccccccccgccccccccgtccttttttcttttttaaaataagcgtggtagagtaattgatgagagggtggggataaccatttacaggtttaacttgtttattacaccttcagtagaggacttatcactgaaccctgagtgggctgctctcctccatcttctmcttttcctgtcaccctccctcacaccacatactccaagacagaatcccttgaatgactgaacccagcttcttaatactacccccatctttaactgaggtatagagcctctaaggggctgtttctttgcctcctcagggctgaggtgtaatctccacctacatacacggtctaatctcaaaatcaaggaccactctggattaagatagtgtttccacctcagaggctggggaggcctgcagaagttgtaaattggaggaaatattggggtttgtaaatcagggtatgttgtctttcaccaggacaaagtgtaaggtttttcttggagacagggtctcgctcggttacccaggctggagtgcagtggtaagatcacagctcactgcagcctcgacctccaggctcaagtgatcctcccacctcagcctcctgaatagctgggactacaggcacatgccacgatgcctaatttatttttatattttgtagagatgggatctccctatattgcccaggctggtctcaaactcctgggctcgagtgatcctcccaccttctttccaaagcactaggattacaggtgttgagccacagtgcctggctaaggtttttcttctttaggatagtatcagaccatgcttaagtgctcctttaggtttcttgctaactcaagaatattaaagaaaagsctcctcccttcccagagctatcttctaatagcagctattttctttttcagcagaatctctttaaaatggacatagaagactgcaatggccgctcctatgtgtctggtatgccttctgtgtgttctatttgttaggggctggaagcagacactctcctgtagagcagagcagagagccttcagcctaggcacacagcctctaaatgtcctagtcacacagctaacactcatgcttggtggcccttggtagtgtgcaattattttggtgatcttacattccctaaatagtaattttcttttccagacttcttggggtatagaggaagggaataggaggggaatatgagcagacatcattagaagaataatttgaagcaaatagatggaaacaagatgtggttccttctcctttgctctgaagtcaccagccaaacatgaaatcctgttctatccagatagagcggcacaaggtttcaaagctcaaaggcctgcaagggccaggtagtcatgtgaatgagtgaagtaaggttaggataataagcagaaaagaatggtgggggctgtcatgaagtggagaacatatgtcccacttaaagggacagcagctttcagtgtccactagaacttgtcakgcaggaatgtgtatctagtgtggccaaaacttctaaatttttaagagataccagaaatccaaatttttatatgaaatgtctccattttaaaataatgactcaaggctgggcatggtggctcacgcctgtaatcccagcactttgggagacaggcagatcacctgaggtcaggagttcgagaccagcctgggcaacatggtgaaaccccctctctactaaaaatacaaaaattaggccaggcacgtggctcacgcctgtaatcccagcactttgggaggccgaggtgggcagatcacgaagtcaagagatcaggaccatcctggccaacatggtgaagcctcatatctactaaaaatacaaaaattatctgggcgtggtggctcacgcctgtagtcccaacttctcaggaggctgaggcaggagaacccaggaggcggaggttgcagtgagctgagatcacgccactgcactccagcctggcgacagagtgagactccgtctcaaaaaaaaagaaataatagaaaccaaaactgggttttgatgtgatgagtatccctatcagaaacccaagcaccattttggaaatgacctatagcttattttttactctaaagtaggaccaatgaaggaattattggcatgcactaaaggagatagcaagatgggtcagacacacatatgagagtcattggcaacacccgggtaatgtaaggtaagatgttgactctgacccctttcttgtttaaggagggaaggagttggaatgggtaaaggcattcaatatctgccacatgcttgacagaatgacagggatcaggtagactcatttaattggaagagactttattagaacaaaagtcatggccttgtgaggagcgagccagtcctcctacctcctgctcagttaagcctattcagaaaaccactactgagcaacaagtacacttgggaccctgctttagtgctggggaacactcagatggataaaatccagtccctaccataaagcaggcaaatgagaaactacaaatcctgtggagctcttttcaaacctgtttatggagaatattggatactcatggaggtgatttgcttcaccgtgctatgaaaccaagttttccctgctttcagcagattggcatgtcctagataagaagtggcctctgcacaggatggtttttgaatggaagtggaggccaggaactcctcctctgtactttgagaattttagatgtcagcagctaccttagaaagggaaaagagaaagtcaaagtaaggctaccattagccctgaaaagtacccctcttaggactgggcatagctgcgctcatcactgacccatctctcctggaagagtcatatggaagcagagggaaaggctgcagcatgcagccctcccgaagcacactgcgggcctccacaggccatcatagttcttctgctccacgccaggtgaccttccctcatcaggccacttgatgaaaagggtatctctcctgttcttccaagagatttgaattcctcacagaatgtgattcagaaaatccatcttttctccccttttctctttttaaaggtacagatcattcccttctggggcagggaaaagggggagataagcaggagtctattaatttatggcacagataaccaccccctccattttcctatctttcaagggaaacagagttgctgaaacccagctcctgccattaattgactgagcagggcttgccccaagttttctgagactgtgaaatgttttagagaactttagtagaaagggattcaggggtaggcagcccgaagtttcacagcccctcccacccccaaattcttggaatcagaaaatgtagtcttccaaagtaggtcagtttgtcagtgagcagctcctctgaaagggaagggagcagaggccttgtcctgatagagggcggattcatccagggctttcggctgctggggccccaggggcacaggaagggggggaaatggggagaccgtaccagcctttttgcccgggatctgaaaggtctcagggccacggagcaacactagcctgacaccagactctgctgggccctctcactgctggaaaggaggaggctgtcagtccccacatctagagagcaaccttcctcctggaggaggagggaaagagttcggtgggggaggggctttctgcctctctgagagccttgaagctgtccgtgtcctgggccccatgacctctggggccttggcttccccagctggcagaggattgggccttccctagggccccccctttctccctcccacccgcaggcccatccatctctctctctctctcttgcacacactcttgcctctctcaggcatttgttgtgcagttcctctttgtctgctgggcacgaggggcaacagcatctgcctttccctccctgtgcacacacccaccacccacccccttcactgtcttggaaaagggatgctgtagcctagcatctcccccactatatacacatatacattctctccagccccctccccaagcacatccaagcgtgctctcccctctccttctctccctctctctctctctctctctcwcacacacacacacacacacacacactcaacacacatacaccctgggctgagctgctcttgctggctgcagccgtgggcctctgctcaccgtgccgctgctgctgcctgcgaaatgacggcggttcccctcacttccaggaatccacgcttcctggaaggtgagtggctgggctcacccctgcctgccactgagacgcagacatgcatacaccacccgcactccctcgccgtttccaaggcggcggccgcgttcgcaccccagggtctcaccggcaagggaaggataatgtaagttcaggcagaaggcggctagtggagggaggaaggggggtgctggggctagggagccaattcagtaactactcccaagcctgaggagatggagaggatgggggckgtgtgtgtgtgtgtgtgtgtgtgtgtgtgtgtgtgtgtgtgtgtagcgggggagggggcgttcctccttatacttgcggaggatgggaaagggtgtttggtgttgctaagcaaagacggcgacttggacagtgggagcctatggtgacatcttgattaggccttggggatagaggtagagctgcctggggtgaaatgccgagacaggcctgggtgggaaggggtagtggagaaaatcaaggtaaggaagaggagccttggcaagcagatgcctcagcctggaacagagatctgaggggcctcagcttcctccccacaaaagagctgaggatgggcgtctttctttgctcttgtacccactattccctgctagcaggctaggatcctgccaccctggagcccgtggtcaagaaagggaaagcagttatgatgaggtgccttgcagagaagtgtggaggttctccatgttctccaagctcatggctattccctagatgtagccactatttaaaggtctcaaggaaaggcagcaggagtggaggctagcctcctttaacatatgaaacacctttagcttgtggcctgtttcccagttcctttctctccctcctgcttttcagcctttacctacctcccagttcctctaatgtgaacctcatgatttggctttgccctctgggggttcagccaatctatgatgactttgagcaagaaaatttctcagagacctaagagcagccttaattcttggctttgacagtctgggatttcttgggagtcccagacttttgagattccctcactggggtttctggggctgagagaggaactgttaaacttcctaaatcttactctagtcccctcacccctgagctrgaattcaaaatccttggtgcccaagaaagcctttctgactcctgaaacagattcattatacatatattttagccccatgaaagtagacttgatcctgtttttccccttaccttaatcttagggagggcaacagcatcaaagagcctcttgaattactggtgtgactcctgcttctcttcctgtttctgggccttaattgggaaagccacaaaggatgcttttccctcagtgtttcttttttttttttttttttttgagacggagtctcgctctgtcgcccaggctggagtgcagtggcgcgatctcggctcactgcaagctccgcctcccaggttcacgccattctcctgcctcagcctcccgagtagctgggactacaggcgcccgctaccatgcccrgataattttttgtatttttagtagagacggggtttcaccgtgttagccaggatggtctcgatctcctgacctcgtgatccgcccgcctcggcctcccaaagtgctgggattacaggcgtgagccaccgcgcccggccgccctcagtgtttctaagtgtacttttaaatatattttcctccacmtagcaagtcgctggcctcaagaggcagcctcagccgaataagctgggaccagtgatggatttccaacaagttcactcatccttttagggtcaaggcctcaaagccaagtgccctgttcttccctgatagtaacatcaagtgatttagggcaattcagcactaataaagggaataagaagataacattttcagcccttttaaccctagtaaaccctacacttagttgaaaggatatatttaaaactggctctgagtctacaagtctcaacccacaatcctgakatgctcacttcatgatatgtgtgtggttctgatttcgggcaacatttttaggtaaccatggctcacctaaaaagccccagctgggaaaactcagattcaagccataaggctttttctatagatagtgaacatttttcctcaggctttgacgggatagaatggggaaaatgggactttaggagaggatatgaaygggaaatggtcccaaagtcctgagtggttgttttcttcccactgaccaaagctggagagggatccctcaggagggtgtgttccggatttcttgcctcaggcccaagactccaaccattttataatggaatctttattttgtgaaagtaagtatgtgcatagctgggcaattgggtaaagtactaataggtggacttcagggatgaattttaggcttcctctctctttcttgcactctcccttgctttctctttctctcttccatatttaggcctgtgtgcacacatccatgcatgttcatgttagcagataatgtagaaggctaccagtatgtttatcccaataggtatgttctctttatatgtatctacatatgtgttgtgtctctgtgtgtgtttatctacatgtatttttatttcacctatatatttgtgtagaagattgtggggaggagggatttttttaaaaaagacattcatatcttcctttaggtatgttatctgattttgaaaaacattatgaaagcctcaaaaagcatttttacaaagcaatttatcagaaaattaaaacaaatatactgagaataagttgatcacttaactgtcaatgaatatcaaatagtaaacacgtgattggaatcagatcagtaggagactttctagagtaatcaaatttttgctgaatttagaaagtctaagaggcccaattcttccctactaagattgtgaccaccaattggctgtgtaggtgctggttaaggacatggacgcttactgtctatgatcccagttccacactagcagctatgtaaccttagacaactaacataacctcttttgtacctcagttgcctcatctgaaaaaatcatgatattagcacctacttcatatagttgttgtgaggattaaatgaaattattcatttcaagtgcacagaataaagcctggcacatagtaagtactcaattaatattattagctgctatgatgattactaatattatcattagattcaaggacaattccagttacctttcctgcagatcctgaaccggctgggggctccagagaggaacagtagggaagaatgtctgtcctgaacatctgtcccttctgcagcccccattttcctctccgccctggcgcacccagcctcagccctgcttcctgtggacgtcaggcagtgatgctcttgccctcaggcctagataaaggtagggtaggcaaggcccagccactgagctcacagaaggcarmaccaggcatccagactggygggggcacaaggtatggtgcccagcatacaacactgctttgtacatggctatgaaggaaatgtttgtgaaatttaactgaatttttttaaaagattaggcaatggacagtagatatctccagctccagctttacctgccctcttgttctctcctccaaggtagcggggactcatctctggagaaggagttcctcggggccccagtggggccctcggtgagcacccccaacagccagcactcttctcctagccgctcactsagtggtaagtgtaacctcctaccacctcctggcagtaggcaccccctgttgcatttggccttcaattcaccttccactggcaaccatttccccatcgtcacctcctgctggtctcctgcttagtctctaagagcaatgaggagcccagtgtctagggtttttctggcttctgaaaggagagtgaatagtcagtcactggcagactagggtggaattaaaagaggtatgggtgggattaaggtaaaagtttcaaagagaaattatggaattagagaagcaggtagatagaaatggtcatcagatggagttagataggaaatagagagtagaaggacctccccatctccccacagctcattctcctacccagacagggtccccatgactgcctctccccagctggccctagatctgtgacattctctaaatggttggagtagccaggaatgtaggtcggagctagagccaaagccttctcctcaatggttcctccttcctttacccctcctgccctgcctcagagttttatggaggtggagggggtagagggattcaatctaatgaggtgggagggaactgtaagcatgtctgtcttccaggtttgctctctttggcctgttgtcccccttcagtcttcctagatctgttttcccgccactgttaacttgctggcttcctgcccagggccaagccagacatctttcttcatgacaagagagtagagaaaaaagctccccttagtcgcctcctctcctcagcgacagaagacatcctatgtacccccaacttttttctttttgagatggagtcttgctctgtcgcccaggctggactgcagtggcgtgatctcagctcactgcaacctccgcctcccaagttcaagcgattctcctgcctcagcctccgaagtagctgggattacaggcgtacaccaccatgcccagctaatttttgtatttttagtaaagacagggtttcaccatgttggccaggctggtctcaaactcctgacctcaaaagaatccacccgccttggcctcccaaattgctgggattacaggcgtgagccaccacacccggcccaacttttttctcttgaagcctatttgcctggtgggtgggagaaaaggttgtctcaggttccagtaggattctgatatcagcagcagggatactagggtgttagttccatttaaggcttgaatgtctcagggcctaaagacaccctcttaaactttaagagtgccattctgggccaggcgcagtggctcacacctgtaatcccagcactttgggaggccaaggcaggcagatcacctgaggttggaagttcgagaccatcctgaccaacatggagaaaccctgtctgttctaaaaataccaaattagctgggtgtgatggtacatgcctgtaatcccagctactcaggaggctgaggcaggagaatcacttgaatctgggaggtggaggttgcgtcgagccaaattcgtgccactgcactccagcctgggcaacaagagcgaaattccatctcaaaaaaaaaaaaaaaaaaagagtgccattctggcctgggagcagcttccccctttgcctctctctattctaaacaccatcccacccctcagccaactccatcaaggtggagatgtacagcgatgaggagtcaagcagactgctggggccagatgagcggctcctggaaaaggacgacagcgtgattgtggaagattcattgtctgagcccctgggctactgtgatgggagtgggccagagcctcactcccctgggggcatccggctgcccaatggcaagctcaagtgtgacgtctgcggcatggtctgtattggacccaacgtgctcatggtgcacaagcgcagtcacactggtaagtaagccagaggggctctgggaggagctcccagggtggggttgagaggcaggggcagtgctgggacaacagcaggtatggggctggaggaggtcatgcagggagtgggtagcctcagaaagggaagggtctcacccagcacattttccagctgacaaaacraggcagggtgggggtgggtacagaatttgaattcccctcaatacctttagtttcctggcactctyctcaaccgctgttataaagaaaaggtgatatttttctcagtatatgagggaggggaaagtgtagactcaagaatgagccaatggtccaataggggtaagactcctgggtattctttgggccctcccatctaataattaaaaaacaacaacaacaacaacaacaacaaaacagaaaacaaaagccttctcttctcagcttccttgggccttgggctcctagggcagagtgggccctgtggggctcagtttttggtaacagtcttttggcctcgtgttccaggcccctctccctgccacacacctctaatccacaccttccccagggtaagaccccagggatccccaagggatcttcataaatcagggtttgtgtgcattgcacttctgcccgtcagcaatgtgttcagagcaccttcccttgggcaaggtagggcagagggtgggtgataggttcaaccttcaaagttcctcacatgcagtcctctgggatttgttctttcacttgcaggtgaaaggcccttccattgcaaccagtgtggtgcctccttcacccagaaggggaacctgctgcgccacatcaagctgcactctggggagaagccctttaaatgtcccttctgcaactatgcctgccgccggcgtgatgcactcactggtcacctccgcacacactcaggtcagtgtctgtccagtgggaggagggaatgaggctccaacacacccagtatgtagagctcagtgacttctcttgtatttggggagttccagtgtctgtcattgaggaggggggagcatttacagagcagatagggccccctgcctctctcacccatcctctgggcagcaaggcttcatgggaaatttgggagacaccttgatggggtattttacatccaccatatggatgtaaaatccatctacttggagcaaaaggaataggagcaatgttcttggctgttaacggtcacccttggcctggcgcggtggctcacgcctgtaatcccagcactttgggaggccaagatgggcggatcacgaggtcaggagatcgagaccatcctggccaaaatggtgaaaccctgtctctactaaaaatacaaaaaaaamaaaaattagccgggcatggtggcaggcacctgtagtcccagctacttgggaggctgaggctggagaatggcgtgaacccgggaggcggagcttgcagtgagctgagatcgcgccattgcactctagcctgggcgactgagcracactcagtctcaaaaawaaaaawaaaaaaaaaaaaagtcacccttccctgacttttgtttgttttttgttttttcaagacggtgtctcacactgttgcccaggctggagtgtagtggtgcaattttggctccctgcagtcttgatctcctgagctcaagccatcctcccacctcagcttcctgagtagctggaaggatactgccacacccagctaatttttctatttttttgtagagacaggatctccctatgctgcccaggcttgtcttgaactcttgatctcaagcaatcggcccacctcagcctcctgaagtactgggattacaggcgtggtgtcagccactgtgcctgggctttcctgacttttatattttagattgttgatgccacaatccatgccctattacccccaacatctaagcccctgggaaatccctcctctcactcccatctgcctcaggccccacacctgtcatcatcttcaccctccttcctcccacaccaccagaggtcttgagcaaccagtctgtcctctcctttacttccttctggctcctggaaatatccatagccctctcaaattgcaaaaaagggagcctaggacttccaaataggaaaagagtatcctatttctgttccctatcccaagaggttgtcaccttcccagaggcaagagaaagtccagagggtacctagagatcaatgtttggaacagtgctgggaaactggattaacaaggttttctagcccagtcaagactgtttgaatcagtatctgtctgaatcagctggacagatagcactttttaggcattttactaagctttaggcttttggcttggacttgggaagaggccaggagctgagctggcaggaaggagggagctcaagattgggaaaaggcaggaagaaaggaagggggaaagaattagtagggtctgtccttggaaactttcctggctatttttctcttcttaaactctcctgagccaggatttaaagggacagagcaatcatttcatcaccctctactttctccatccacttaccttgttccaggttctcccaccttgtaattgggacctctttatctctatgtatgtggagaaacagggagaaagatcatcgttgatacatgctttatatctacagagcatttcacttgtgtttctccatgtgatcctcataacaattccaaggtagatgtgattatccccattttgttgacaaggaaaatgaagctgttggggggaaaaatgagttgcgggtcacatagctattcttcagcctagctggaaccccatcaaggtccagtgccagaaatacatactccttttcctcagaaaaggggctgctccccctgctggtttggaacaaggatggcttggcccctagaattcttaccaactacacagtgaggtgaactgggtagattttggatgttgatctgtagattattaacaacagaagcagacacagatatactgtcaggtcccatctctgtgaagtgctttctgttgcaacccctattataagaaaaaagagactggatgcatgttctcactcatgtgggagctaaaaaagttgatctcatagaagcacggagtaggttgggtgcagtggctcacgtctatcatcccagcagtttgggaagccaaggcgggtggatcgcttgagcccaggagtttgagaccagccagagcaacatagtgagacttcgtctctactacaaaaamaaaaacaaaaacaaaaacaaaaactaggtgtggtggcacacacctgtagtcccagctactcaggaggctgagacagggaggatcacttgaacctgggaggtcaagacttcagtgtcctgtgatcatgtcattgcactccagtctgggtgacagagtgagaccccatcttggggaaaaaaaaaaaaaagccaggcacggtggctcacgcctgtaatcccagcactttgggaggccaaggcgggcagatcacctgaggtcaggagttcaagaccagcctgaccaacatggagaaaccctgtttctactaaaaatacaaaattagccaggcgtggtggcgcatgcctgtaatccctgctactcgggaggctgagacaggagaattccttgagcccaggaggcagaggttgcagtaagccaagatcgcgccattgcactccagcctgggcaacaagggtgaaactccgtctcaaaaaaaaaaaaaaagtagagagtagaacagtggttaccagaggctgactgagaagggttgggagtaggtggatagcgagaggctggttaatgggtacaagattacagttagatgggaggcataagttgtagtgttccacagcatagtagaatgactgtagttaacaataatttattgtatatttcaaaatcgctagaagagattattttgaatgttcccaatacaaagaaatgataaatgtttgctgggcatggtggctcacgcctgtcatcctagcctttgggaggctgaggcagacagatcatgaggtcaggagattgagaccatcctggctaacayggtgaaacccgtctctactaaaaatacaaaaaattagctgggcatggtggtgggcgcctgtagtcccagctactgggaggctgaggcaggagaatcgcttgaacccaggaggtagaggttgcagtgagccgagatcgtgccactgcactccagcctaggcaacagagtaagactctgtctccaaaaaaaagaagaaaaaaagataaatgtttgaggtgacagatatgccagttaccccaacttgatcattacatgtcgtatacatgtatgaaaatatcatatgtatctcataaacatgtataattattatgtatcaattatcaattaaaatttgaaaaaaaagaaagcggttggaggatcattcctctcccagatgttaaactgtttccccaagggtctttgggtggatagggaccatggtgttcatttcatccctaaaatacaagagtttacagagcctgagtaaaatccagtagattgatttagtcaaggcccagctttggcatggcaaggttaggggtgaatagtaattaccagcttcctagagataccttctcctgtctccctgctcaatagcagcaagatacatcaaatatacaatacgttgtttctctccacttttttctctcctctcacaaatatctcttaagagttatctttaaatgaagtaccactctgttttccaattttctttcttckgtagaaacaagacctttataacctgttccttattacaagcacataaacaaacaaacccaaatttggtgttctcttttttttactcttctttattttcttctctgttcttttattctttttctcttttcagaattactctatcagtgatgggctttctagacctctcttggtatctcagcgtagagagacagagagacaaaataatcagtaaaccaggctagggctggaggtcaaaatacaagtaaaggtcaatgaaaactgccccctccccacattggcagatctaagggctctcatttctgtcatgccagcccaccagtttcccccaaaccaaagcagatagttcataaaaagcaaaaaatccccttgtctgataaacagcacttacatccgcctgccaaatggaaaggttaaaccacagtctgggccccagactctgagatcctgcagtggggcctgcctgtctgctagggatgatcctctacaaagtccctgggtcctcacttcctttaagcaacaatttggccatcttgaacaaacccaccaccagtctgaagccacatgccctaggattcccttgcccccataactgcacattatccttcatcatcaaatattgttcatctgtccgcggttgcagttgaagttgggaaatgaaagacaagtagaagaactcaatttagcaacatcctttccttcccatgccagtgtatacttgctcttggctgaatctgcagagccagggcacagcgagaaatagctctgatgccatctttccactctcctccacagtctcctctcccacagtgggcaagccctacaagtgtaactactgtggccggagctacaaacagcagagtaccctggaggagcacaaggagcggtgccataactacctacagagtctcagcactgaagcccaagctttggctggccaaccaggtagggctattgatgtactactggggagttaaaaggggatggtgagagggagtgctagacaagggtgactccagtatctcccncactgagggatgaagtctgtggaacaggggatgattaccccagtaaatctgccaaacaccccattctaggtaacccagttggtggagagccttgtctgtggtgggtgctttagggagatcgacaggtaggggaagtttgggtctatatccttggcctaatgggagagagagaacacaagaagtataaaaccaagggccagatgtgtatgattgtccccaaatgatctgaaattttattggagtgagctttaggtagggtaaacagagcccagtttcccaggcaactggtatgtccttccttggctactgacctgctggttttctccaggcaaaggctgtggggccaatgctacccctactcaactgctactactgtctccaccttcttcccactaggtgacgaaatacgtgacctggagatggtgccagactccatgctgcactcatcctctgagcggccaactttcatcgatcgtctggccaatagcctcaccaaacgcaagcgttccacaccccagaagtttgtaggtaagaatccagttggaaagacgtatcagctttaagccacagctcaaataaatctgagctgtgtggtctggagattcggtttggggaaagaaagcagtctggtgggctgggtgcagtggctcacgtctgtaatcccagcactttgggaggccaaggtgggcagatcaagaggtcagaagatcaagaccatcccggttaacacagtgaaaccccctctctactaaaaatacaaaaaattagccgggcgtggtggcgggcacctgtagtcccagctactcgggaggctgaagcaggagaatggtgtgaacccgggaggcggagcttgcagtgagcggagatcgcgccactgcactccatccatcctgggcaacagagcaagactccgtctcaaaagaaaaaagaaaaaaggaaagaaagaaagcaggctggtggcctctgatactgaaaatctatcctcaggacaggaggaaagtaaagagggaggatgtactcaaagagagtggagaagggttggcactgaagactctcgtggtggttgtaagggacagggtcgaggcatcgggctgtctcagttttttgtttgtttgtttgtttttgagacggagtcttgctctgtcgcccaggctagaatgcagtggcacgatctcggctcactgcaacctctgtctcccaggttcacgccattctcctgcctcagcctcccgagtagctgggactacagacgcctgccaccatgcccggctaattttttttgtatttttagtagagacggggtttcaccgtgttagccaggatggtcttaatctcctgacctcatgatctgcccgcctcagcctcccaaagtgctgggattacaggcgtgagccaccgcgcccggcccgggctatctcagtttttaagaataacaagaacttcagtctgtgtgggcccttagagagtcagagagaggaaataagtatgtggttccccctatccccagcactagtcatgagctctctaaggacctggagctttatggagagtaataaaatgaagtattaaaaatcaatgggctgggattgagtccttctctaagattatagcctagagtcagggagcagtcccacaaaggacctgaccctgcgaaagtaaatgccacgtagtaaataatgttacacccagccccacaggtaaaaaaacaaagaagtaatcctgaggagagtgtaggaattctccaaacccagccctgctgagttcctsttctccacaggcgaaaagcagatgcgcttcagcctctcagacctcccctatgatgtgaactcgggtggctatgaaaaggatgtggagttggtggcacaccacagcctagagcctggctttggaagttccctggcctttgtgggtgcagagcatctgcgtcccctccgccttccacccaccaattgcatctcagaactcacgcctgtcatcagctctgtctacacccagatgcagcccctccctggtcgactggagcttccaggatcccgagaagcaggtgagggacctgaggacctggctgatggaggtcccctcctctaccggccccgaggccccctgactgaccctggggcatcccccagcaatggctgccaggactccacagacacagaaagcaaccacgaagatcgggttgcgggggtggtatccctccctcagggtcccccaccccagccacctcccaccattgtggtgggccggcacagtcctgcctacgccaaagaggaccccaagccacaggaggggttattgcggggcaccccaggcccctccaaggaagtgcttcgggtggtgggcgagagtggtgagcctgtgaaggccttcaagtgtgagcactgccgtatcctcttcctggaccacgtcatgttcactatccacatgggctgccatggcttcagagacccttttgagtgcaacatctgtggttatcacagccaggaccggtacgaattctcttcccacattgtccggggggagcataaggtgggctagcaacctctccctctctcctcagtccaccactccactgccctgactacaggcattgatccctgtccccaccatttcccaaggagttttgctttgtagccctcactactggccacctgacctcacacctgaccctgacccctcctcacctattctcttcctctatcctgaccgatgtaagcattgtgatgaaacagatcttttgcttatgtttttcctttttatcttctctcatcccagcatactgagttatttattaattagttgatttatttttgcctttttaaattttaacttatatcagtcacttgccactcccccaccctcctgtccacaactcctttccactttaggccaatttttctctcttagatcttccagcagccccaggggtaggaagctcctcttagtactaagagacttcaagcttcttgctttaagtcctcaccctttacattatctaattcttcagttttgatgctgatacctgcccccggccctaccttagctctgtggcattatatctcctctctgggactcttcaacctggtactccatacctcttgtgccctctcactttaggcagcttgcactattcttgaatgaatgaagaattatttcctcatttggaagtaggagggactgaagaaattctccccaggcactgtgggactgagagtcctattcccctagtaataggtcatattcccctagtaatatgagttctcaaagcctacattcaggatctccctctaggatgtgatagatctggtccctctccttgaactacccctccacacgctctagtcccttcaacctaccggtctattaagtggtggcttttctctccttggagtgccccaattttatattctcaggggccaaggctaggtctgcaaccctctgtctctgacagattgggagccacaggtgcctaattgggaaccagggcatgggaaaggagtgggtcaaaattcttctctttctcctccacctctcaaacttcttcactatagtgaccttcctaggctctcaggggctccttcagtccccatcctatgagaaactagtgggttgctgcctgatgacaaggggttgtttcagcccctcagtcatgctgccttctgctgctccctcccagcaggattcaccctctcattcccgggctcctgggccctgttcttaggatcagtggcagggagaaacgggtatctcttttctctcttctaattttcagtataaccaaaaattatcccagcatgagcacgggcacgtgcccttcaccccattccacccttgttccagcaagactgggatgggtacaactgaactggggtcttcctttactacccccttctacactcagctcccagacacagggtaggaggggggactgctggctactgcagagacccttggctatttgagtaacctaggattagtgagaaggggcagaaggagatacaactccactgcaagtggaggtttctttctacaagagttttctgcccaaggccacagccatcccactctctgcttccttgagattcaaaccaaaggctgtttttctatgtttaaagaaaaaaaaaagtaaaaaccaaacacaacacctcacaagttgtaactcttggtccttctctctctccttttctcttcccttccttccccttccatctttctttccacatgtcctttccttattggctcttttacctcctacttttctcactccctatcagggatattttggggggggatggtaaagggtgggctaaggaacagaccctgggattagggccttaagggctctgagaggagtctaccttgccttcttatgggaagggagaccctaaaaaactttctcctctttgtcctcctttttctcccccactctgaggtttccccaagagaaccagattggcagggagaagcattgtggggcaattgttcctccttgacaatgtagcaataaatagatgctgccaagggcagaaaatggggaggttagctcagagcagagtagtctctagagaaaggaagaatcctcaacggcaccctggggtgctagctcctttttagaatgtcagcagagctgagattaatatctgggcttttcctgaactattctggttattgagcccttcctgttagacctaccgcctcccacctcttctgtgtctgctgtgtatttggtgacacttcataaggactagtcccttctggggtatcagagccttagggtgcccccatccccttccccagtcaactgtggcacctgtaacctcccggaacatgaaggactatgctctgaggctatactctgtgcccatgagagcagagactggaagggcaagaccaggtgctaaggaggggagagggggcatcctgtctctctccagaccatcactgcactttaaccagggtcttaggtacaaaatcctacttttcagagccttccagctctggaacctcaaacatcctcatgctctctcccagctccttttgcataaaaaaaaaagtaaagaaaaagaaaaaaaaatacacacacactgaaacccacatggagaaaagaggtgtttccttttatattgctattcaaaatcaataccaccaacaaaatatttctaagtagacacttttccagacctttgtttttttgtgtcagtgtccaagctgcagataggattttgtaatacttctggcagcttctttccttgtgtacataatatatatatatacatatatatatatatttttaatcagaagttatgaagaacaaaaagaaaaaataaacacagaagcaagtgcaataccacctctcttctccctctctcctagggtttcctttgtagcctatgtttggtgtctcttttgacctttaccccttcacctcctcctctcttcttctgattcccctcccccccttttttaaagagtttttctcctttctcaaggggagttaaactagcttttgagacttattgcaaagcattttgtatatgtaatatattgtaagtaaatatttgtgtaacggagatatactactgtaagttttgtactgtactggctgaaagtctgttataaataaacatgagtaatttaacacctctggttgtttttgcagacttcctttgccttgcttttctactaagagggaggggtcctccttgcagtatgttataccaactactgaacagtttaggaggtaaacaaaaacgaagaattttcagcctagactgggaaatggaggagattttcctaccaggaaggagtgccttcaggataggagagaaagtctgacttgcctgtctacccaaagtagaaattaatcaaacatttgttgagtacctactgtgcacaaaacacattctatgcccagggtgaaataatgcgaatgatgacaatcatagggtctaccactgcttgagcatctcataaatgctaagtactcattgaattgtagaaacacctacaaaaggatgatcacaattattggtaaaaaaataaaagcccaagagagaataaataccttatccaaggctcatcagccagtaagtgacagaaccagaatttgaacccaggggtgtgtgatccaaagcatgtgctcatcgctttatgccagggaatgcagccagtgaaacccctaagctagaaaaatccaaagtaggaacataaatttgtttctgtcttaaatagtaactattttctgttctcttcactctgaacttttttatgttctcttccatctacctcattgctattccatatagtaatgtctgccttctgttttccacaagattacagtgaagtgaaaattagagacactcctatctagagtctattattttccatgtcccactgaaactggcaaattcaaagtcaaaacagacaggaaagctggaagtggtggaggacacctgtcctcccagctacttgggaggatcacttgagcctaggagtttgagaacagcctcagcaacacagggcaacaccatctctacaagaaattttaaaattagctaggcatggtggtgcatgcctgtagtcccagctactcggaaagctgagacggcaggatcacttgagcccaggaggtcaagcctgcactgaactgtgatcatgccactgcagcctccagacccatcttaaaaaagaaaaaaaagcgctgggcacagtggctcatgcctgtaatcctggcactctgggaggctgaggcaggcggatcacgaggtcaggagatcaagaccatgtggccaacatggtgaaactccgtctctactaaaatacaaaaaattagccgggcatggtggtacgtgcctgtagtgccagctacttgggaggctgaggcagaagaatcgcttgaacccaggaggcggaggttgcagtgagccaagatcgcaccactgcactccagcctaggcaacagagcaagactccatctgaaaaaaaaaaaaaaaagtctgggcacagtggctcacgcctgtaatcctagcactttgggaggccgagtcgggtggatatcctgagctcaggagttcgagaccagcctgggcaacatggcgaaaccctatctctactaaaaatacaaaaattagctggggccgggtgcagtggctcacacctataatcccagcactttgggaggctgaggtggatggatcacgaggtcaagagatcgggactgtcccagccaacatggtgaaaccctgtctctactaaaaatacaaaaattagctgggcatggtggcgcccacctgtagtcccacctactcgggaggctgaggcagaagaatcgcttgaacccgggaggcagaggttgctgtgagctgagatggcaccactgcactccagcctgggtgacagagcaagagtctgtctcaaaaataaaaataaaaaaagaaaggaaaagaaaaaagaaagtaagaaaacagattttagccccaagaagtgggttaaaggttaaaagaaaccatgatgggttgctggagggaaggtgaatctggtgtgttcaaactctagagtgagtcataaatgaacaatggtttccatctgtaccatcctgggtctgaatgctaggaggtccccttgccaccctagtgtcttcaactttggagacaactgggtggttggctgtggacagccattcctgccaggctgaagcttgcttgctttttttttttttttttttgagacagagtttcgctctattgcccagactgtagcacagtagcccaatctcagctcactgcaacttctgcctcccgggtgcaagcaattctcctgtctcagtctcccgagtagctgggattacaggtgtgcgccaccaggcctaatttttatatttttagtagaggtggggtgtcactatgttgactaggctggtcttgaactcctgacctcaggtgatccgcctgccttggcctcccaaagtgttgggattacaggcgtgagccactgcacccagcctaaggcttaagtctttccgatggctcttcagaggtaaatggagcttacacataatctttcaattaggggtcagattcactaatgagtggtgaaataattttcgtggtttttgatcagcatttattaaaatagagaacagaaagattaagtaaaaataaagaatagaacataccagcacacctatgacaagggtaagtatcgtttcataaagcttgtgtttcagttttgcatgtgcatgtaatcgtgtttgtgtgtgtactgggtaccaatgtaaaatgtattcgtgctatgaatctgggtgaaaaacgtttaagtcattagtccaggctattcctccatccatttgttaggtgacatacagcatagtacagcggagccagaatacctactgcacgtcagttcttcaatctttttttttaattgatttatttatttttgagacagagtttcgatctttttacccaggctagagtgcagtggcgcgatctcggctcactggaaactccgcctcccaggttcaagattctcctgtcttagcctcctgagtacctgggattacaggcgcccaccaccaggccgggctaaattcttcaatctttaaagtgaggataataatagtagctacctataggcttgctcaaagttaaatgagttaatatttataaagacgcttaccacagggccaggcactgtgccagagataaaaagatgaatgagaaatagccccagcctcaatgcacttcattgtgggattttctccatattggaaggagggattcacaaaatgcttgtttcctctcaggccttcctcttcgtaatcctacacctacctagtagaaggactgtcagagaaatgagcccagggcgtcccccggtggcgcagcgccgccttcggtctaagcacttggggcaggggggaagggggggaggggggagcctcttggcttcgcactacaattcccaccaagcatctgtccctctctggcctctaataacgagtgcgccttgtggtccagcgtctggcaactttcacgcctagcgtcgcgtataccggaaaactgcatcgtccagaattgcttccgagtcggcgcggcgcaaggcttgctgggagacacataacctcgattttcttccgccatccggctaaatagtcccatgtgcactttgttccatggataaataaacactaggaacgcatttccaccctagatttcagcagaaatgctgaatgtaaaggaatatttgagtaaagtgagttgccgttcttgaagcccgtctcctaaggattctcccggtgtccgcgtagggatctcatgctatataggagggccctgccaggcaccgtctcctctctccggtccgtgcctccaagatggtgagtcttcttgcgtggtgagggtgggggttcgggtgcagactctgggattgtggggaagtgagagcctggagcacggctgaggggtggaccgagtgtacatttcatttgctctgggggtcggcgggatttgcggagaaacaggagatccgagcggcgccttcctggaggctgccggtgcggcttgtggccggaaagggactgaggctgggtgagttgcgccgttttcctaacagttttcccatcctgtcgcagacaaagaaaagaaggaacaatggtcgtgccaaaaagggccgcggccacgtgcagcctattcgctgcactaactgtgcccgatgcgtgcccaaggacaaggccattaagaaattcgtcattcgaaacatagtggaggccgcagcagtcagggacatttctgaagcgagcgtcttcgatggtaagtgggtcaccggcgcgaactgtgtgaggatcccagtatcttaaagccttcgcccaacttcgcccttttggaggctctgttcgttggagcctctcaggcaatttccacgtatttaaggttgttactggtagaagagaattctcttgtttgccgttttgattcttttctgggcagagggtgactttgtgatagagtgcacagcctttactctgaggtaaaggtttgcctgtttcggttatgagattgcaaaaactagaaacttggtaaatttgacaattcttgtgctattgattatttgaatatttgtgaaaatatacaggtgaggaagaatgtcttcaacgtttcgagaatggaggccgtctagtttggtgtgcaaggatgatgtttggagcaataagaacgtcgctttgtttttttccttttatagaaagagcaaggttcagggtaggcattagggcgggtgtaggtgtagaaggaactggattattggtttattgcatttagaatgtcagtctggtccttgcggtgtcaagatgaactcacgtgggatgttaattcacttgtaaaactgagggttatacatatgtgctcaggtattgggctgaacaggtgctttgggggtgcttttatgtgcccgacaggcatttaaataggtttagttttaattgacgtaaacatgtaaggtgctcttcattcatgtaacaaaaaagcaaggtaggtatataataccagtataactctattttctattccttagcctatgtgcttcccaagctgtatgtgaagctacattactgtgtgagttgtgcaattcacagcaaagtagtcaggaatcgatctcgtgaagcccgcaaggaccgaacacccccaccccgatttagacctgcggtgagtattttaaaaggagaatggaagccaggggagtgatggttaaaatttcatcctggagggtcagggtgtcctatacctgtaacctcaacactttgggaggctgggacaagaagattgctagaaaccagcagttcaagaccccatctcttcaaaaaatattgagaaggaagccaagcatgatagtgtgaacctatagtctggctgctcgagaggctgaggcaggaggatcacttgagcccaggagtttgaggttgcagtgagctatgattataccacttgcgctccagccagggcaaaagtgagaccttgtctcttaaaaaaaaaaaaaagttgcttcctcc

SEQ ID NO: 8907 - DNA, 37021 bp, Homo sapiens
tgtactactctggtagagtatgttaatggaggagtatatacagctgtgggggtaggaggcatatgggaaatctgtgtactccagtctatttgatgtaaacctaaaattcctgtaaaaattaagatctattttttaaaaggggaggagagaagatctgtccctttccagatggtgaggcaataatatttgtattacaagagtcacctctggccttgttttcagccatgtggaggaagtcagtctgagataattagcttgagatataaagagaaggatagaaaaaagatgaataagagaagagaacaggaaagttggggagggggaaagatagagactcttaagagcattggagtcctgggtttctattctgctgagaggcccagatgaaacttctacttttcatgttttggttataagaatcaacaaattctccattttcctcaagctggcttgagttaaatttctatcacttgcaaccaaggagttctgaataacatacactgcaagccgttgtgggccacactgttgccttccatctgggctccccatacgtatccttgctctcttgtactcaattctcaaacttcaatcagaattatcttcttaaaatgaaacatctaaccctcaaaatgaagtcctcaatcttaacataccttccaaggccttatgggatctgacccctaactacctctcaaacttcattttgaatcattctgttatactccacgcactaaccaaactgttttcttctgtttctccagcatcggccagtccagaaagattttacttctgtgcctccctgcattgccctcctttcccaccttggctaacttcaattcatctgtaagtgccactttaggaggcttaatctaacaccctgaacctggaacataaccttaaatgctccttatcatcacccctttaattgctacttgtttaaagttgttagactttaagttccatcaaagtagaaacttgatctgccttgctcacctctcaatcacttccccttcccaacattcagtgactggaacagaggagatgcatattagtatttgctgaattaaaaataaattttgaaatacaaattagttgccgttttccaattatcaaattgtcaaagtgttctttattatgataggtaacattggtagagatctttcactcactgatgatgaaagtataaatatttcaatggcaattaagtagtaagcataaaatctttaaaaatgtatatagtcttaagacttatgtatatagtcttaagactataaagtcttaagttattctttttagaataacaagaaaaaaattgacaagagattgtacaaaggaatattcaccacagctttgttttagtaaagtacaaaaaaaaagagagaaaaaattaaatgtccaatattatggaattattttatacaaatacaataagaataaaatatggttatttaaagttacaaggtaaaacattattaatatggaaaagtattcatagcatgttctttaaaaaaaggcacacacaaaaatgatctgaatggcacattactttaaattgacatgcaaataaatataaattaaaaagtaatgtttcaggccgggcacagtggctcacgcctgtaatcccagcactttgggaggccgaggcgggtggatcatgaggtcagaagatcgagaccatcctggccaacatggtgaaaccccgtctctactaaaatacaaaaaaaattagccgggcgtggtggcacgcacctgtagtcccagctactcagaaggccgaggcaggggaatcacttgaacccaggaggcaggggttgtagtgagccgagatggtgccactgtactccagcctggtgacagagcaagactctgtctcaaaaaaaaaaaaaaaaaaaaaaaaaaaaaagtcatgtttctctgggaggtgaaattagattgatttttattttaatagttttcttacatatatttctgggtttttttaataagcatatactgcgtaacttaaaatctcttgttacttagtgttataaatgaggaactagagattcagatatattaatttgctcacagcaacaacacagcctgtattccaacccagtttgtcagtctctaaagccctggctcttaaccatcacactgtaataacatggtgcctaaatgtgtacaaggcactatggggaggcactgagtaaataagaagttagcagcttggaagccaatagataagaaatatagacaaatacgtgacatggcaaaatgtgttttgtaacctgagaggtacaagcatggaggtcacaaagttcaatgtttgcttggaataaaaaacaagtcagttgtcctgttttactagtgcagtttctccaagtgtggtctatagtccacctgcaacatattcctaaacagacctgttaaagaaaaatctccatgcagctcaagaaagttcaaattacctccaggagcatcatacatttggtgccttgcattttttttagatgccttataatacttataaatactactagtaaaattttaggacaggcgcagtggcttgtgcctgtaatcccaacactttgggaggccaaggcgggtggatcacctgaggtcaggagttcgagacaagcctggccaaaatggtgaaactccatctctactaaaaaatacaaaaaattagccgggcatggtggtgggcgcctgtaatcccagtgactcaggaggctgaggcaggagaatctcttgaacccaggaggcagaggttgcagtgagccgagatcacgccattgcactccagcctgggcaacaagagcaaaattccgtctcaaaaaaaaaaaaaatcataaaaataaaaatgaaagtttaggaatagaccattattgaagggaatatacagtgtgccaagaccaggctttgttacgtttctaaatatctgaggtcagataaatactacacaagctcaccaacatcccctaatcctttgggtcccagtttagattgactttgaaattgcccttaggaggacttttcctgaatttcaaagaaggttaacagtgtgtggcataaacgaaatctcggaataaaatctgaaggacagattgaaaggaattcaagatgcctccagggtctcatactctcatggaaaatatcaaacacccaattgcatcacccccatactcactcaaaaggtctactattttatttcataggttgaaaggttagaattggatctcaccaagcatttcactacagaccaacatcccctaaactgaactgatctctggaaatgcgaagagaggaaaaactaggacaggtggacggcagcagttagacaaaattctatgaggtttgagccattaaaagccctatagggctttagtcttacaactccaatgtcatagtgtctgtaaaatctcaattaatctcattctatttttgcagtaactggcttattaccatagttcctcccttcacctgatttcaataagatcatctgatcgaggaatcctctaattgaacatttatttgaatcttcctattaatagtgctactacagctatgtgtggttgtgtctgaaaataccagccatgaatcaagagtccgtcaaggctgcctacatatgaacacactctttattaattaatacctgtcatctgttgtttatagacaaaactttgttgctctgggcctctgaaactcaaaatatttgttcagaatacacaagtgttggctcttccatccacagccaaaagcataatgcgagaaatatcttcaatccatttatgctgaaacattaaactaaaaaatgttttttccttgttgctttacatgtttgtttagttcattgtttggttgattgttcttgtaggaattgggggaagtacataaggtgtatgcaaaaatatctcagtaagcttggccagtttgtcccactcaatttacatttaaagtgaaaccactgatcttcaaagacacttttggcacaagttattaaactttcgaacagtggttataaaatagttagatttcaactttaattatatgctacctctctgagcagtgctacaacaaaataacagaatattcccccttaaataattataaggtctgtttaaacattcaaattcgaatcagaattcctttgactatacacattactgcttaaaacccctattataattttaatcaaacacagtattcattaccaagaatttataactaagagaaataaatatttggagcctgttaattttatcatatctacttaagttggaagttacttagcaggagatcaaattgcaatacaattcaaacataaacaacagaaagtaatagtatttttaaaatgttcctaaatatggagcaaaacaaaatatataaaaacagagtttcaaagagctaaagatcttctgaaccaacatgaacagtaatattgcatagagggaaaaaatgcttaatcctaagacttctactatatggaaggttcgtagcctctttctttatttttgggatggtgctcagaaaaaaaaaaaagaaagaaagaaaagaaaagaaacaaaaaggcaaagctcagtggctttggtaggagatagcagattgctgtgatgcacctgattatatcccgtttgttctcccttttggtttagctcacatgtgaaaatctcctgtggacaacttggtttttttcccagaagcttggtccaatccctgtttccaatgctgtcagcatgaaagggaccaggcagcagggccaagcagttgcagatctgtgtggatactgcttcaggtgatgaaagggacattgctgacaagtcagtagagaggagaaagccaggctaatggctattctcaagtggtcattcacagctatttgccagtgaaaattgaaacttaaatttccctaatttaccttccctagaacttcaatatttcttacagtaagtaattttttaacttctttataactctcccagcagtgtggcagctttggtgtgtgacaaatggaggttagattctcctgcttaccactttcgaacatgaatttgaaaaagttacttaacctctctaaacactcaaatgctcactgtaaaaggtaacattagggttgtttgaagattatgggagacattgcataagaatgttctaacacaattcatgacataaaacagattctgaataaactgatatttccaaagtccacgtccctcctccctaaaacactaatgtctccactacactcatgatcccagtacctctcagtcctctgcggacactgtgccgacaattatatttttcctcttctttcctggtggctactgaaaaatcaacaagcattcaatgaacatgtgtttagtaaaagccaggtatttttttacatgttaccttaacctacccctatcctctcctgaaggtattggtatttctcctttctgctgtgatgaaacttcttaaattaggtgacaataagtaaagccagataaagatagttgtcagaggaaatgtgaatatctagatattgcattcaatatttagattgtgtgtgcatgtgagcattttccagaaaaaaaaatcaattttttccgtcatagtctcaaaagatccctgactctcaatatgttatgatacattgaatctatattagtagttgttcaggactgtcctgctattccattgtatctgtttctgtccttacctgaaagcagtgtagctatggtcgtagggaaacttttacttttaaattcaaatttctgttttttagccttcatcctatgttatttatctttatcatgtaacactcataacaacctttctttcttcgaattttttcttcatttgattgctgacactactcatatctcccaataagtcatctttgagcacttccatatctttctttggctcctacttctcagtatgactcatgaattctgatgtttcctgggatactctttgtcttaatttactgttgttgcacatgcactccttggattatatactctatgggcaaagctttgcacatctccaggtcagacctatcctaatatctacatctacatttccaggtaactagaaagtaaatggcacatatgttcaaaaatacactaaatcactactataaaaaaatcaacttaacacaaagatacaaagatactacttttctttatcatatgatccatgtatattattttattataatttcccgtgttggcaattttaagaagaccagagccactaaatcatttctagaggagtatggattattacgacctttatagagtagaatttgtctatayagctcagaagtctttaaaatgtgcatacacatcactatttcctgaagtatgrctttatcctgaagagtcctcccactaaaagacaactagaacttagataagttaagacaaacatatttttatggctaagctcacagaaaggaaaagaaatctcgaagtgtgagggggtaggcaatgagctaaaatctgagcagagagccatgagtaatcaataagtgacaggaagttgttctgggagaaaatactgatacaaggcctaggatctgggagacctaaactttgagtctgtctcaaggttagggagctgatgtgagtttcctatattacccttaatcccccatggagctaaagtgatcctagatgttagggaattctgtayagtggcaatgcaaccaaatcytttctcagggaatatttccaacataaacacttaggattcttacagattaagttaaaaaacagatgatcttataaacaaaaatcaaactactgtaactgagagttctcagaaacaaaatacagattaagtttaaaagaaaatttgtatgctgaaattatcagatacacagtataaaccaaccatatataaaatggttaaaagattttaaaactgattatttctaattaaccaaaaaaggctacttaaaatggccaagaagtatttagaactaaactaacttaatctttgatattaaaatagtaytgaatgagtaacagcatatcagatacagatgaaagggatgatttgtgaacttgaaaatagattttaagaaattatacaggattatcacaaaaggcatcaaataaagaccctgtataatgtagtgatagagaaaaaaattcaagaatcagaataaatttgaatcacagctctataagtaactagcgctgtgactttgagtatgttactaccgtctctgtacctcagtttcaccatatatttttaaatgatggtttatgtaagaattaaatttaaaatatttatatataattcttgaataaagtctggtaatattaagcactatggaataattatcattattaatatgacagaagtaagcccaaacatacctatgatattaagaaatatgcaggcttaatttacctcctaaaagaaagaacttttcagattaactcccaaaacatatctctattatatgctgtgtatgacagggacacactaaatacaaatttatacctaaagataacaatagaagaacgggcacagtgggatacaaaagaaaaaaagggagagagaaaaaggaaggagagaggtaagaaaaaaatgagtcatgatcwtatttgaaaaggtaacattcagagcttttgaaaaagcattaaatgtgacatagaaaagtagtttaaatatactaaagggaacaattcacagtaaagatatgagtgttatacatttctatgcacccaatgagtaaaacaacttcatgaagcagaaaacacaggagatgcaaagacaaacaggcagaaacatttaaataatagtagcttaattctcatgcagtccaagttctagtaaggtaaaaagtataaagaaggatttgtaagacttaarttacatttttaataaagtagattgtatggagatctatagagtagtgagaacttttgtatcttaaacagaaaatatgccttttccagtgctcgtggaaactttactgaaatagattatatactagattacaaatataaatataataaagtctcaaatagcaataatacagaaaatattgaccacaaaatagtaaaagaaataatttcactgagaaagatttacgaacaaaatctactgagctaaagaaaggataaaaacaaacaaacactatagaatgtccagaaaacctttatgggttgaactgtgtccctgcaaaatgcatctgttgaagtccaaatagtacctcagaatgaaaccacatttgtaaacagagttatttccaaagtaattgttaagatgaagtcatactgagatactttgagaccctagtataatataactggtggacgtataaaaaggggaagtttggtcacagagacacacacacagggataatgcctcatgggaatgaagacaaaaatcaggtgatgctgcttctccaaacmaacaagattgccagcaaactaccagaagctagaaagaggcatggaacagccctcagatagaaccaaccctgctgacacctaatcttagacttcttgcctccagaactgtgaaactataaatttctgttgtttaagccacatggtgttgcagcactttttgtcccaactggttggaaatgtcattgttattttcccatttgttgaccaaatctccaactggactatatgtaaggatttagcgtccaatagatgctctaagtattattgaatgaataattcaagcattatgggagagttaaattattcttaaggtttcttctaactcagcgattatttttcatttgtttctgtgtttattttttttgtttttatctggaggaatcatcaagcctttctaaagctcctaatctgtatgtctgaaacaagatctcaggagtccttaaaaaatgcattttcttttaaaatatgaaaacagtattagaaaacacatgttcttgcttaagaaaatttattgagaagtttttaaaatataaacatgcaaaccattaaataccgaattctccataaaagcacacaaagaaaattaagctctaagtgagagggcactgctcactcttactcagactttggtgggtgggtggcgtgaggtggggcagggtggagtgagttggtctcctgtctcttttcaaaactttactcacatgttttgaatctggtaaaaggagatatgaaaagagtgttggaataggcatttttcacttaataaacttaaaaatgtctgtgctacattttaaaggatggtagaaagaataattttttaaaagacaactctagattgttctctrgcaaagtgaatctgtgatacaaagagatgaaagtatgctggaaaaaatcattaagcttgctaatttgcagctttttacatagaaaatagtgttctttaagcattcttagtggaatgaaatagaaaaagtattgtttgataccaaccagcacagattttaaaacacatatttttcctctccaaaaaatgtttcgagcaatactacttttaaactatgtggcaatccactaacgagatggttttaaaactatgtagcaacattaaaaatgcctagagaaatgtcatccatggcttagtactaacacaaaaagtattataatatttttgttttattttattgtatgcaaatattgtgtatagttctatcatcatatatagataattttgtgtcttatattttatcactagttaatacttttcaatttttagttcctttttaattttttataattaaaaattaactttgaaacatgaaaagaagtctacaaacaataaatgaacaatattgaaaaaattaaaagaaaaataaaaagcggtttgttggagatacttttaaaatataaagatgcaaaccattaaatactgaattctaatacataagtctaaatacctaccaaagccacaaagagattcctgaaggaataaacatgtaatctatacttcatttaaccatggcaatattaaaatgaaaacaaataaataaaaagaacacatgagagaggaaacaataacaggctgaagatattcacatatatttggaaggtggcaaaagactgaggagagataatgacttatcttcagaatcctatgcttagctaagacagcaatgttaacaggaagcaagctgctactccagtgtccctgcaagtctagggatttttagaccccagaaaactcagaagcaaggccatgggataagactaaaagctagaagatttttatatactttaagactatggactttaagaaagaccatccccgcatacttccttccaagcatccaggtaacaaccttctctaaccctaacaacagtttaatttctggataaattaaacktgatagactctaggtctgtggaaaccaatcaccataaagggaagaagaaaaacactagtttaaaaacagggaaaatcaactaaattataaaccctcttcctcaacttgactattcactccttgtgtaaaacattagtgaaaaaaaaaacacaaacctgaaatcgcctggctaaaagaaccacaaatactgatatttgggagtctcccagataaatggccttcttcctacccaataaccttgcaatgaaatccaccatttggcaagccatgtccatgcatgtaacacccaatcaacattgtagtgtctcactaataaatgtcaatggacttctaattagccaggcatggtggtgggcacctgtggtcccagctactcgggaggctgaggcaggagaatggcrtgaacccaggaggcagagcttgcagtgagccgagatcgtgccactgcactccagcctgggcgacagagcgagactccgtcttaaaaaaaaaaaaaaaatcaatggacttcttacctctccttacatacttaaacaagagaaaagaagaagcatgtgtcarcacaaagacttgtacatgaatatttgttgcagctttatttgtaatagcctcaaactagaaacaacccgaagtccattaacaaaatggctaaacattttgtaatatattcacacaatgaaacactactccacaatttaaaatatgcacatggatacggaatgcagataaatttcaaaatcattatgctatgtaaaaaaaaaaagtcaggcaaaaaggaatacatgctatactatctcatctgtatagaattctggaaaatgcaaacaaatccataggaacaaaacacacagcagcagttacctgaggagtgggttggggagtagaaggaaatgaggaagtgtaacgagataaactaaaaaaggttacaagacaacattttagaaggatggaaatgtctgttacattgattgtggtgatggtttcaggagtgtgtgcattggccaaaaccagtcaaattatacattttaaatatgtgcagtttattgaattttgataatccctaaatgaaggtgtaaaaygacaccaatataaaaataaataaatgggccaataaggatcatyagatatttaaagaaagctccaataagaaatataaacatcagagggtggcaccaagatggccgaataggaacagctccagtctgcagctcccagtgtgaaggacgcagaagactggtgatttctgcatttccaactgaggtaccaggttcatctcactggggcttgccagacaagtgggtgcagcccacagagctgggcagggcattgcctcaccmaggaagcacaaggggtgggggaattccctttcctagcaaagggaagccatgacagacagcasctggaaaatcgggacactcccaccctaatactgctcttttccaacagccttagcaaatggcacaccaggagattatatcccgcggctggcttggaggctcccacacccacggaggctcgctcactgctagcacagcagtctgagatggaactgcaaggcagcagcaaggctgggggaggggcgtccgccattgctgaggcttgagaaggtaaacaaagcagctaggaacttgaactcggtggagcccaccgcagctcaaggaggcctgcctgcctctgtagactccacctctaggggcagggcatagctgaataaaaggcagcagaaacttctgcagacttaaacatccctgtctgacagctttgaagagagttgtggttctcccagcacggagtttgagatctgagaaaggaaagactgcctcctcaagtgggtccctgacccctgagtagcctaactgggaggcacctcccagtaggggccgacagacacctcatacagggggatgcccctctaagacaaagcttycagaggaaggatcagacagcaacatctgctgttctgcaatattagctgttcttcagcctcygctggtgatacccaggcaaacagggtctggagtggacctccagcaaactccaacagacctgcagttgagggtcctgactgttagaaggaaaactaacaaacagaaaggacatccacaccaaaaccccatctgtaggtcaccatcatcagagacgaaatgtagataaaaccacaaagatggggagaaaccagagcagaaaagctgaaaattctaaaaattagcgcacctcttctcctccaaaggaacagagctccttgccagtaatggaacaaagctggacagagaatgactttgacgagttgacagaagaaggcttcagaagattggtaataacaaacttctccgagctaaaggaggatgtttgaacctatcacaaagaagctaaaaaccttgaaaaaagagtagacgaatggcagtgtagagaawagacartgtagagaagtccttaaatgacctgatggagctgaaaatcatggcacaaggactacgtgacgcatgtacaagcttcagtagcygatttgatcaaatagaagaaagggtatcagtgattgaagatcaaatgaatgaaatgcagggagaagagaagtttagagaaaaaagagtaaaaagaaatgaacaaagcctccaagaaatatgggactatgtgaaaagaccaaatctacgtctgattggtgtacctgaaaatgacggggagaatggaaccaagttggaaaacactcttcaggatatcatgccggagaacttccccaacctagcggggaaggccaacattcaaattcagaaaatacagagaatgccacaaagatactcctygagaagagaaactccaagacacataattgtcagattcaccaaagttgaaatgaaggaaaaaatgttaagggcagccagagagaaaggtcaggttacccacaaagggaagcccattagactaacagtgagcggstctctcggcagaaactctacaagccagtagagagtgggggccaatattcaacattcttaaagaaaagaattttcaacccagaatttcatacccagtcaaactaagcttcatacgtgatggagaaataaaatgctttacagacaaacaaatgctgagagattttgtcaccaccatgcctgacttacaagagctccttaaggaagcactaaacatggaaaggaacaaccggtaccagccactgcaaaaacacgccaaattgtaaagaccattggtactaggaggaaactgcatcaactaatgagcaaaataaccagctaacatcataatgacgggataaaattcacacataacaatattaaccttaaatgtaaatgggctaaatgctccaattagaagacacagactggcaaattggataaagagtcaagacgcatcagtgtgtggtattcaggagacccatctcacacgcagagacacgcataggctcaaaataaagggatggaggaagatctaccaagcaaatggaaaacaaaaaaaggcagggttgcaatcctagtctctgataaaacagactttaaaccaataaagatcaaaagagacaaggccattacataatggtaacaggatcaattcaacaagaagagctaactatcctaaatatatatgcatccaatacaggagcacccagattcataaagcaagtcattagagacctacaaagagacttagactcccacacaataataatgggagacattaacaccccactgtgaacattagacagatcaacaagacagaaagttaacaaggatatccaggaattwaactcagctctgcaccaagcggacctaatagacatctacagaacyctccaccccaaaacaacagaatatacattcttctcagcaacacatcacacttattccaaaatggaccacatagttggaagtaaagcactcctcagcaaatgtaaaagaacagaaattataacaaactatctctcagaccacagtgcaatcaaactagaactcaggattaagaaactcactcaaaaccgctcaactacatggaaactgaacaacctgctcctgaatgactactgggtacataacgaaatgaaggcagaaataaagatgttctttgaaacgaatgagaacaaagacacaacataccagaatctctgggacacatttaaagcagtatgtagagggaaatttatagcactaaatgcccacaagacaaagcaggagagatcttaaattgacaccctaacatcacaattaaaagaactacagaagcaagagcaaacacattcaaaagctagcagaaggcaagaaataactaagatcagagcagaactgaagtagatagagacacaaaaaaacccttcaaaaaataaattaagccaggagctggtttttggaaaagatgaacaaaattgatagactgctagcaagactaataaagaagaaaagagagaagtgtcaaacagaagcaataaaaaatgataaaggggatatcaccatcgatcccacagaaatacaaactactatcagagaatactataaacacctctgtgcaaatcagctagaaaatctagaagaaatggataaattcctggacttatacaccctcctaagactaaaccaggaagaagctgaatccctgaatagaccaataacaggttctgaaattgaggcaataattaatagcctaccaaccaaaaaaagtccaggaccagatggattcacagccgaattctaccagaggtaaaaagaggagctggtaccattccttctgaaactattccaatcaatagaaaaagagggaatcctccctcagtcattttatgaggccagcatcatcctgataccaaagcctggcagaracacaacaaaaaaagagaattttagaccaatatccctgatgaacatcgatgcaaaaatcctcaataaaatactggcaaaccgaatccagcaacacatcaaaaagcttatccaccatgatcaagttggcttcatccctgggatgcaaggctggttcaacatatgcaaatcaataaacataatccatcatataaacagaaccaaagacaaaaaccacatgattatctcaatagatgaagaaaaggcctttgacaaaatttaacagctcttcatgctgaaaactctcaataaactaggtattgatggkatgtatctcaaaataatatgatctatttatgacaaacccacagscaatatcatactgaatgggcaaaaactggaagcattccctttgaaaatgggcacaagatagggatgccctctctcaccactcctattcaacakagtgttggaagttctggccagggcaatcagggaagagaaagaaataaagggtattcaattaggaaaagaggaagtcaaattgtycctgttgcagaggacatgattgtatatttagaaaaccccaacatctcagcccaaaatctccttaagctgataagcaacttcagcaaaatctcaggatacaaactcagtgtgcaaaattcacaagcattcctatacaccaataacagacaaacggagagacaaatcatgagtgaactccattcacagttgcttcaaagagaataaaatacctaggaatccaacttacaagggatgtgaagkacctcttcaaggagaactacaaaccactgctcagcaaaataaaacaggacacaaasaaatggaagaacatttyatgctcgtggataggaagaatcaatgttgtgaaaatggccatactgcctgaggtaatttatagattcaatgccatccccatcaagctaccaatgactttcttcacagaattggaaaaaactactttaaagttcatatggaaccaaaaaagagctctcattgccaatacgatcctaagccaaaagaacaaagctggaggcatcacactacctgacttcaaactatactacaaggctacagtaaccaaaacagcatggtactggtaccaaaacagagatatagaccaatggaacagaatagagccctcagaaataataccacacatctacaaccatctgatctttgacaaacctgacaaaaacaagaaatggggaaaggattccctatttaataaayggtgctgggaaaactggctagccatatgtagaaagctgaaactggatcccttccttacaccttatacaaaaatcagttcaagtgggattaaagacttaaatgttatacctaaaaccataaaaaccctagaagaaaacctaggccataccattcaggacataggcattggcaaggactttatgactaaaacaccaaaagcaatggcaacaaaagccaaaattgacaaatgggaactaattgaactaaagagcttctgcacatcaaaagaaactaccatcagagtgaacaggcaacctacagaatgggagaaaatttttacaatctacccatctgacaaagggctaatatccagaatctacaaagaacttaaacaaatttacaagaaaaaaaacaaacaaccccattaaaaagtgggtgaaggatatgaacagacacttctcaaaagaagacatttatgcagccaacagacacatgaaaaaatgctcatcatcactggccatcagagaaatgcamatcaaaaccacaatgagataccatctcatgccagttagactggcaatcattaaaaagtcagkaaacaacaggtgctggagaggatgtggagaaataggaacacttttacactgttggtgggactgtaaagtagttcaaccattgtggaagacagtggggcaattcctcaagtatcttgaactagaaataccatttgacccagccatcccattactgggcatatacccaaaggagtataaatcatgctgctataaagacacatgcatacgtatgtttattgcagcactattcacaacagcaaagacttggaaccaacccaaatgtccatcagtgatagactggattaagaaaatgtggcacatatacaccatggaacattatgcagccataaaaaaggatgagttcatatcctttatagagacatggaggaagctggaaaccatcattctgagcaaagtatcacaaggacaaaaaaccaaacaccacatgttctcactcataggtgagaattgaacaatgagaacacagggacacagggtggggaacatcacacacacgggcctgccggggggtgggcgggggagggatagcattaggagatatacctaatgtaaatgacgagttgacrggtgcagcacamcaacatggcgcacgtattcctatgtaacaaacctgcacattgtgcacatgtamcctagaaccttaagtaaaataataaaataaaaataaaaaagaaatataaacattaaaagatattttttaacaaaagggatctgaaggaaatgaagaccacaacagaaggagaattttgaaaagaaaccagaaaagagaaagctgtaaatagcatcctcagagataasgatggatattacatcaatgaaacaaaagcaggatgctataaaagaagattcagaaagcamgatctcttgaaaattaaaaatatgattgtagaagttgtttttttatggaaaagttggtagattaggaaayttcatagaagttaaataattaaagagattaaaaatagtgaaaatatatataaacacaagattaataaaagcgttttgggagaggaaagcagagaaaatggagaggagacaaatatcaagaaaaaattcaaaagtacttttcagaactaaataacacaaatttatatattaaaagatacactgagtttccagctcagtcaatagaaaaagatccacaccaaagcatatcagcctgaatttaaatatatcaggaatacagaaaagatcctaaggacttctacagagaggttttaaacaatgaaatataaaaaatcaaaaactgcttttcttttagccacattagyggttagaatacaatgaaataatgcctttataattctgaataaaaataatgtgtttagaactatgctcagaaacaaaaggtctcagtckttcatgtgtccattctcaggaagctactgcagtatatgttccatcaaaataaggacrtaaatcaagaaaactagaacagtatttttaaaatggaagaatgatgggagtatttctcaatatgaaagcaaaaggataaaaacaactacgtagcaatcctagaaagcartcagtttggagaaaagcagaaggtcagaggctataggagaaagatttccatgagaatgggcagtgagaggggaagttggaaataagaaggaaatattatcatatgaagagtggtcatatcatattttatcattctctgagacaatttgcaagcctaaaactgaacaatcgaaaaagaggcaaatgttaattagaagaaaaacaaaaggttaaataaaaaaggaaaatactcacagcatattactcagttcaatagtaatcagcatttaggttgttataaaatcacgccattcatcagaaattaataaagctatcaaagtaccgagactacaagacatagaaggcaactggaagggattcctgttgatccaacatgggataattttaatatgaaaaagacaaaggaaatcaaaatacatataaagtatatttcaaaaaaatgaaaaagaaaaatcatatatcttgcctttcatttaaaactacctcaaggtaatcaaatagttaacaagagatgttctctttcattgaagaatttcaactaataaatgacaaatgaatgacagaattagactagcactatttttcaacccctaataaaaaggatttcaggcaattatcagcaaagattgctaaaaccagtaaatgaaaggctgatagagaactcagaatgaacaacttgcctgctatctgaacccactgatcatttttaacctcataaaagatattatgtaccccttgatataatgcaataggaaataaacagcatcacgtgagacatattcttaccaaaataatggaagccgaatcatatcaagcctctagaccaaactacaagtatagaggaaatgcaaatgagaaaggaacgtgttaaatgataccacacgtatgccatcagcaaaatccaggatgtgggaaattctacacaacaaatgcccccattttttaaatatcagtaatgtgaaaaataacggacagaaaattgtaaattaamgagtcacacagagcaaccaaatgcaatcttgtttagatcctgaatccaacaaaccagttaaattttttttttgtagacaactggaaaacgtgaatgctgaatgaatatttatattaaggaattcccataaattgtatgtttagatgggataatggtttcagagctatgttctataaaatgtccttatcttttatagcactaaaaaatgtacagttaaaattatgtgatctctaggatttgttttaaataatacagtgggaggtgggaggaaagtaggtaggaatatagagtgagcaagatagatcatttgttgataattgttctaattttatatacatttgaaagttcccaaaagaaacactttaaaatgtaaatagaaaaaagatgtacacctaatattgatataattcaaaaaatttattaaactattttacgatagtgatagagaagaaaagtgaggagagctgaatcttcttcttctaatatgggatatcaacatataaaatgtaaatttaataaatcaagagtgtccagagaagtaaatatttttgaaatgtagaaacagctaaaataaagaaatgtagaaacacctaaaatagttaaaactgtgtggagagcaaaatttatgggtgggcagaattaaggcaaggaactactgtgtttattattagtcttctaataccatttgaacacatacaaatttgataaaatgtaaaaattatttttaaaatgatatataaaacatcttttacttttaaaatgtgataggaagaagattaatacatattatgaattatatcctgacactcatgtttatcttcaatctcttctcatttcttccctttattcatgtcattgtcaaagcatgttatgattatgaatatgacttggagtcatttacttctctaactcctcagcaaccaccctggtctaaggcctcatgatctcactgacatcgtctgctaatagatttcctgtttttactcttgccaccctctaattcattccacaaatatcctgggacaggcagatgagaatttgtctttcactctgcacttaatagctctttcaccttaagcaagtcacttatgttctttgaatctcagtttcactatctataaattagagcagatgataaccaccgtagaggtgtgaagatgaagtgagatatcacatattattccacatccagactgatgttttaaagttgygggacagtttttctccaactgtagtgtgtatgcaattgctaaggaaagatcatttttgaaatgcagattttgatagagtggatccaaggtggggcctgagattctgcatttctaataagctcccaggtgatgcaaaagctgccagcacctcattcacactttgacttagcaaggctagaggggataccaagataagtgacagtgatgcttgtcctttagaaaggagattatgcccttgtaaagataatctaaatatccacataccttcactttcattagtgctacagggagcatgtaaactctgaagctatttgagattgggatagatgttgattttactaaacattatacgagacagaccagcataaggtcacatctggctataacaaaatcattcaaggtgttgtaacaagatatacaacttagagaaagcaattagcaatttagaatatgaaaatatagatcatttttaacaaaaaaacaaatatcctggatcagacagataagaatttgtctttcattctgctcctgagtagctctgtaaccttaagcaagtcacttatattctttgaatctcattttcattatctataaattagggcaaataataaccaccgaagaggtgcaaagatgaagtgggatatcgcatatcaattttatgactgtgcctgacatatgatagtccttataaaataccaggtcttccttttcttttttttttattatactttaagttttagggtacatgtgcataacgtgcaggtttgttacatatatatacatgtgccatgttggtgtgctgcacccatcaactcgtcatttaacattaggtatatctcctaatgctatccctcccccctcccccgaccccacaacaggccctggtgtgtgatgttccccttcctgtgtccatgtgttctcattgttcaattcccacctatgagtgagaacgtgcagtgtttcgayagaagattttccttataacattagggtaagagaggatccattttgaatgttatgtttggcacccttaacatcttagagaaacaaaaaaggttatgaaaatagaayaaataacaatgtaggtaataagcaagtatttttgtctaaatgaacactagaccatgagtcataaagctaagctttggtccaggattcagcattaactagatgtttgatgttgaactttatttaatgtcactggccctggtatgctttctacatcactgtatttaacgcagaacaggtgagacccaaactggggcttagccctcaagggttcttggctttgttcatgaaagagttcaggggcaagttggaggtagaagaaaacagctttattgaagaggcggtgttacagctctggcatttataactctgtgactgctcctgcagggcagggctaacccatatgcagagagtagcagcttacggcggttttgcagtcatatttatacccacttttaactacatgcagattaagggatggtttatgcggaaatttcaagggaagtggtagtaayttttgggtcatctggtcattgccctggaaagaggcagtaactcctgggtgttgttatagcaatggtaaactgacatggcacactagggggcgtgtcttatggaaagctgctttccattggccctgttttagctagttctcaatttggtctggtgttcaagccctgcctctggagtctagtcctgcctcctacctcatattcaccttgttaagtacattatcttcttacggaaatgcattatccttccatttcttttgattttttttcttttggaatatcagtaaatttcacagaaatattaaaattgtagaatcattgaataattagaacaaggattctaaacaagtttctttcctcctgaaatctctaccaaacaccttcaaacaatgttacaaagcttttaagaagtatatgaaatcaatgaactaatgtttctagttagagaacttcaatttttttaagattacacaggcatgcacattttcactgacaattgaaatttatttgctttacatgacactaagttgttctattaataactaagataccaaatataatttagaaatacaaaaaaagaggatgggtgcggtggctgacgcctgtaatcccagcactttgggaggcagaagtgggcggatcacctgaggttgggagttcgagaccagcctgaccaacatagagaatccccgtctccactaaaaatacaaaattagccatacatggtgatgcatgcctgtaatcccagctactctgtaggctgaggcaggagaatcacttgaacccgggaggcacaggttacagtgagccgagatcgcacccttgtactccagcctgggcaacaaagagtgaaacttcatctcaaaaaaaaagaaaaaaaaagaaagagagaaagaaatacaagaaaaagaaaaagcaatttggagaaaattttaaaaagcaaatcattttaaaagacaaactacaaagtactgtgtgagctaagccattcataatgttctcatggagctaatgggaaacaaatctgttctttcaaaataattgtaaaatttctgtgtaagaatgaatggaaaaggtcatccaaaaactacttgactacatatacctatggatctctatctaagtgctgaaaaatgaatttttttattcatttggttatgtagcatttgttcattctaattttgttttgttccctgtcatatctctggtacctagaataatccctaccacagagtaggtcttccattactcttatgcttttaaatctcccctcacctcattgtaaatgacttttgatttctcttttatgccctttttatacacctttcccttatatctccatttattcctgaagcttcatgggattcagccattgaggtcacttgggtttagatataccaaaagtctgtgatttctctgtttgcatatatgcacatttgttgttatccttacccttttctatcagttccttaccataacatacacttaattcttggaaattcactcatgtcttacaaagatggcaaattcamacttctgctgtgtatgacacaccattaactgcacaaggacactgtgtatttgctacgttaatatttactgatgagttaatgtaataatgacccatccrcttctgctgcctgtgaggtactttctatctatagggatggaaattaatgacagaggctctctgagctgcctgatgtcagagctgagaaaggtgtgaggggtatataagagctggattactagttagcaaatgagggggtaaatattccagtggatacaagcttggactcttttcttgaagctttctttctatcagaagcatttgctgatattgctgacattgaaacattaaaaggtaaagaatttcctatttctgggaaagttttatttatttagagaaaygcacacttggtgttaaattcatggtttatttcaaagaaaggctaaagggagaatgtattacaatataaatgttcagattgcttagagaaggaaattgggaaagtaaaaatctcgaaattacttgaaaagtggacaatattaagggactgtatcaataamaattttgatccttgtaaattacgttttaaaaagatgtttcttttaaaaactaagctctaatttaaaattacrtcaattagaactgtaagaaatctcttgatttcagtgctggattattctttgcagaaaatttgagaagcaatgggcatcctgaagctgcaagtatttctcattgtgctctctgttgcattgaaccatctgaaagctacacccattgaaaggttggtaactttaaaatcctgtttctttgtaacttttgtaaagtgtgagaaaattagaattaaatactgtcaaataactacagccttagatttctgactatatcatrcttaagaacagtaccttcagctattccattgttccttgaattctgtgttctttaaagaataacaccagtggcaaataaatatctttgatggaacttctgacagacaggaatggataattccagttttgtcaagaaatatactcttggaacttagaggggcaaagccagaacatgaagcrggaaaaaaatcaaaaggtagtaatttcttctatattaacctgatactgaaacaaaccagagaaacttaactaaagcatatatttttataccaagtggattctttttgtatatattacttagatttttgttttcctcagatgtctctggaaatgttaaaaacttttacatcttgtggaaatggaaatgtatagaaataatcaggagcaaattaatgtttttaagaaatgaaayctaaaagaagtagttaaaaagccatttgctgttgggggatttattctatattgctagctagctattctgtgagtgaaacagatttataaaaagttattcttcttattacttctaagctgctataaacttaatactttttaaaattactttcagtaggtagcatgtatgtcaggatttcctgggaagtcttattacgaaaggtttcatgtcatttaaatggtaattaaggacatctaacaactatgtcacgtaaaactcttagagtagttaaaattttcaaactgagattttaaaactgtaatttatttaaagggttattaagttcaaatatgtgcataagtcataaataacatagtgaggatttgtttgtgcctaaattagttttgctccatatagtcttatgggactgaacttacacactctttaacaccaaggagaattaagtttacctttgtaaagagtgtgcatgtcatattataattcttctcattagaatgatcgtcatcttgtctttgttttccttcgaggtagtttttcttggaagcccatagcaatatgcaaagatttctacagcacctacgtataataaatagcaagaatcattatcagaggctttttgtcatttcaaggcttatttagtttacagggtgttcttctcagaactgactgtaattttctatttgctttttcataaaaataacttttaaaatgacatgaagtttctgataagcagaatatctgaatgatgacaggaaaatcagtagtatttcctagtatatctgtttatatcttgatactttctttcaatagatatagaaatttactaagcacttttaccctctcttttttttattttattttgagacagggtctctctctctctctctctctgtctctgtcacccaggctgctggagcacagtggtacaatcatggctcactgtagccttgacattctaggctcaggtgatcctcccacctcagcctcccaagtagctgggaccacaggcacctgccaccatacccagctaattgttttatctttattttatagggaaagggtctccctatgwtgcccaggctggtgtcaaactcctgggctcaagccttcctcctgcctcagtcttccaaaattctgggattataagagtgagccactgaacccagaccattatgtttttatagatgtttgtttattatgagagaaacttcacttagaaatagagcaatatgtaatataatattacttgttataaaattattttgatgttagtctcacaatctttaactttgaattattagaaatcttgtaaaacattcttcaaattgctttttaatatgttgcctgaaatgagtatgtttgaacatttgttaaagggagtatgatttgtcatgctgagatgttaaatcatgtactattctacatatctcacagaaagctaggaaaatctatggggaaaatgtgtcaaattttaaactctttttaaaaaataaaactaacattattcaatgtcattttcctcacaaaatttaatcatctcatttgagattttttcaatttgtaaatgtatgaaataggataaaaggatcacatactttcccaccaacttttttacactcccttgtaaatatctgcctggcaggtaatcaaaggatagttaaaaatataattacatagatgccaagatgcaatcactaggatctccctgcaggagctcacatacttccacagatgaatgttaaggctgagagcagggactcactttaaagtcattttgaaaactctggagagacaatttaaaagagaggcaatttaagagttatactttggcttattgtcatctctgtttaaactctcttaaagtcaagaatttccatgtgtgtatgtgcctgtaagtggtctacagctttaatgtttgttactagctcgtatgttacctgtccaggtagtcaatgagaaaaaaatgcctgaaaccagggaggtaatgccttttattaaccatttcagacaactttttccatcctaaagattgctttagatagaatcttatatatactgaatagtatatttagatgaaaagtcttttttagaaaagcaatttcacaaatatgataaaaacataaatgcttttactatttcttctaagtggaatgatggcccatctagctaactcaaataaggtaacattttatttagaacaattttaaattatattattgaccttccaaccaattatcaaaataccactcagcatttagcatataaaktatttcacactgtgcttcagtcatatgctaaacatatcttggaacagatattacctttgaaycttctcaatttgacccataattttcctttattactttttttgagatgtttggaccaaattccaatttttactgtttttcaagaaaagtaagtattttagaattcaatgcaaatgtatgaaattactagttcaatccttaaagcataaatcactcttttgaaatgtacattggtcatatttatggtaccttcaaaaataaataattgaacagatagtgtgaatgagattgatataggttaaataattagatcccaaagtggttttctttgcccagataatttgttcaaacatttgtcagcatacacttacattcaacaagtatccagttcacctaatgctgtaagaagttttctgtacttaggaagaaatatgggagtaaaatttaaaaaaaaaacagtttcacatgagattattaaatatttactcttaggctatctctacttagagatagagataatgaaatactccccacacmaggtaaacacaatgagataaatccattgcatttgagtcccagattatgcatatccactggctcctggacattgagtttttagccctataactatttcattttccatttaccctaagtttcaccaatattttgatttctatggagctgaaaactaaaacatttctctaactttcctaataatcagcaaagaggaascaatgttattattctgcatccatttccgatatcgttttaaaagcacattgaaacaaaaggctgtcaaaaaaatagagttggtatacaaataaatgtcttaaataaaaacataagttaaaattaaatgaattatttaatgtgtggttatgatttctgagtttataagtattattatgcacttcttccaggtggctagaaaaatgtgatgaatattaataccattgacataaaaagtcttttggttttaacatttaacctagtcttatcattaaaattcttgaaagcataagatccaagcaggaaaatgtatttatgctaaaagtaataaaactctcacactgcaatagagtacctgaacaggtgatagatttgattcttttggagactttatgatattctctttttttgacatactttttatgacattattttttactttattatatttcattttattgttttaagaacaaagcatgatatctacccttttaacaaatttttaagcatgcaatacattattctggattatgtgcaaaatgttgggcagcagatctctagagcttagtcatcttgcttgactgaagctgtacacccaatggttagtaactccctatttccccctctcccttgcccctgataaccaccattccactctttaactcatgaatttgactattttaaatacttcatatacatggaaccaagtggtatttatctttctatgactagcttctttcactcaacctaatgtcctcaaggttcatccgtgtgttgcatattgcagaattcccttatgacatttcttgcataacactcctgattcaattatctcaaggaacttaaagactaagtaatgctgctttattcttattggaaagatgtagaaataattatttttaaatttcttcatatttcagattacatataaattttaccttctaaattctttttatatattaaaaataaattcttcaagatttttaaaaatgtaagacaaagacactgttattttgattatatgtaatatattctgaatttccaaaggaagacttttaactgagaaatgcaacattgactgtaatgaaagatgttgtatgattttcaattgttatttcaaggtgtcaaaaaaaaatctcagccatctaggtgtttgcaaaccaaaacactgagttacttatgtgaaaattgtttctttggttttcatcaatacaagatatttgatgtcacatggctggatccagctaaaattctaaggctctaacttttcacatttgttccatgttaccagtcatcaggtggaaaagcggaaatgcaacactgccacatgtgcaacgcagcgcctggcaaattttttagttcattccrgcaacaactttggtgccattctctcatctaccaacgtgggatccaatacatatggcaagaggaatgcagtagaggttttaaagagagagccactgaattacttgcccctttagaggacaatgtaactctatagttattgttttatgttctagtgatttcctgtataatttaacagtgcccttttcatctycagtgtgaatatatggtctgtgtgtctgatgtttgttgctaggacatataccttctcaaaagattgttttatatgtagtactaactaaggtcccataataaaaagatagtatcttttaaaatgaaatgtttttgctatagatttgtattttaaaacataagaacgtcattttgggacctatatctcagtggcacaggtttaagaacgaaggagaaaaaggtagtttgaaccttggtaaattgtaaacagctaataatgaagttattcttgacatgagaaaatcagtaattggaccaggcgcggtggctcttgcctgtaatcccagcactttgggaggccgaggcaggcagatcacaaggtcaggagttcgagaccagcctgaccaacatggtgaaaccctgtctctactraaaatacaraaattagccgggggtggtgacatgtgcctgtaatcccagctactcaggaggctaaggcaggagaatcgcttaaacccaggaggcggaggttgcagtgagccgagattgcaccactgcactccagcctgggtggcagagtgagactcgtctcaaaaaaaagaaagaaaattagtaattgtaagtacccctgataagcaaattagtaattgtcaatacccctgttaagcaattcctttttgcagtrtatttctgaaatgacagaatgctgttttaaaaacaaakaaataaaatcctgctcctgactcggtcaaaatattttttaaagtctattgttygttgtgcttgctggtactaagaggcwatttaaaagtataaaactgctttgtatccatgagggtttcattgtgtgttagcagcagtgagcttctattaaatgtatatgtcatttattttgtttaagtggctttcmgcaaacctcagtcatattcttatgcagggtattgcgaaacaacttgtgttctattaatcgtgtcttcaattaaaagaccacagacttctggaaactctttgctgtataagaattatttcttttgtttaacaaattagacatttctggcagaggttatgtatatgatacactttttttgatagcagctgcaatgttggacagaagatgaaatgctttgctttsagtcagattcttatgaatatctgcttttccctgactttgagttaggtagctttggaagtagcattaattcagataaactgccatcatgctgcgttatgccatttctaaagacactcaacttgtacttttaaaaaaatagaaaaaataagcatttcaatctaagtggaaatttgactcattgacttacatttctaagttaaaatttccctttatgaagtgtgccttaggttaccaaattgtagaggctttcgttggtggtggtaagtggtagcggtagtgagtgtatagaggcagggaaatatatttataataaattctatgtcatgaattacatattgaaataaataggtgaatatacaaatttatatttgtgatgctcaattgttggtccttctttcaaagtggcctcaaacccaatatttcaaattgaataaggtacaattaaattataatctctcaaacttatttgaaaaatttcccacaatagtctacagttttattgcatatcacacctatatatgatataaataggtataacaaaatatgtaatttataatatgtcaagttataatatcaacattatatttaggtttataaatattacatatatggatttgttatttaacattataatttatttcaattcccccatctctctttctagtgttaacaaaattttaatgagtgcatatcatgttcaaggacattgcctatggtagcatacaattcccaggaattaaacaagaagaattatgaatagtaacccaacaacctctggtgctagagattaaaacatagttagagtgactctataacacaaaggttattatatggatacagcagatattaatcgaagattttattctgaagtttattcattcaatttcttacgaaagtgaaacatttaaacaaattcagcattatttccttagttaggttggtatttgcagctcagtaaggaatcaaatacataaagactgagaatacattactgccagggagcttactgagtgtattctctggtttctcacaactactttgggaaaaaaataatgagaataactaaattattgtaattggaggtaccaacagtaaaattttggtgactacgtttatcttaacctttctcattgtgtctaggtacatgaaatcataggtacccttgagtaacctgagtgagttaggcttccaagtgctagaatgggtagctaggcaaccatgagcagggaagagagggccccccaacccaacccacacccccatgcccccactgccccagcccccgaccaagaattatcaggcgactatcagctgatggtcaggtgattgttaaattgtctctctaaaataataactggtcgtagccagcaccagagaaaggtagactcccaataggtagaaaacacctaaaactgatgatcggcagcttccagataagatctcagaagttgggtgagtgggcttaagtatgtacactatgagaaaaaatgacagagtttaactggtatatgatcccaaaaataaatgcaacaaaaacaaaaataaataaatgggatgtaattaaactaaaaagcttctgcacagcaggagaaataataaacagagtaaacagacaacccacagaatcggagaaaatatttgcaaactacccatccgataaagaactagtatccagaatctaaaaggaactcgaacaaatcagcaagaaaaaaataaataatcccattgaaaagtgggcaaaggacatgaatagacatttacttaaaaaaagatatacaaatggccaacaaacatgaaaaaaatgcgcaacatcactaatcatcagggaaatgcaaatcaaaaccacagtgagataccaccttactcctgcaagaatgtccattattaaaaagtcaaaaaacaggctgggcgtggtggctcacagctgtaatcccggcactttgggaggctgaggcaggcagatcatgaggtcaggagatggagaccattccggccaacatggtgaaatcccatctctactaaaatacaaaaaattagccgggcatggtggcatgtgcctgtagtcccagctacttgggaggctgaggaaagagaatcacttgaacccgggaggcagaggttgcagtgagccaagatcatgccactgcactccagcctggctacagagcgagactccgtctcaaaaagaaaaaaaagaaaaaagtagaaaaacaatagatattcgtgtaaatgtggggaaaaagaaatgcttacacaatgctagtgagaatgtaaattagtacaacctctctggaaaagaatatggagattccttaaagagctaaaagtacatctacaatttgatacagtaatcccagtattgagtatctaaccaaaggaagagcagtgattatatgaaaaacacacttgcacacatatgtttatagcagtacaattcacagttgcaaaggtgtgaagccaacctaagtgcccatcaactaatgagtggataaagaaaatatggtatttacccactatgggatactactcagccattaaaaggaatgaaataatgtcttttgcagcaacttggatggagctggagaccattattctaagcgaagtaacaacaagagtggaaaaccaaaaactgtatgttctcacttacaagggggagctaagctatcagttatgcaaaggcacacagagtgatataatggactttagagattcagaagcgggagggtgagagggggccaggaataaagaaccatcagtcagatataatgtacgcttcttgggtgacaggtacactaaaatgttaaaattcaccactatataattcatcggtgtaaccaaaaaccacttgtaccccaaaagctattgaaataaagaaatgataataaatttttaagaaagaaaatggctgatgcggtggttcacacctgtaatcccagcactttgggaggccgaggtgggcggatcacaaggtcaggagttcaagacaagcctggacaacatggtgaaaccccgtctctacaaaaatacaaaaattagccgggaatgatggtggaagtctctaatcccagatacttgggaggctgagacgggagagtcgcttgaacctgggaggcagaggttgcagtgagccaagatcatgccactacactccagcctgggcgacagaagaaactccgtctcaaaaaaaaaaaaaaaaagaaagaaaagaaacgaaaaaagaaagaaagaaaatgagctgacttatctaagatcacatagtcaggatggattcaggattgaaactcaggtatattgactctgaagtgcagacaatttctctacatcatgtccaaataaaaatatttttcttttactcccactttgcactgtgttttattaaatgtcagaccatgccaaatcagtctgtcttgaaactggacacacaggtcaggcaaaagaagaatgggactaaaatagttattcactttgtctgatattgagaataacaatctttaccctacccattatgagatacttttgctttgttttattttgttttttaaggttttaactggaagaaagttaaaaaaaattcaatacacttactaaatatttccaacactgaaagattgctggtagcacatcttttttttcttccaaaatccaaatgggattgtcctattttctttgttccgtatacaactaagaacattttcttctatggttcaataaaacctttgccgactaagtagacccacatcctatagctggtcccttaacgtcctccccatggaattttggtctatattttcatctgcctcattactgcttcccttgtgcattaaccatcccataccccacactcacctgcctccacgttcttgctttatacaacttgctgccttgaaatatcctttcctcacctctgggatctacactgtaccctggttctgctcaaagaccacactgtccatggagcctatcatgattctttccgtcatacatagataagagtctcacacagataagagtctatgtaaatacaggtcctgaatttacatagacattccctcagtcactgaacatgtttagtgagcttatttttatatttgatatgatattagtggttgggattttgagaccacctagaagaagttcacaggttctaccttattttttggttatgtatgctcaagtgttatttccccatccagcctgtaaactaactgaggtgaaggatgtatgagtcatctctgtaatccccacaacatttaagcccattatgtgcctataacagatgcacaatacatattggttgaatacatttactctaggaataatgaaaaaacaaattattttaatataaatttataatttaatacagtgtgattaagttgatagagtgtggcatcttatactccctttgtaaaacggatagtaatatctatcttgaatagttttcttgaagattagaaataaaatatgcaaagtatctggtatatttttaatgtccaatcagtgataactgaattaacaatgataactacacaaaccaaagaacagtatggtattacagtgggtactttctaaattcattttattaagaattttaaaagagacagagaagaaaaaaaagtcagtcacaaaagcgggtacaaaacaatgcagagaaagcttcaaagatgaacaaaaaggaaaatagaataatgaaattaatctacccaaatcctaaatgagatttgcataagtagataccttccctgctccaataacaaaatgacacaaagaaacttgtaccgcacaaccacatctagaattacgaaatgcttaaagaaccataaagatactggctctgaaaatccaccacttctctgtgggaacattccttatggtatttagaacaaaggttatcatcagtaggaagtggcacacaaacccttaaaaggatatcacagacaatatagaaacagcatatctggtaagtttatcagggttgtaagtagattagaatagcaggaagaaaatctaaaatactaaaaaggtataatttaagtagttagaaatcttaccacatagataacaaactgcattaataaactttttaaaacttgaaatcatggaaaggcattataaaaagaaaaattaaatatatcaaaaaaatatgtccacttagtttttttttcttttttttttttttgagtcggagtctcgttctgtcactcaggctggagagcggtggcgcgatctcggctcacttcaagctccgccttccaggttcacgccattctccagcctcggcttcccgagtagctgggactacaggctcccgccaccatgccgagctaattttttgtatttttagtagagacggggtttcaccttgttagccaggatggtctcgatctcctgacctcgtcatccgtccgtctcggcctcccaaagtgctgggattacaggcgtgaaccacttcgcccggccagattttttttaaaaactcttttttaccttcatggacataatgccctgattatcatataaatatataaatatgaaacctctgcaattgaaatgctgaaaatttagtataagtttacgtgaaagctaggaggctgtggtcccacatacagctataactgttataaaactctcttctggtttctgatcactcacttctttgtattgactccatgcctccactttgtaaatacaaataacctgatcaagcaacagatcttgagcagaaactctgtccagaatttactccataaccttctataatttgaaattcattcttgtgcataagtgcttttcagttgaagaatctctcattaaaagacaaatccttcttgaaataaaaactctcatcaatatcaactaacagttgaagttagctaacagctggttaagagcaaagctctaagagaacaggataggcaccttaagcaagaacattggtagaggactggtaggggtaaactgtgaggaaagcaaaacggaaaaagagcaaaagagaagggcatgaaggagtcctattaccgtacaatgtctctggttgggctttgagacccatatacatttgcaatcacttttcttcacacagctgggtgtgataaggatttaaagcatctattccactctggttttgaaatcctaatatgttaacctggaggatgggtagaggaggctggcatgacaagacagggaaaggagcaagacaacagaaacagatttgtttttctgaagcttcatcagccttctgaaaacagtatttgatccttacgaggtgcttagaaaccatatttttccagaacccctcctgcagaaaagccactggaaaataaaagaggatatgaaccagaaccaagcccttggagtacccagatattcaaact
